United States Patent Application Publication US 2017/0114356 A1 - sequence listing, part 89

SEQ ID NO: 143529 - DNA, 1829 bp, Zea Mays
gcaaggtcatctcaatcacaggccacagctattagcttttagccgctggcagacaaattcgacagagcagctcgcctgctggccgcaatccgtccgaccatggcattgctgccgggggcggcgcggcgcctcctctgcagcctcttcctctgtctctggctgtccacgctcgcgcgtgccgcgacgcgccgctacgagtgggaggtcagctaccagttcaaatcgccggactgcgtgcggaagctctccgccaccatcaacgggcagacgcccggcccgaccatccgcgccacgcagggcgacaccgtggaggtgaaggtcaggaactcgctgctgacggagaacctggcgatccactggcacggcatccggcagatcggcacgccgtgggcggacggcacggagggggtgacgcagtgcccgatcctccccggggacaccctcacctacgccttcgtggtggaccgcccggggacgtacatgtaccacgcgcactacggcatgcagcgctcggcggggctgtacggagtcgtcgtcgtcgtcgtcgcggcggcgcccggagccaaggccgacgacgcggagccgttcgcctacgacgacgagcaccacgtgctgctcaacgactggtggcacaacagcacctacgagctggccgtcgggctcgcgtccgtgccaatggtctgggtcggggagccgcactcgctcctcatcaatggccgtgggaggttcaattgctcggcggcggccgtgccggggacctgcaacgccaccagcccggagtgtgacacgccggtgttcgccgtcgtgccgggacagacctaccggtttcgcatcgccagcgtcacatccttgtccgctctcaactttgagatcgagggccacgaaatgacggtggtggaggcggacgggcactacgtgaagccgttcgtggtgaagaacatcaacatctactccggcgagacctactccgtgctgatcaaggcagaccaagaccccaaccgcaactactggctcgcctccaacgtcgtcagccgccagcctgccacgcccaccggcactgccattctcagctacagcggtgaccgcgcaccgccatcgacgaccccgcccacgggcccggcctggaacgacaccatgtaccggttccagcaaagcgtggcgacggtggcgcacccggcctacgtcgagcctccgccgccgcgcgccgaccgcaccatcctcctgctgaacacacagaacaagatcgacgcgcacaccaagtgggcgctcaacggcgtgtccttcacgctgccgcacacgccctacctggtggccatgaagcgggggctcctggacaccttcgaccagcggccaccgccggagacgtacgcctaccaggggtacgacgtgtacgctccgccgcagaacccgaacgcgacgaccagcgacgggctgtaccgcctgcggttcggctccgtcgtcgacgtggtgctgcagaacgccaacatgctggcgcccaacaagagcgagacgcacccgtggcacctgcacggccacgacttctgggtgctgggctacggtatcggccgcttcgacccggcggtgcacccggcgtcgtacaaccttaaggacccggtactgaagaacacggtggcggtgcatccatatggctggacggcgctgcggttcaaggccgacaaccctggagtgtgggcgttccattgccacatcgaggcccatttcttcatgggaatggggatcgtcttcgaggaaggcattcaacgtgtcgccagtctcccgccggagatcatgggatgcggggaaactaacggtggacaccgatgattata

SEQ ID NO: 143530 - DNA, 652 bp, Zea Mays
aacaacatgtttgtttgtcaaaacattttatacacgcacgatttgtagtcatgcataatagggaactatgttggaaggtccgaatgctaaattagtcactaactctttgttactgaactaaggttgctgatgtgtggtcatgcggagtgacgccatacgtgatgctgacgatcaccatccatggttcttgaaaaacctcctagctgacctaatggatgacaatacgatgagtaagcagtacgaggagcctgaacaactgatgcagagcatgaataagttcatgcagatcctggttgaggcgaccattccagcagttggttcacgtggactcaattagtttctgaatgatgacattgacctcgacgatgacatggaggacctagactcaaatgccggtcttgacctggaaagcagtggggagatcgtgtatgctatttgacaacattgaatactttgttgtgtcgcaggttaccaagataattagagacaaggggcaggttgttgtgcttgcaagtatctgctgcagatgttgttcatgcctgatgctgatgcctcttttcatactgttgtgtttggatggtgtaccaccagtgttttacaacagtttggcccttggaattgctattgctaaaacttggttcctttgagaaga

SEQ ID NO: 143531 - DNA, 543 bp, Zea Mays
attgctagctacctagccatgagcaccggcaccatgcccatcgcgagatgcgctgccacggttaacaacaccgcctgcatccctggccggaagcgccgctgctgcaacgtgacagcaagggcgacggcaacgtcgtcggcggcgggcggacgggctccgggcagcacaaggagggactactacacggtgctgtccctggagcagcacccggccgcggaggacgtgggcgcggaggagatcaagcgcgcgtaccggcggctggcgctgcggcaccacccggacgtgtgccctccgtcgaggcgcgccgagtccacggagctcttcctcgagctgcggcgcgcgtacgagacgctctccgacccggcgcggagggttcggtacaacgctgacctgaggggaggcactggcggggaggtggcgagccccggcggcgtcgtgttcgcgaggcacgtgtgggagtcccagctggccgtgctgcgcgcgcactccgagcaacgccagcgcgcgcggagcagccagagccagccgcagcggccggtctga

SEQ ID NO: 143532 - DNA, 1765 bp, Zea Mays
accaatcatttctttgcaatctgcagcctctgcaaactgatcgcgttgctggttgctggtaatcatcggaccagtccacagatatcggaagctctcttgctactgatggcgaagcccagcgtggcggtgccggaggttggcgtaccagcggcgcaggcgtcgtgcacctgcccggggacgctgctcgcgtacccgccgccgcgtggcgccggggtcgcggccgccgtgcggcgcaagtgcctgcaggtggagctcggcgcgggggcgggcctgctgggcggcgccggcgcctggggcgtggagtccatgcgggcgtcgtcgcccacgcacgccagggccgcggccgcgctcgccgccggcggcggcgtcgatgtcgacgtcgacgaggagcgcgccgccagctggatggcgcggcacccgtcggcgctgggcaggttcgagcggatcgtggcggcggccgagggcaagcggatcgtcatgttcctggactacgacggcacgctgtcgcccatcgtggacgaccccgacgccgccttcatgagcgagacgatgcggatggccgtgcgtagcgtcgccaagcatttcccgacggcgatcgtgagcggccggtgccgcgacaaggtgttcgagttcgtgaagctggcagagctctactacgccggcagccacggcatggacatcaagggtccggcggccgccaaggcctcctcttcttctcggcacgccgcaaaggcaaaaggagtagtgttccagccggccagcgagttcctgcccatgatagaggaggtgcacgagcgcctggtacagacgacgcgctgcataccgggggccaaggtggagaacaacaggttctgcgtctccgtccacttcagacgcgtcgacgaaaagatgtggggcgagctgtcagagtcggtgaggggcgtgctgcgggggtacccgaagctgcggctgacgcacgggcggatggtgctggaggtgcggcccagcatcaagtgggacaagggcaaggccctggagttcctgctcgagtcgctcggcttcgcggactgcagcagcgtgctgcccgtgtacatcggcgacgaccgcaccgacgaggacgccttcaaggtcctgcggcgccgcggccaggaccagggcgtcggcatcctcgtgtccaagcaccccaaggagacgagcgcctcctactcgctccaaggccccgcagaggtgcgtgcgtgagcgtgacccaccaaaagcatccgtttcgatcccgtgtctacgtcctcgtctccctctctccgcggccccgcacagtgtgccctggaccaccaccagcacggcaccactaccggtggccggcggtggggttgcggccgatctcacgtccgtttcggtcgtcctgtgcaattaccgccaattcgcctactccgccgccgcgttgctgacgttgcctagcttgtggatgtgcgcaggtgatggagttcttgctgcggcttgtcgagtggaagcgcctctccagggccaggctcaggctgcaatgagatgagacggcgcaactgccgtacgtggacacgtacgacgatgcaacggattaagctaactgccaagtgccagttaattaagttaagatcctgcctgctacgtggaatcgtgaacggcactgtctctctactgtccccccgtagtgatcagcatgcatgtacatcgttgtctcatacagtactagctagttagtactaagcatgcctgttacatatatatagcttcatgtgaatgtgttgtactg

SEQ ID NO: 143533 - DNA, 1050 bp, Zea Mays
atgaagaagacgatggcagtgggaggaggtgggaagggaggcacagccgctacggacctcctggtgtgcttccccgctcggcagcacctggcgctgatgcccaagcccatctgcagcccgtcccggaccaccatggacaaggcggcggccgcgcgccggcgccagctccagcttcctggcgcaagcgctgccgcaggtggcgggagagcgcgcgggagcagtagcgccatgttctgggggtccaaggcgaggcagaggccggaagaggaagaggagccgcagtcgccgaaggtcacgtgcgccggccagatcaaggccggccgccccaggaaggtgaagccgggctcggaggcagcgacgaagcacggcaagggcggcgccaagagctggctcgccgtggtggaggagatcgagcggctgcgcggccggcggaagaaggtgggctggctcgagacgctcgggatcaggcgggacgcgctgccgttcctaggcggcgcgctccggagcctgcggtccaaggcgtgctgctttgggtccctccatgccggtgccgcggccgtggactcctccgttgactccgaccacgacgcgggggagcgtgggagcgagcacggagccggagggagcgccgcggccagcgtgttctccaagtggctcatggtgctggaaggcggccaggagccgatggagcaagacgaaaccagtctcgatcacggccaggaagaagacgtcgagctcgagcggcagcagtgcgaggagaccgcgccgccgccgaacgcactgctgctcatgcggtgccgctcggcgcccgcgaggggacgactgtccgtgtccaggaccaggagggagtgcgagcagttggccggcgaggtcgaccaagagaaggaggcagcggatggcatgccgggagacggtgaaacagaggatgagctggtgttcttgagcacggcgcctggcttcatgaagctgtcactggacatcgccaaggagacgtgggtcgtgggcggcggcgcggacccgatcgcgaggagccggagctggaagaggtga

SEQ ID NO: 143534 - DNA, 1040 bp, Zea Mays
cagcttccatatcccgcattcgcgctggcagcctggcgctaaccctaaccctcaccgcctggccctcacgaacacagccgccgcccgctgtgcccagccttccgccgtccgccgagccatcgaggggagaccgagccttccgccgctgcccgctgtgcccagccttccgcccttccagccacgcgctgacgccgtccgcggtccgccgctgtgcccactgcccactgcccagcggccccagctgtacggccttctgtgccgagccggcgagtcgccgttcgctgctcggctgctgtgcccaggcggccaggcgcccagccctccagccacgcgcccaggcgggccatgccacgcctgtgccttccgcggtcctcctctgtgtgcctgtgccttccgagctgtaacaagttgatatatttggaggattgttcaaagggcttgatcttcaaaatattaagaaggcatttcaaaagaaggataggcaaatacaattgcctaggtctccaagacatatatagcaaaatcagagttgtgtagagccatacctaaatttttatccgtcctccgccactgctgctgggctttgtggaagcggagaaataggctaatcttctatggcggcatcgcatgaaaattgaagagcgttgggtagttgatgtctggtgtgcaaaactaatagtggcaatagtcaaagtatggcatgaagattacaccactttttatcacaattgatcctcaacgtgattcaccttctcagcttaaggcatactttagtgagtttgagtcaagaatagtaggactaacaggccccatcagcgcagtaagacagattgctcagggcttccaaactagtcctaaaagagtagagaaagttggtcatgactatcttgtagaaagctctcacaacatgtacttgttagatccatatttggagacagtaaggtgctttggaactgagtatgagaggcatcagaccttgctgaggcgataacaatagaggcccagaaagcatctgcttcatcaacaaactagtttagcgg

SEQ ID NO: 143535 - DNA, 183 bp, Zea Mays
aaccagccgggacggctacggcgatgagcggatacagtcgttgttggaagggtgggacaagatgtacatgtgcaggatgatcaagagctgcacgtacggcgacgtgccccaagagctcgaccccgccgcggccatctctgccacgaaggcactgcacgtctgcatgcaccaactctgcaaggc

SEQ ID NO: 143536 - DNA, 1818 bp, Zea Mays
cggctggctacaagccgacactgttgcagctgtttggactgctgcagctgcaatccatagagagaaaaatactgtagaagccgcagccgcagccggattgcagccgcagcaagccgcagcgaacagcctccaaacaccagagatccctggaggctggcagcagcgaggaatcgaggattatagtagttaatcgtacatgtgctgcaaagtctttactgcccttgaaaggttcctcggtctcggtctcactcttctcccccgtcgccgttgactacaaggcacggcgctggaggtggtggcagcagcacgcaaatggcggagcagcagggctggaggcagcggcgctcgcggaggacgacgctgcttttggcgttcgcggcgctggccatggagcgcgccgacgcggcgctgctcccggcggtgtaccgggagatcggcaccgcgctgcaggcatcgcccacggcgctcggctccatcgcgctgtcacgctccgtcgtgcagaccgcctgttatccgttagcggcgtacctggcggcgcgccacgatcgcgtcaccgtcatcgcgctcggcgcgttcgtgtgggcggtggcgaccttcctcattggcttctccaccaccttcccacagatggcggtgacggcggctttgaacggtgtcgggctggcgctgcagatccccgcgatctacgccttcgttgccgattccgtggacggcgccagcaggggcatggcattcgggtggctcgccgtggctggcaaggccggcaccgtggctggcacctccctcggcctgctcatggcgccgacctcattcctggggctaccgggctggcggctcgccttcctcttgcttggcgtcttgggggccgcggtcggcgtgtccattcgcgcgttcgccgcgagcgacggcgcagcaagaggccgcgtggtggtgagcccggccacttccaagccagtgaggcaggaagtgcaggagttcgtcagggaggccaaggccgtgatgcggatcccgtcgttccaggtcatcatcgcgcagggcctaaccgggtcgttcccctggtcggcgctgttgttcacggcgatgtggctggagctggtggggttttcccacggcgagacggcagcgctcatgacgctgttcaaggtcgccacgtcgctgggagctctcttcggtggcaaggtgggggacgtcctcgcccggcggttcaagaactcgggccgcatcgtcctctcgcagatcagctctgcttccgcgattcccctctccggcatcctcctcctcgcgctccccaacgacccgtcctccacgctcaagcatggtgccgcgctgttcattttggggatcatggcctcctggaacggcacagctacaaacagcccgatactcgcggagatcgtcccgccgagggcaatgacgaccgtgttcgcgctggaccggacgtttgaggcagtgctggcctcgttcgcgcccccggtggtcggcctcctcgcggagcgcctttacggttacaagctagcccgatctgcaagtggcggcggcgtagacgagcgcacggctatcgacttccagatggagcggcacaacgcgacgtccctcgccagggcgatatacacctccattgccatccccatggcaatgtgctgcgccatctactcgttcttgtactgcacctaccccagggacagggagatggcgcgggctgaggcggcgcgaaatagaggggattatggcgatgaaggatttggatccgaggacgaagacaatggcgagaggaagctgctgccgcagtgagtccctatggtcactggtcaggttcga

SEQ ID NO: 143537 - DNA, 1817 bp, Zea Mays
gacccagatcgcccgccggtggcttggctacttgcttgcttgctgagttgctgactaatggcggccattccgagcggagcgatagcccaagccggagctgagcgtccggcggcctgaacaggagaggcgagagagagagggtgcaggtaccagaagaatgggtccgccgccggagaagcggcggacgctggtgctggtgaacctggcgtccatcatggagcgcgccgacgaggcgctgctgccggcggtgtaccgggaggtgggcgccgcgctgcacgccacgcccacggggctcggcgccctcacgctgtaccgctccatcgtgcaggccgcctgctacccggtggcggcctacgccgcgtcgcgccacaaccgcgcccacgtcatcgcgctgggggccttcctctgggccgccgccaccttcctcgtcgccgtctccgacaccttcctccaggttgcaatttcaaggggcttgaacggcattggtctagctctcgtcataccagcagtccagtcgctggtagccgactccactgacgacgacaaccgcggcacagcattcggatggctgcaactgaccagcagcatcggctccgtattcgggggattctttgccttactgctggcccagactacagtcttggggatcgaaggatggcgtattgccttccacctcgtcgcgatcgtcagcgtcatcgtcggcaccctcgtgtggttcttcgccgtggatccccatttccccacaaacgatgccgcaccaccatccagcaaaaagtccgcgcttgatgaagcaagggaactgatcatggaggccaggtccatagtccagatcccgacgttccaggtcttcgttgcccagggcgtcagcggctcgttcccgtggtcagcgctgtcgttcttgtccatgtggctggagctcgtcgggttcagccacgaggacaccgccgtcctcacgaccaccttcgctgtcgccacctccgtcggcggccttcttggcgggaagatgggggattcgctcgctcggcggtatccgaacgctgggaggatcgtgctgtctcagataagcgccggctctgctgttcctttggccgctgttcttctgctgggcttgcctgataatccgtccacgtccagtggtgttgcccatggacttgttctgttcgtcatgggactcatcatctcttggaacggagctgctacaaactgcccgatttttgcggagatcgtgcccgagaagcaaaggacgagcatctacgctctggacagaaccttcgagtccattctggcgtcgtttgcgcctccggtcgttggcctgttgtcgcagcaagtctacggcttcaaacaggacgacggcagagggagcagccctgggcaagaccgggagaacgcggcgtcgctggccaaggcgctgtacacggccatctccataccgatggtcatctgcacctccatatacacgttcatgtaccgcacctaccctcgagacagggagcgtgcgcgcatgcagtcggtgattcagtcagagttggaccagattgagctgctgggcggtccgagtttaggaggcggcggcgacggcgacggtgataaacctgacgaggttgatggcagttatggttctgaaagatctgctgaggccgatgccggcactgaaaaactactaggaaggaaaccatgagttgtgacgaacagaagaacctactaggaggaccattcatgttgaagaggatgatagatgttcctgccgattttaggaacttgtaattgtaacacgacgatcaatatgattcactaaagtgaccgttcttttttcttcc

SEQ ID NO: 143538 - DNA, 1608 bp, Zea Mays
ggcggccaccccgatgccgaactaaacttcccatcccatcccgcggcgagaggagaggaactcggacggatggggccggcggcgtgggagcggcggcggacgctggtgctggtgaacctggcgtccatcatggagtgcgccgacgaagcgctgctgccggcggtgtaccgggaggtcggcgccgcgctccatgcgacgcccgcggggctaggcgctctgacactgtgccgctccatcgtgcaggccgcctgctacccgctggccgcctacgccgcggcgcgccacaaccgcgcccacgtcatcgccgtcggagccttcctgtgggccgccgccacgttcttcgtcggcgtgtcggataccttcctacaggttgcgatctcacgcggcctgaacgggattggcctagctctggtggtgccatcggtccagtccctggtcgccgactccaccgaggagggcaggcgcggcacggcgttcgggtggctgcagctcgccagcagcctcgggtccatctctggcggtttcgtcggcctgctcctggcgcagaccacggttctcggcgtcgccggctggcgtgtcgcgttccacctcgtggcggctatcagcgttgcggtcggggccctgaactggttcctcgccgtggatccccatttcacgacgagcgagaaagttggcgtcccggcggtcggcaagcggcctgccaccgcgcggcaggtggtggcggagatgatcgaggattccaagttcgtggtgcggatcccgacgttccagatcttcgtggcgcagggggtcagtggctcgttctcgtggtcggcactgtccttcgggtcgatgtggctggagctgatcgggttcagccacgctgacaccgccgtgctcatgaccatcttctgggtggcctgctccctcggcggactgctcggcggaaagatgggcgacgccctcgccgtacggtacccagacgccggcaggatcgtcctgtctcagatcagcgccggctcggcagttcccttggccgccgtgctgctgctggggctccccgaggacccgtctgccggagttgcctacggcgtcgtcctgttcgtcactggcgtcctcatctcctggaacggacctgccacaaacttccctatcatggcggagatcgtcccagagaaatcaagaactagcatatatgccctggacgggacattcgagtcagtgctggcgtccttcgcgcctcccatcgtgggactcctagctcaacgtgtgttcggctacaatccagacgacaaggggaagagcgttcaacgggatcggcagaacgcggcttccctggccaaggccttgtacacgtccacagcgataccattcatagtctgcacctccatatactcgttcttgtactgcagctaccccagggacagggaccgtgcgcgcatgcagtctttagtggaatcggagttgcgacaaatggaggagcaaggaacttcttgcctggaagacggtaatggacatcgggacgatggtcaactagatggagttacctgtgacagtaaggagctgggtgatgaggccgagatggatactgtaagattgttggcagaccgtgaaccgtgagatgagcaa

SEQ ID NO: 143539 - DNA, 1630 bp, Zea Mays
ggagaaggaatgatcgagcgagatataaaaaaggctggcaggatggatcagcagcaggagcaggaccggcggcggacgctgctgctggtgaacctggcgtccatcatggagcgtgccgacgaggccctactccccgcagtgtaccgggaggtgggcgccgcgctgcacgccagccccgcagggctcggcgccctcacgttgtgccgctccatcgtccaggccgcctgctatcccctcgccgcctacgccgccgcgcgtcacaaccgtgcccacgtcatcgccgttggggccttcctctgggccgcggccaccttcctcgtcggagtctccgacaccttcctacaggtagcaatatcacgaggcctgaacggcatcggcctagctctggttgtgccatcgatccagtccctggttgccgactccaccgacgacggcacgcgcgggtcggcgttcgggtggctgcagctcgccagcagcctgggactcatctccggtggcttcgtcggcctgctgctggcgcagaccacggtcctcgggatcgacggctggcgcgtcgccttccacctcgtggccgccatcagcgtcgccgtcgggatcctcaactggtccttcgccactgacccccatttcccgaggggcgacgacgacgccagcgtccgccgccagctcgacgggaagcaggctgcgacgacggcgcgggaggtcgtcgcggagatgatcgaggaggccaggttcgtggtgcggatccccacgttccagatcttcgtggctcagggggtcagcggctcgttcccgtggtcggcgctctcgttcgcgtccatgtggctggagctcaaaggcttcagccacagccacaccgcggtgctcatgaccatcttctggatggccagctccctcggcggcctcctcgggggcaagatgggcgacctcctcgccgtgcgataccctgatgccggcaggatcgtcctctcccagatcagtcccctctcggcggtgcccttggccgccgtgctgctgctgggcctccccgacgacccgtccaaggacgtctcctacggcgccgtcctcttcatcatgggcgtcttcatgtcctggaacggtcccgccacaaactttcccatatttgcggagatcgtcccggagaagtcaagaacaagcatctacgccctcgacagatccttcgagtcagtgctgtcatcgttcgctcctccgatcgtcggcctgctggccgagcgagtgtacgggtacaggcccaacgacaagggggagagcgttgagcaggaccgggagaacgccgcgtccctggccaaggcgctctacacgtccatagcaataccgttcattgtctgcaccgccatatactcgttcctgtactgcagctaccctagggacagggagcgcgcgcgcatgcagtcgctgatcgagtcggagctccagcagatggagcatgagggctcctgtctggaactggaagacggcgatggtggtgtgctgcccaaggttctcggcccggcgaacgacggtgaaagggctaccattagcgttacctatgaccacaaggaggctcctgaagctgagaaggatactgtcagcctattggcaaaccgggactcatgataggaaatcgaat

SEQ ID NO: 143540 - DNA, 2347 bp, Zea Mays
acatttgctagtagaaaaataaagtcaccaccaaccaaacactccaaaataaactgcttgcccacctaggcccatccacgcagcccaaaccagtttagagttcgaactccgttgggttcgtctcgttttggtcccacgttctcgcagctgacgccgccccgttcgcctccgtcgccgccgccatcgccaccgccgaaccatggagaccacggagccgtcgcgtggcaccaagcgccctctcaccgccactgcaggcgatgacgacgatgctggcctggagcgcaagccgcggttccctaaggggaagaaggccaagtaccgcgacgtcggtgcggagggaggcccctctggcaacgctgtggacctcgacagcatgctgaatccggagcttgcggcggagcggcgggcgcggcagcgccacgtccagctcaaggagggagacgacgcgaagggaggtgccgctgaggtgaagggcttcgaagtccgctacaacgacagtgttaactttgttgacgatggtatacggatagagccgtttaacttggagcgagaaagggaagaagggtatttcgatgagaatgggaactttgtggagtatgcaagaggcaatgagattaaggatgcttggttggacagtgtggaagttgacccaacatatgctgcaaaggttcagaacaaaggcaaagagaaagtagacgagtttgaggacctctcttccgatgacattgggaggctaaaaaggcagatagcaaacttgcttgagccaggagaaacgataatgcaagccttgaaaaggttgaagggtacatccacggataaacgtggaaagatggctgaggggactaaacgtatatttgatgaattgactgaagctgccatgaagctaatggagaacggcgattataatgtttactcagatgatcgtgagacctttgaacgcgaggctgctgggtatgaacgtttggcacgtgctcgacttggtttgccagaagttgatggtgtctctgaagaccaaaaatataatcagacaccatcatctgcactggaaattgaccaaccatcatctgtactggaaatggaacttggtccctcgactgccaatgtatatacagccactgctgcaatcaatgatgatgacagtaacctggacatgtttggtgatgatgacaacgatgataccaaacatagttctgatgccaatactgtaggttcaggtttgaaacctggaacctcagatgtgaagaaagccgataatggaagtgtggactcagactatgtatacgatccttcttcaggttactactatagcagcagcacaggctattactatgaccctaactctggatattatggttctgcatctacgggaacctggtattcatacgatgagcaaactggaacatacaaagaaattcaggatgaacaaactggcacggttaaagaagagctgggagatgccatcaaggagtaaccgagttgctacggcccttctcgttcttgattgctgatgcaactgaggtagttcagaccgcccagtgttctttaaagcgaggcagcgagctgtagcttcagtttctcggtaggcgctttgggccacgactcgctaaactgccttgatagatgttttatgaagaaattaagaggaaaccagtcagatcatactataggttgtaaaccagaaagtgatcgactgcaactgtacaattgcaatattaccgttctcggcagaggcttgttttattagctactattcctgctatttctgtagaaatatgcaataacacccaattcctatgtgaagatgtgtttgaacttaacagatgagaacgttatgtttggtgtgattatgtctaaggctcgagagcgttcagattggtaaactaaatcgggcaacctgtgatcgttggagtctaagaccggcgcggggacagtcaggcagagaaaaggttcggaggttggagacgcttcagggttgttcaatcttactgtactctacaacctcttcccgaaaaggtgggaacaatattttagaccgacaacgtcttctcgggaacacggttaggccctgtttacctgtttcgacgccaaattctctcccctgtaaaaactacacttatttctgtaaatttcctgtaatatttttttttgtgaaatttctgtctcaaacaagcctatggatagttttttagctatacattggcgaagtatttgtttttatgttccaacatgtattcttttctttcttttgggaatgggctgcggccctgtattccggagctcagtaccacagaccacacacaataacacgagccagcttcagtaatcgtagattacttggatgactgcc

SEQ ID NO: 143541 - DNA, 2227 bp, Zea Mays
ggagttgctctaatatatttattcagttatattgtagagacacatttgctagtagaaaaataaagtcaccaccaaccaaacactccaaaataaactgcttgcccacctaggcccatccacgcagcccaaaccagtttagagttcgaactccgttgggttcgtctcgttttggtcccacgttctcgcagctgacgccgccccgttcgcctccgtcgccgccgccatcgccaccgccgaaccatggagaccacggagccgtcgcgtggcaccaagcgccctctcaccgccactgcaggcgatgacgacgatgctggcctggagcgcaagccgcggttccctaaggggaagaaggccaagtaccgcgacgtcggtgcggagggaggcccctctggcaacgctgtggacctcgacagcatgctgaatccggagcttgcggcggagcggcgggcgcggcagcgccacgtccagctcaaggagggagacgacgcgaagggaggtgccgctgaggtgaagggcttcgaagtccgctacaactgttaactttgttgacgatggtatacggatagagccgtttaacttggagcgagaaagggaagaagggtatttcgatgagaatgggaactttgtggagtatgcaagaggcaatgagattaaggatgcttggttggacagtgtggaagttgacccaacatatgctgcaaaggttcagaacaaaggcaaagagaaagtagacgagtttgaggacctctcttccgatgacattgggaggctaaaaaggcagatagcaaacttgcttgagccaggagaaacgataatgcaagccttgaaaaggttgaagggtacatccacggataaacgtggaaagatggctgaggggactaaacgtatatttgatgaattgactgaagctgccatgaagctaatggagaacggcgattataatgtttactcagatgatcgtgagacctttgaacgcgaggctgctgggtatgaacgtttggcacgtgctcgacttggtttgccagaagttgatggtgtctctgaagaccaaaaatataatcagacaccatcatctgcactggaaattgaccaaccatcatctgtactggaaatggaacttggtccctcgactgccaatgtatatacagccactgctgcaatcaatgatgatgacagtaacctggacatgtttggtgatgatgacaacgatgataccaaacatagttctgatgccaatactgtaggttcaggtttgaaacctggaacctcagatgtgaagaaagccgataatggaagtgtggactcagactatgtatacgatccttcttcaggttactactatagcagcagcacaggctattactatgaccctaactctggatattatggttctgcatctacgggaacctggtattcatacgatgagcaaactggaacatacaaagaaattcaggatgaacaaactggcacggttaaagaagagctgggagatgccatcaaggagtaaccgagttgctacggcccttctcgttcttgattgctgatgcaactgaggtagttcagaccgcccagtgttctttaaagcgaggcagcgagctgtagcttcagtttctcggtaggcgctttgggccacgactcgctaaactgccttgatagatgttttatgaagaaattaagaggaaaccagtcagatcatactataggttgtaaaccagaaagtgatcgactgcaactgtacaattgcaatattaccgttctcggcagaggcttgttttattagctactattcctgctatttctgtagaaatatgcaataacacccaattcctatgtgaagatgtgtttgaacttaacagatgagaacgttatgtttggtgtgattatgtctaaggctcgagagcgttcagattggtaaactaaatcgggcaacctgtgatcgttggagtctaagaccggcgcggggacagtcaggcagagaaaaggttcggaggttggagacgcttcagggttgttcaatcttactgtactctacaacctcttcccgaaaaggtgggaacaatattttagaccgacaacgtcttctcgggaacacggttaggccctgtttacctgtttcgacgccaaattctctcccctgtaaaaactacacttatttctgtaaatttcctgtaatatttttttttgtgaaatttctgtctcaaacaagcctatggatagttttttagct

SEQ ID NO: 143542 - DNA, 1818 bp, Zea Mays
ctctgctcatcaactactagagtctagactcctgtataagcgcaaaagacagttgtggggggtttctggtgggtggggttcatggtcatggcgcagccgccggaggagcatcatgagcaggagaagcaagccagcaagggggagtacgacccgccgaacgataagctgattgagatgatggtgggtctttccatctataaccagcaggctgccgtggcgctaccgctttccatctataaccagcagaccaccgccgcacaaccgcggctgtgcgaggtgcacgacgctgcggcggcggatagcttctcatctgcttttcttgaggctcgtcgcagtatcatcgatccgcgagcatacgtgccgccgcctccgatagggcagaaagccggtccgtcagcgccgtcgcagatgcatcctggattggtgcggatgccgctgccgccctacgatcgtagcgtgcctgacgcgcgatccttcgcggaaggtcgacttcggcgcagcatagctcgtgggccccggaacgaggccgtgggcatgctctcgcctggcgcaatcggcgcagcttgcggcgcccaccctggcggccacgcgtatatggcgccgccgccctacctacacggtggaacggaggaagccttgctcctcgcgctgtccgaggaaacccccgagagtatcgtgtcgtacgcctgcgacctcttggagagcagacatgggcagcggctgttccgtctggtcctcaatcactgctgccaacagctgcgggatcgaatcgttgctacgatcacctgggacaggaagagtttcggtagcctttgcacccggaggccagatgaagtagttcatataatcagttcctgtgaaactcggagatcaatgcagcttcttggagatgccatgctgcaatggatgtcacataatcagatgaggtaccttctgtcggattcgaaaagattaaaagtgctgcaggctttcataatgagctctcctccggatattgctcagttcattctcaaagctgttgctcaaaattgtacaagacttgcatatcaaccagatggactgagcctactgcaaaattgcctagagcgtgtcagccggaagcaaaaggatgatatttttacccaactctcttatcagagtcttttccttgctcaaaattccagaggaaactggatcgttcaggacgttctgcggaagggagatccttctcacgttgaaataattgcttcctgccttagaaatcattatgtgacactcgcgaaaaataagtatagcagcaatgtcgttgagtggtgtttaagggtattccacgaaggagagagatcagttattatatgtgaattcattaactatcctcacttcagagatctggtgacagatgagtttgctaattttgcactctctactgctcttcagacatgtgagattcctctccgaaacgttctggcaaatgccatcctttcccaaaatatcaccgtacggaatcaacactgtatgaagatctttagcacattagccaaatatgggtttatgtaacagaatcttttgaggggattttgaagtagcacattgcaattgagcagatgattttctactactctggtccttttcttttgggcgtctgcagatgttgtgaagacgtgaagtaggtaccaggtgtacgttcgaaccattttgtgcttgtggattttgtggattgtggcatgtgttatctttgtggttagctacatgttgttaagtgtcatatgtgtaagtgaatattcagttatgttgctagttgtgattatcttaatgctttattttaagagattgatgcct

SEQ ID NO: 143543 - DNA, 192 bp, Zea Mays
gccaacggaaatgagtttggaggaaatagaagagaggttaagttccattgtgaaatctgagagaatttcccagctaaagagctctatctggacagagtgccttgaatgttgccaatatccttgtgttgtctatcctgtaaattttgtctatttgtttgatttcgaagaattaacttgaatcacttctatttt

SEQ ID NO: 143544 - DNA, 2319 bp, Zea Mays
tcgccattttcctcgcactcgcacacatcgacgtggtctccgcgccgccgcacccccatcacagccaaccagcacctccgatccatcctccaaaccctattaccaccgctcccgccgcccccgactcgcgctcggatggcagggcaaccccgcgagcgtggtagccgctcgtcccggaagggccggtccgcccgcgcggggcttgcacaggcgcccccgccggcctccgatcccgatctgaccgtcggagaggatgccgcgccgtggctccgcgccacggcggacgagcttgaggagcgcctgctgaagaggctggatgaggcgtacgcggcggccctggcccgcctcgccgacctcggccacggcgaggaggcatccctcgaggccgttctccactcgggccactgttacggcaagctcaacgatcccgtttccaacatcgtggccaacgcccgcgcctacctctccgatcctggccacgccagcgcggccggcggcttcgccgacctccgacgcctcgaggaatactccctcgcggggcttgtctgcctcctccagagcagccgccctaccctcacccgcgccgaggccttgtggtgccttctctccagtgacctccgtattgaagaggcgatcgccataagcagctctttcaatggtgaaccctcatctattgctgagagtgaggagcacctcccagccgtggcagagaccgcacagcgtggatacatccactatcataacaccacagccacagctgctcaggaccccactctttttgacccagaagccttcatgagacttgcgatatgccagggtcccgctgcagccaccatctcctgcctgaaggccgccgggtggtcacgatctagtggcgccgcaccagaagggcagcccagggaatcgtttaccaagaagctctccactgaggaactcatcgagtctgttgttgcggagcttgaggcactggacattgacaagaaggatccaccagatgcgaaccctgacccaaagaaccagatggcgcgtgaactcattaagcagacaagagagatggagacgcagcttaaggagcgaaaggaatgggcacagggaaaggcgatacaggctgctcgcaagcttggtgctgatcttactgagctgcgtgtgctgcggatggaacatgatgagaaccagcggcgtaagaaggaaaaacaggtgatggaggatgacacaatgaagcgccttgctcatctggagaatgagctgaagaaaaagagtgggcagcttgacaggagtaatgcaacagttcagaggctggaaatggagaatgcagagatacgtgctgagatggaagctgcaaaactgagtgcatcagagactgaaaaacaatgccagggtctcttaaggaaagagaagaaggatagcaaaaggcttgaagtctgggagcgccagaaagcgaagctgaaggaggacattgctgaatgcaagacaaatattacacaagctgaaagggagcttgctgaggtcaacaaggcaataaaaaatatggagaagaagatgcgagaagacacaagggtcaaagaagaaaacatggtgcttttggaagatgagcgcaggaagaaggaagctgcaaaagcagacaatgaccgccgacttgaagagcttcgtcgcaagaaagaagtcgaatccgagtgctacaaggatgacctacacaggctccaggatgaactcagccgcctgcagaagtcagcaggtgcaactcaaacagctgtcccatcagccaactttcctggcacagctaaccgaagcgcggcgcaggcagccaagcagcaggccatcctgcggccacaacctgcatctaaccggtcgctgccaccaccagcccagaagccaagccgccgccgggactgtgttgcctgcaagaaggcggcggcgtgtgtgatcctactccagtgtgcccaccaggtcctctgtgttggctgcaataagctgcatgaagataaaggcatcactcgctgcccctgctgcagcgctgaagtcgaagagagaatcagggttttcggagcgagctccaactgaggcaccaggtcggggtgaactgcaacttgtggttgagttttcctttttcttttacctccgttaatgtgaagaaagggttatagccttataggtgtcgcctgagcggttatactttgctacagcatccatgcatgattgcttagctgaattgcgacttatcttgggtattatatgagtataatcgagacctttctggagacaggcaatgatgcttagtctggatttattctctatatttcctcttctttttttcttgct

SEQ ID NO: 143545 - DNA, 2002 bp, Zea Mays
cacaaacaaacccaagccctaagttatccagcttgaaggactaaaaagcccaatcgagcccagcagcaaggccttcgttccccttccggtcttcttgttcctcgcttccgtccactcgccattttcctcgcactcgcacacatcgacgtggtctccgcgccgccgcacccccatcacagccaaccagcacctccgatccatcctccaaaccctattaccaccgctcccgccgcccccgactcgcgctcggatggcagggcaaccccgcgagcgtggtagccgctcgtcccggaagggccggtccgcccgcgcggggcttgcacaggcgcccccgccggcctccgatcccgatctgaccgtcggagaggatgccgcgccgtggctccgcgccacggcggacgagcttgaggagcgcctgctgaagaggctggatgaggcgtacgcggcggccctggcccgcctcgccgacctcggccacggcgaggaggcatccctcgaggccgttctccactcgggccactgttacggcaagctcaacgatcccgtttccaacatcgtggccaacgcccgcgcctacctctccgatcctggccacgccagcgcggccggcggcttcgccgacctccgacgcctcgaggaatactccctcgcggggcttgtctgcctcctccagagcagccgccctaccctcacccgcgccgaggccttgtggtgccttctctccagtgacctccgtattgaagaggcgatcgccataagcagctctttcaatggtgaaccctcatctattgctgagagtgaggagcacctcccagccgtggcagagaccgcacagcgtggatacatccactatcataacaccacagccacagctgctcaggaccccactctttttgacccagaagccttcatgagacttgcgatatgccagggtcccgctgcagccaccatctcctgcctgaaggccgccgggtggtcacgatctagtggcgccgcaccagaagggcagcccagggaatcgtttaccaagaagctctccactgaggaactcatcgagtctgttgttgcggagcttgaggcactggacattgacaagaaggatccaccagatgcgaaccctgacccaaagaaccagatggcgcgtgaactcattaagcagacaagagagatggagacgcagcttaaggagcgaaaggaatgggcacagggaaaggcgatacaggctgctcgcaagcttggtgctgatcttactgagctgcgtgtgctgcggatggaacatgatgagaaccagcggcgtaagaaggaaaaacaggtgatggaggatgacacaatgaagcgccttgctcatctggagaatgagctgaagaaaaagagtgggcagcttgacaggagtaatgcaacagttcagaggctggaaatggagaatgcagagatacgtgctgagatggaagctgcaaaactgagtgcatcagagactgaaaaacaatgccagggtctcttaaggaaagagaagaaggatagcaaaaggcttgaagtctgggagcgccagaaagcgaagctgaaggaggacattgctgaatgcaagacaaatattacacaagctgaaagggagcttgctgaggtcaacaaggcaataaaaaatatggaggttaggaagaactcgcacattcatcatttcgattcttttatactataattccatatgtttctgttttgttatgtattaggtggtaagactcttatgtcagaagctttctactaggatagattgaatatctatgcttcagcatagctgtatgagactactgttgtggtgtgttttgtatattcattcataggactagcacatccagccagctcaacctagtgttagcctgaccctgagctactgcttgtctagtttcttgcttagtgtattaggtttggagaggtttgttaagtacttaggtatgttattttgttttgattgttccctatattattgacaagctccatatttttt

SEQ ID NO: 143546 - DNA, 125 bp, Zea Mays
ctgatttctattttaaatacaaatcaaacccaagtttgaattccaagattttacttttgggtgcacaaataaaactccaataagattataattttatttatttattattctttcttttagtaaat

SEQ ID NO: 143547 - DNA, 716 bp, Zea Mays
acgactctctctctctctcggcggctaccgatgctggtgaacggagggcaagggctcgtatttatacaccgcaacagagagaatccagacactagctgtttggattaggacgagaaatccgcatgggcgatctccaaaaaccccgctcgatctcaagcagaggagagcgattttgttacggtagaacatcaagctgacaggtgggacccacctatcaccaacccgcgtaatgcatagagatccagcaactgttaggcgaggcccacatgtcgtcactggtttcccccagccgggcaagcgcagtaacgaggttaatgggtcggccagttttagcccatagaacaaagggagagctttcttcttttttattttcttttttcctattcttttctatttcagattttccattccaaacaagattcgaatattttaagaagtgctttaattataaagttgaaagtgtgccttttacttattgatttattgtcccatagtttcaattttaactttagtttcaagatttggatctaggttttgaatagcaatctcttatcgttatttatcattccctttagagagatgtactttacaaaggaatgaaatcattattataagtcattttacctccaatcctttagagaactctttaaagcacaaaaatgagattttgggtgttacataatcccatccctgaactaactatatttgaacaagtg

SEQ ID NO: 143548 - DNA, 1879 bp, Zea Mays
gcaggaggctggagtcattgtctttgtccgcgtggacgcggctgacttgcgaacccaccggaccaaccaggacttggagcgtgcggcgtcggagttcgccggcggtgaggagcagaagaggaagggaaccaaagatgggctgctccatctcggggctcaacgcgctctacgatgcggccacgggcggcggcgacgtctggatcaacgagcgccgcttccgcgtccttcgccagatcggcgagggcgggttcgccttcgtctacctcgtcagagagcaccagcccgcctccgatgccgcgttcgctaggcgtgaccccgcccacgtctcagaggatggaacgtatgccatgaagaaggtgctgatacagagcaaggagcagttggatctggtgagggaggagatccgtgtgtcgtccttattcaatcaccccaaccttctgccgcttcttgatcatgccataatagccgtgaagagtcaacagggagattggagccatgaagcatacctacttttccctgttcatctggatggtactttgtttgacaacgctaacatcatgctgtccagaagggaattctattccacagctgatgttctgcaaatattccagcagatgtgtgaagggctgaaacacatgcacagctttgatcctccatacgctcataatgatgttaagcctggtaatgttcttataacctggcgtaaaggacaagcacctgttgcaactttaatggattttggaagtgcaaggcctgcaagaaaggaaatccgttctcgttctgaggcactacagttgcaggaatgggccgctgagcattgctctgctccttaccgggcccctgaattatgggactgcccaagccatgccgatattgatgagaggacagacatctggtctctaggatgcactctttttgctatcatgtacaatgtttcaccatttgagtatgctcttggtgaatctggaggaagtctgcaacttgccattgtaaacgggcagttgaaatggccagcaggacccaaacctccttatcctgatgagcttcgccattttgttatctggatgcttcaacctgaagctgtaatgcgccctcacatttctgatgtggttcttcatgttgacaagctcattgcaaaatacttgccctagatcaccctggagttcctctcatttctttgttatacagtacagagccaatatgatgtaaaattggcccatgcttgacgtcattcagtccttggataggctcaatattgattcttttgtagaactttcaggatattacatcagtctaatgtctgtggatctttgatactcatggagtcacggtgtcatgtaaaaatgtcaaactgaacatcaaagcagctatatgatatccttgcacttgggctacttctctgtgctcttattaaaataataggagaaataacagtacatagtgtcacattcttgttgtgaacttcccaagactcccatttacatcataatggatgatacaccaagtaatcaactaagctgatgtagcaaattacatgatttgaaatcaaatcaactgtctagttacaagaatggatgaacaagcgattattctgtatcttttacaaacgacggttgactgggaaaaaaatacaattcacttctgttttcatgcaaacatccaagagcacagacggcttcagtggcaactcgcaaatgatagttgtcatctttgatgctgaaagaatgatatgatctaataaaatctaatatctgcaaatcttctttagaaggaaaaaggtggtttcagaaggtgtgccttgctgtaggtatcacacaacatagttcttcagttaagcattcaacctaaaaagttaatcttcatgttcctcttcgccttc

SEQ ID NO: 143549 - DNA, 1380 bp, Zea Mays
aggctggagtcattgtctttgtccgcgtggacgcggctgacttgcgaacccaccggaccaaccaggacttggagcgtgcggcgtcggagttcgccggcggtgaggagcagaagaggaagggaaccaaagatgggctgctccatctcggggctcaacgcgctctacgatgcggccacgggcggcggcgacgtctggatcaacgagcgccgcttccgcgtccttcgccagatcggcgagggcgggttcgccttcgtctacctcgtcagagagcaccagcccgcctccgatgccgcgttcgctaggcgtgaccccgcccacgtctcagaggatggaacgtatgccatgaagaaggtgctgatacagagcaaggagcagttggatctggtgagggaggagatccgtgtgtcgtccttattcaatcaccccaaccttctgccgcttcttgatcatgccataatagccgtgaagggagattggagccatgaagcatacctacttttccctgttcatctggatggtactttgtttgacaacgctaacatcatgctgtccagaagggaattctattccacagctgatgttctgcaaatattccagcagatgtgtgaagggctgaaacacatgcacagctttgatcctccatacgctcataatgatgttaagcctggtaatgttcttataacctggcgtaaaggacaagcacctgttgcaactttaatggattttggaagtgcaaggcctgcaagaaaggaaatccgttctcgttctgaggcactacagttgcaggaatgggccgctgagcattgctctgctccttaccgggcccctgaattatgggactgcccaagccatgccgatattgatgagaggacagacatctggtctctaggatgcactctttttgctatcatgtacaatgtttcaccatttgagtatgctcttggtgaatctggaggaagtctgcaacttgccattgtaaacgggcagttgaaatggccagcaggacccaaacctccttatcctgatgagcttcgccattttgttatctggatgcttcaacctgaagctgtaatgcgccctcacatttctgatgtggttcttcatgttgacaagctcattgcaaaatacttgccctagatcaccctggagttcctctcatttctttgttatacagtacagagccaatatgatgtaaaattggcccatgcttgacgtcattcagtccttggataggctcaatattgattcttttgtagaactttcaggatattacatcagtctaatgtctgtggatctttgatactcatggagtcacggtgtcatgtaaaaatgtcaaactgaacatcaaagcagctatatgatatccttgcacttgggcta

SEQ ID NO: 143550 - DNA, 415 bp, Zea Mays
atgggctgctccatctcggggctcaacgcgctctacgatgcggccacgggcggcggcgacgtctggatcaacgagcgccgcttccgcgtccttcgccagatcggcgagggcgggttcgccttcgtctacctcgtcagagagcaccagcccgcctccgatgccgcgttcgctaggcgtgaccccgcccacgtctcagaggatggaacgtatgccatgaagaaggtgctgatacagagcaaggagcagttggatctggtgagggaggagatccgtgtgtcgtccttattcaatcaccccaaccttctgccgcttcttgatcatgccataatagccgtgaagcatctagaggacaacatctaaacgctgatctccctcatggtcatcgcacgatcacccttaaatgggtgttcaaact

SEQ ID NO: 143551 - DNA, 1658 bp, Zea Mays
gaagtgatggagcacaagaaagctagagcagtggaggatcctgcccggttgatttgcgacgatgccctcaccgaggtattccgcaggctgcctgcccgtgcgctcgcggcctgcagactggtgtgcaagtcatggatgtccgtgctcacagatccacacttcatccatgagcacctgagccgtggccagcagaagctgctgctctttgcgactgacaggggaaacgacaggtcgctcgccatggtgctcgcggacaacaacgcatccatgtaccagctgtcaaggcccgcggcgtctcggagcgtcttcgtgcacaattcttgcaatggcctgctctgcctaggtgacagcacaggagctgtcgaggtgctgaacccaacgactggtgaatctttaatgttgccgatgccaatgtacacggcagggagcagccagttctcgtcctgcaattggcactgcttggggttttgcccacaaaaaagggaacacaaggtggtgcatttctatccaggagctcacaatgacccgttcaaggtacactgtgagatatacacgattggagtcggtgtctggagacaagttgggagctgtcatggtgctccgactgacagaggggtgcatgtgaatgggatggtatactatctgacaaagttccgctacattgcttcatcgcgtatcaactgcttgaatcttgagagcgaaaaatttgatgtgatgatgcttcctccacacaaatcttatggaggtcattgctctttggcagagcttgagggaaagctatgcttgttgattgtcgatggtgcattggaaggtccgcctcgtacaatggacatactgatgctcaatagccatgataagcagggctggactcacagataccacttctccttgccttggttgatgccttcatgttattttactccgaaacacacactcttccacggtggaaaaatttgggtgcagttgttggctaggaatctatattgttttgacccaagttcaagttcagaagaactgacaacagcctggccagagcttgacttttcctttagcacacatactttcattgagagcatagttcctctgcgtaaagactactacttcaagcagatacagtgacagtggtgtgctgccccttgctttcaaggaccaactttgcttcgagttaagcaacaaaggtgataataaagcaaaagataaacatcttaattcaggcaagcacatagatcatacgaaggtcaaagttgttacatcacctttattctatgcccaaaagcttcatcaatgaagacacaatatgaagcctcaaaccacatgaagtctcacctacgaagactttgtatgaagcattaggagatatgaagcttcctaagaaaggcgatatcttcctacaattaagcaaagccacgaaagagtctttgccagaggtgaagacgtgcctgtgaagactggtcaccgacaagaattcaagcattgataaagatggaaacaaaccaaattgcccttgaatgggcaaacgattgtaactttatagtacagggtagttaggactttacagaagtgctaaaaggtgcccctataaatacccctgacatgtactatttatagacatgacatattttactgcaatttacctgtcggttaattcttccccaaca

SEQ ID NO: 143552 - DNA, 1993 bp, Zea Mays
cttccaaaacaacaaacagaaccgaagccgactagcgcgaccgaggaggcagagacgggtggaggaaaagggcaaagtcgccgcccgccgcccgccgctgatcggtcggtgagcccgatgcgctgtaccgctcggcctcgtcgtgttccgccgcgctgatctccgcctcccgcgacgcccgattccagaggatcgcttcttcggtttggccggccggtaggtgcgtggggggttcaggaggcggggtctcggcggctgcaatgcatgctcgcatctcgtggcggcgtttcatcgcttcggtccgtttgtttttcggcttgttgcgctgaaattgagcgattcgtttccttgattcaaggactactagtggggcgggggcatcctgcgtggtggctctggctgtctggtctgtatctgtatgatagtgggcgttggcagttgtgccgtcccggctagctgcggacttgtcttggcctagcagggaagtgatggagcacaagaaagctagagcagtggaggatcctgcccggttgatttgcgacgatgccctcaccgaggtattccgcaggctgcctgcccgtgcgctcgcggcctgcagactggtgtgcaagtcatggatgtccgtgctcacagatccacacttcatccatgagcacctgagccgtggccagcagaagctgctgctctttgcgactgacaggggaaacgacaggtcgctcgccatggtgctcgcggacaacaacgcatccatgtaccagctgtcaaggcccgcggcgtctcggagcgtcttcgtgcacaattcttgcaatggcctgctctgcctaggtgacagcacaggagctgtcgaggtgctgaacccaacgactggtgaatctttaatgttgccgatgccaatgtacacggcagggagcagccagttctcgtcctgcaattggcactgcttggggttttgcccacaaaaaagggaacacaaggtggtgcatttctatccaggagctcacaatgacccgttcaaggtacactgtgagatatacacgattggagtcggtgtctggagacaagttgggagctgtcatggtgctccgactgacagaggggtgcatgtgaatgggatggtatactatctgacaaagttccgctacattgcttcatcgcgtatcaactgcttgaatcttgagagcgaaaaatttgatgtgatgatgcttcctccacacaaatcttatggaggtcattgctctttggcagagcttgagggaaagctatgcttgttgattgtcgatggtgcattggaaggtccgcctcgtacaatggacatactgatgctcaatagccatgataagcagggctggactcacagataccacttctccttgccttggttgatgccttcatgttattttactccgaaacacacactcttccacggtggaaaaatttgggtgcagttgttggctaggaatctatattgttttgacccaagttcaagttcagaagaactgacaacagcctggccagagcttgacttttcctttagcacacatactttcattgagagcatagttcctctgcgtaaagactactacttcaagcagatacagtgacagtggtgtgctgccccttgctttcaaggtggttctcagtttacatctttacattatcttttatcttatcgtttcttttttcttatatgaacgaccaagctgttacgtgttagtcagcttaagatggtgtgctgttctggattctaattagcgataataattgcaatttccagacatcttaactactcattcttctagattttaattgatctggccatttctctttatgctgagaagttgataggccaagttcagaggatcatttcattagttcttatttcacagcttaggtgattattgatgtaaacactgaacctgtattttatactgcctccgaaaagtttcttgtaatctgatgggatataaattaaaaagtatatgaataccgtgtg

SEQ ID NO: 143553 - DNA, 2045 bp, Zea Mays
cacccacccatccaagcttccgtttctcgttctctccccccaccacaccacgaccccttccaaaacaacaaacagaaccgaagccgactagcgcgaccgaggaggcagagacgggtggaggaaaagggcaaagtcgccgcccgccgcccgccgctgatcggtcggtgagcccgatgcgctgtaccgctcggcctcgtcgtgttccgccgcgctgatctccgcctcccgcgacgcccgattccagaggatcgcttcttcggtttggccggccggtgcgtggggggttcaggaggcggggtctcggcggctgcaatgcatgctcgcatctcgtggcggcgtttcatcgcttcggtccgtttgtttttcggcttgttgcgctgaaattgagcgattcgtttccttgattcaaggactactagtggggcgggggcatcctgcgtggtggctctggctgtctggtctgtatctgtatgatagtgggcgttggcagttgtgccgtcccggctagctgcggacttgtcttggcctagcagggaagtgatggagcacaagaaagctagagcagtggaggatcctgcccggttgatttgcgacgatgccctcaccgaggtattccgcaggctgcctgcccgtgcgctcgcggcctgcagactggtgtgcaagtcatggatgtccgtgctcacagatccacacttcatccatgagcacctgagccgtggccagcagaagctgctgctctttgcgactgacaggggaaacgacaggtcgctcgccatggtgctcgcggacaacaacgcatccatgtaccagctgtcaaggcccgcggcgtctcggagcgtcttcgtgcacaattcttgcaatggcctgctctgcctaggtgacagcacaggagctgtcgaggtgctgaacccaacgactggtgaatctttaatgttgccgatgccaatgtacacggcagggagcagccagttctcgtcctgcaattggcactgcttggggttttgcccacaaaaaagggaacacaaggtggtgcatttctatccaggagctcacaatgacccgttcaaggtacactgtgagatatacacgattggagtcggtgtctggagacaagttgggagctgtcatggtgctccgactgacagaggggtgcatgtgaatgggatggtatactatctgacaaagttccgctacattgcttcatcgcgtatcaactgcttgaatcttgagagcgaaaaatttgatgtgatgatgcttcctccacacaaatcttatggaggtcattgctctttggcagagcttgagggaaagctatgcttgttgattgtcgatggtgcattggaaggtccgcctcgtacaatggacatactgatgctcaatagccatgataagcagggctggactcacagataccacttctccttgccttggttgatgccttcatgttattttactccgaaacacacactcttccacggtggaaaaatttgggtgcagttgttggctaggaatctatattgttttgacccaagttcaagttcagaagaactgacaacagcctggccagagcttgacttttcctttagcacacatactttcattgagagcatagttcctctgcgtaaagactactacttcaagcagatacagtgacagtggtgtgctgccccttgctttcaaggtggttctcagtttacatctttacattatcttttatcttatcgtttcttttttcttatatgaacgaccaagctgttacgtgttagtcagcttaagatggtgtgctgttctggattctaattagcgataataattgcaatttccagacatcttaactactcattcttctagattttaattgatctggccatttctctttatgctgagaagttgataggccaagttcagaggatcatttcattagttcttatttcacagcttaggtgattattgatgtaaacactgaacctgtattttatactgcctccgaaaagtttcttgtaatctgatgggatataaattaaaaagtatatgaataccgtgtg

SEQ ID NO: 143554 - DNA, 172 bp, Zea Mays
gatctcgtccgagggagcgcgggcgctgttcaggtttctagttctgtttctttgtcatctgcctgagtttgaatccttatatttcttagtcaattctcgccctacagtctaggagagattagagggcataagtaaacggtcacattctgtttgccgctataattgccagtta

SEQ ID NO: 143555 - DNA, 1467 bp, Zea Mays
agcctctcctctagcgctatgtctgtgttttcacctatcccgatccaccatgctgtcaccattaggctcaacaagaacaactacacgttgtggcgcgcccagctgctcccgtaccttcggagtaccaagctcatgggctttatcgatggatccatgccgccgccgcccaggcaggttccttcctccactgctgcgggcgccgagctcgtgcctaaccccgcctatggcgcgtggtatgatcagatcagcagcttctcagtggtcttctttcctccatgactggaagacattctccaagatgttgtggaggccaccacctctcaagaggcttgggatatcctcaagcggatgttctcctctgctatccgcgcacgtgctgtccgagtgcgcgttgatttggccaccacaaagaagtgcgatctctctgctgccgattattttcgcaagatcaaaagtctcgctgccgaattggctgccgctgatgcgcctcttcgtactgacgagatcattgcatacctcctggctggcttgccttcgtattacgatccgtttgttacttcgatcaccatgaagaccgagtccctcacgctcgatgatttctacgcccatctcctggcatttgaggcgcgtcagcagcagtctcaggcggagacgcgtctcaacattggcgtgcaagcaaacttcgctggccgtggtggtccacagcgtggtcgcggccgggggactccacctgctggtcgtggtgcgcgtggccgaggtgggccgccgttccagggccgtggtcgtggtccttcttcctcgacaaccaatcgcccacagtgtcagatatgcggacgtacgggccacactgccatcaagtgttggtaccgtatggatgagtcataccaggaggaacatccatctgctgcagtggctacaacttcataccaggttgatcccaattggtatactgacacaggggctaccgatcacataacaagtgatctggatcgcctagctctccgtgaacagtatcatggtggagaaacagtacaagtcggcaatgggacaggtttggaaattatgcacattggttcatgttcttttaatactgctactcgtcctcttgctctaaaaaatgttctccacgttcctcatatatccaaacatctcttgtcagtacataaattagctcgtgacaataacgtatactttgaatttcacccatattattttcttataaaggacaaggtcacgcagcaagttcttctggaaggcaggtgtgagtccggcctttatcccatcaagccctccgatgtcgagtttctcaaacaagctctaataagtgtcaaggcgtcctcgagtcatgggcttcataaggggtacaagtgccttgacacagactccggacgcgtttatatctctcgcgatgtcatattcgatgaaacaagttttccctttgctaactgtccttcatccagcgttgca

SEQ ID NO: 143556 - DNA, 2019 bp, Zea Mays
gcaaaagcagcagactctcaatggcacgcgagccccacctgccacctccgatccgtcgcctccaccaaccccgccttattcaaaaaatttattcgccgaaaccccttgccaatgccacctcgccgcctccgcccgacccagcaaaaaggcacgacgacctctacctctacctcgccgccaccgtcaccgtggcccgccgccatataagtaaaccctcgcctcgtcctcctcccaggctcgccaccctccgcctccgacacatggcccacccgcacctcgtgctcccctccccgaagtccctcctccccgccgccgcaactccatcgcgccgcgccgtcgccatccgcgcggcgatctccaccgctttgtctccggccaaggcggcagctggagcagaggcggtgcgatcgatccgcgcgcggcagatcgtggacagccgcgggaaccccaccgtcgaggtcgacctcgtcgccggggacggacgcctccaccgctccgcggtgcccagcggggcgtccacggggatctacgaggcgctggagctccgcgacggtgacaaggccgtatacggcgggaagggcgtactccaagctgtgcgcaacatcaacgaggttatcgcgcctaagctcataggcgtcgatgtgaggaaccaaagcgatgttgatgcagtcatgctagacattgatggaactcagaataaatcgaagttgggtgccaatgctattctcggagtctccttgagtgtatgtagggcaggcgctggtgcaaagggagttcctctgtataaacatattcaggagctagcaggaattaaggagcttgtcatgcctgttcctgcttttaatgtaataaatggaggtagccatgctggcaacaatctggccatgcaggagttcatgattttacctgttggagcaactacatttgctgaagctcttcgtatgggcagcgaagtttaccatgtcctgaagagcatcattaagtcaaaatatggtcaagatgcatgcaatgtcggagatgaaggaggttttgctcctaatgttcaagacaacagagagggtcttatcttgcttatggatgccattgagaaggcaggctacactggaaaaatcaaaattggtatggatgttgcggcatctgagttccttacaaaggatgggaactatgatctaaactttaagaatcagcctaatgatggagcccatattctctcagcccagcatctgggtgatctgtacagagattttgtcaaggatttccctattgtatcaattgaggacccttttgatcaggatgactggagttcatgggcatcattgcagtcctcagttgatatccaaattgtgggtgatgatttactcgtcacaaacccaaaacgtatagcagatgctattgacaagaaggcttgcaatgctctgttgctaaaggtcaaccagattggtactgtcactgaatcaattgaagctgctctcgattcaaaagctgctggttggggtgtgatggtcagccacagaagtggtgaaaccgaagacaacttcatcgcagatttggctattggcttagcaagtgggcagattaaaaccggggctccatgccgcagcgagaggctggccaaatacaatcagcttctgcggattgaagaggagcttggtaacgtgcgctatgcaggggaggcattcaggtctccatgagaaatacagacttcagagtctcagtaaagcctaaagtatgtgtactgcccagtagaagaaataaaagaactagatcatgaccagtcatgctttcatccttgttaccacgagttatcccaattttttgcggtttttttttcttgatacatcttattatctgcgagcatttgacgacatagtcatcatccggaaagatgcttcctgtgcacccgcgcgagtctgagaaagtgacagctttatatggacatgaccattaacatttaacaatcatgcttgtaatggtgcgttatggtcatacaataaattaagggacatttacattccaccc

SEQ ID NO: 143557 - DNA, 285 bp, Zea Mays
atggcgccctgctcggcagtccagccctacgcacacgacctcgccttgttcgggcgtgtattgctacactgcctcaccacatcgatgtcgcgccgcaccctagccatttctccctaccggcgtcgtccccttcgatcgctgctacaagcagcagccatgcccgcgcccgcagttccttgctcccttccctacgtgctgtgtcaccgccgctgcctgttcacagcccagccagcgagtcgccgccggctgcctacccccaacccacctcgagcatctgccagctag

SEQ ID NO: 143558 - DNA, 1157 bp, Zea Mays
caggaggcaactccatgaattacatcgactccatcccgcccctcaacggagggaattacgagttatggcgagagaagcttgagctggcgcttgcgttgttagatattgatctggctatcactgatccctgtcccatcgctccggtagacccggtgcaggaagagaacgagagcgatgatgatttcaacgctcgtgtgcgcaatcatgcaccaataaaaatgaagtatgacctatacaaggtaaaatgggatcaatcgaaccgcaagtgtctgatggtgattaagagctctattatggatacaatcaggggagcattcccagcatgtaccaccgctacagagtatcttagtaaggtggagagtcactttactatctcttcaaaggcttatgcatgcacaataattgaaaggctacttaccgataaatacactggcggtggagtaagagagcatatattgaagatggccagcatggcttccaagcttaaacctatggaaatggcgctcccagatgagtttctggtctatttgatttttgcctctctgcctaaagaatttgaagcttttgagattaattataactcacaaccagacaattggggcattgagaaactgattgccatgtgtgtgcaagaagaggaaagaattaaggcttcacgtggtgattctatcaactatgttgggatatataaggcacatggcaaggctccacagaatgatcaccatctgaaaaataaagaggtggacaagaatgattgctactggtgcgaaaagtcagggcatcatcagaaggattgtccatccttcctgaagcacttgatcaataaagggattccatacgaggaggacccttcaaagaggagaaagatgcattaaagtcgtcaatggtgttgatgatgaagttgaagtgatagaacttccattattattgaataatagcttcattcttcacttgaataatgttctctatgtatcatctttcctgtcatgcgaatttaagctctctaatttattagaaatagaaaaatagatcctttcatgtaatgatatcgtgatattccatgttactccttttttgggtcgatgtagagacctccattgcatatgactggtattcaactaacaatatataggtcaaatatttcgaaattgactacc

SEQ ID NO: 143559 - DNA, 464 bp, Zea Mays
cgtaaaccactacctgcgatctccgcacccgcgctcaccggctcaccgctatctactccgcatccgccggccgccggcgagcccctcctcctccacgatccgtgcttccccgccgccgtccgccgagccaccgaggggagaccgagccttccatcgctgcccgctgtgcccagccttccggccacgcgctgacgccgtccgcggtccgccgctgtgccgagccgccggctgccgctatgcccactgcccagcggccccaaccttccggccttctgtgccgagccggcgagccagcgtccgctgctcggctgctgtgcccaggtggccaggcgcctagccttccggccacgggccacgcactgatgcgcccacacgggtcacgccacgcctgtgacttctgcggtccgccgctgtgcgtctgttgcttccgagctgtaacagtaagcaaagcaaaatcagaggta

SEQ ID NO: 143560 - DNA, 1228 bp, Zea Mays
acagtctatgtatccatattgctgataataatcatgcggtatatatccgtggatactcaaacaaacattttactgttggcattggaccaggggcaacagtgacattccaccgcatccgtttcaaacagcatggattattcttaacctctgagacatacattgagcttcaccgtgcttgttctttcatcagaagtattttacagacagtagacccatgcaatttcactgcagggtagcaactatccttgtgctggtattgaacaaatcgactaatcagggtgaaactccaaatgtaaaagttcggctagctggttttattctggatgatggatcatccctgtgctgtggctgggctgatgatgctagggcagaattattgcttaggctgcaggaaattgtgcatctggatgcttctgttaatttaaagctttcaaaaggaggagagaatagcacaaaattaaaatatactattggatgctgtcttgaaaaaatgttgaagcagcacacaagtgttaccgtaaagaactgtggaattcctcctgatttctattgccgagatttggatgcatcttctgtttcggacaaagccttaagtcgcttggaagacaaacttctgaaatttattgtccttaatgcttgttgcaagggatctctgaatgttatggcatcagctctgagcccagatgatataaatgggttcaatgtggagctccctgttccagtgcagaacatgcggatgctttggatagaagaagttttcccagtagatcccttggaagaagctcgcagactacatgatattttggaaaacagctagtgttcacacattctggatagttagtatgcagcataaaaaaaagaggatggattgtccagaactccagatcgtactgccacttcgctgagattttcgcaaaggaaaacttgtttcacactcagtatccagaaaaggatggtttgtccagatagggccgccaccttgaagttgatcccagattggtcctccacattttccaaagagatgtactcacggcgaacgagcgatatatccttttgatgctgatactgatctctgacgtatgaagaagggacataaatttggctgttcgatctcttttgctgaacgagcgggccttttgtatccaatgtcccaagctccccaaagcaacgcaatgtgtatattctacttgcattattatgtcccaacgttaattttggcttatatcat

SEQ ID NO: 143561 - DNA, 838 bp, Zea Mays
gaacagaaaaccggcagttctctaagaaagttctctttcctattatcctgagccgcaccataaacgttgatgaagttccatttaatctgcttgtttcttatattctctgttatctggctgcaggcatggattattcttaacctctgagacatacattgaggttagctccatcagccatgctaacttgactgaacaaagtgttatttcatcaccaaagtctaatttgtcaaaagatggttcattttgcacagcttcaccgtgcttgttctttcatcagaagtattttacagacagtagacccatgcaatttcactgcagggtagcaactatccttgtgctggtattgaacaaatcgactaatcagggtgaaactccaaatgtaaaagttcggctagctggttttattctggatgatggatcatccctgtgctgtggctgggctgatgatgctagggcagaattattgcttaggctgcaggaaattgtgcatctggatgcttctgttaatttaaagctttcaaaaggaggagagaatagcacaaaattaaaatatactattggatgctgtcttgaaaaaatgttgaagcagcacacaagtgttaccgtaaagaactgtggaattcctcctgatttctattgccgagatttggatgcatcttctgtttcggacaaagccttaagtcgcttggaagacaaacttctgaaatttattgtccttaatgcttgttgcaagggatctctggtgagcttatctatacattggttgtcaaagcatgtttgacttgacctgcggggggtaagacagcccccgggcattgtattaagaagaagaccttct

SEQ ID NO: 143562 - DNA, 1125 bp, Zea Mays
atggaggccctcggcgccccgcccccgccgcgtttcactgtggccgacctcctccggctccgccgtcccacaaccggcgcctcctccctcctttgcctctccgtccccacctccacctccacatcccgaccccgtaaaaagcacaagctctccgccccagtcccaacctggagcaccggcacggtcccgttcgcgccgatgtcccaccccgtgctcctttccggcacgctctccctcccctccgcctcctccccgatctcctgccgcagcaactgcttttccttctccgacccatgccccaccgctgcctccccggccaccgcggccgcctccgtctgctgctgcatcctcgacttcgatcccgccgctctgggccgcgtgatccgtgtccttgcgtggaactacctaccctcactgcgcctccacgccgagccgggcgtactcgaagtggtccgctggcacctcgaggagtccgctcctcccgtgaaatatagcttcctggcgacggtccccttccgtttcccggatcaagagcccgacttggctacccgcggctgcgcatttggtttggtcaggtccgtcagcattgtgttcagtatgccgcttgccaaggctgatgcaggaagcagaaattcagttgggtttctggcggagattttgtgttgtgggtgtcgccgctgctgcagggcgacaccgccggaagatgcccagactcacatgtttgagacgatgaaatttgtctactttgtggatgcgtctagcatgtggcggccggttctagtgtggcttgtggggaggctggtgtacatttctgggttaagtaaaaaaatggtttctgttggggacaaagcctcacacacaattttggtgtcatctgcgaagacaaccatggcatggtgcccatcctacaggggcagtctgccattggataacttacctgaaaagtgcggtggagagtatgctggggttatcactggaatttattcacagggtctggtggttgagctggatgacactgcatggctgctgattgatgatcagaagcttctgccaccacattcccttcgagttggtgccattgtatgttgcaactttacaacttcaccttcaaattttcagtcttaa

SEQ ID NO: 143563 - DNA, 107 bp, Zea Mays
ttccaggtgggcccaaccccattcatcgtatctcttctacctgcctcttctcccgttcgttgctgcgcactgaattgtcgccgccgtcagttgaagccaccaacgga

SEQ ID NO: 143564 - DNA, 569 bp, Zea Mays
taaacacaaaagcaccacaattatatattcacaaaagcatcacaattataatatcattcacaactagatcactaatgtttcatatcactccagctattgttcaaaagccaacaactacatcactctagcacaataatcacaaagaattgagggtaacaacagctcctctcattttgctctacatactttcttatgttcccctagcacaataaaaacttaaggacaatccagattatgatccatgctatagatcctgtctgaagcatccactcaatgaactcatttgaccgttcttgctgaggtttggcgccgttttgatagttctggaaatatgctgattctgatttgcggttgatgtactgcgtaccacctgtgtcttccgagagccagacctaagggtgttgaaaatcctctccagcgagtatggccttttcttttcaagttttatctgatgaatcacaagtatgagatgatatgaaacctcctaccaaccaggaaactggaatgaagagtggaaaaaagagttataaattcagaacggagaaacaagcgcaccacaagcttttgaa

SEQ ID NO: 143565 - DNA, 634 bp, Zea Mays
caccacacacgtcgtcgcgtacgcacgatcgatcttcttctgacactcgccgttgccagatacatggagggaaggaggcgtcggtcgccgtgccacggaagccgccggcggcggcttggggagatggctttggggcggaaagttcgcgagctccggcggctggtgcccggcgccgcggcgatgcctgccgagcgcctgctcctccgtaccgccgactacatcgtgcgtctccgggcgagggtcgagctgctcagggcgctgtcggagctcatcgccgtgactaaccatggcgggattggtggcggcgacggccatcacgacggtgacaccactagccatccctagctagtgctgggcctcagctccagctatgtgatttgtgtggccgtacgagtcgtctacagccgatgatacgtggtatttgctgagtatataagcatgcatgtcatgtatagatcgatcgacctctgtttatatgtatagcgagtcgtccgtagtcacgtcatgtgtgtatcattctttgcgctcccagcagttttgtttcctttcatattctctaccaaattttctaccaatttaattgatactttatgtcacagtgtatatgtttatgtgtcatttgtttttctttaga

SEQ ID NO: 143566 - DNA, 186 bp, Zea Mays
atggcgaagaagaactcgagctgggggctccagagcttttcaacggcaccaagcggcgatgcggatgggattatggcggcggcgcgagttctctgctgtggcggtaatccagcgaaggccaccccggcatgcgcgcagactggaggagggaacagggaggcctcggaattggggaaggaagcttga

SEQ ID NO: 143567 - DNA, 894 bp, Zea Mays
gcaccaccacaagagattttaacactagtacatctctcgcagagtaccgcagcgctgtggtcgatgacgacgagtcgagttctccggtccttgctcctcgtttgatggcatcatgccccgaaggagacggacccgtcgtcctcgtcgccgcggatggcattgatcatgccggcgacctcccgcatggtcggcggcggggcagagccgggggaggcgtcgacgcactgcatcgcgacctgcagcagccgcaccatgcggtgctcggatgacccgacgccggtgccggcgagcagcgcgcggtcgaacacctcggcggtccactcctcccggatcaccgaggtcacccaccgcgccagctccgcgccgtcgccctgcgcggacgtcgccttccccgtcagcagctcgagcagcagcacgccgagcgcgcgcacgtcggcgcggaacgccgcggcgccgtccctgcccggcgcggtgacgccgtactcgctgatgcacgggtccatgccggccgtgaagaggacgttggaggccttgaggttgccgtgggcgattgggccgcctgacgaggaattggtggtcccgccgtcgccgcgcagggtggtgtgcatgaacgccatgccgtcggcgaccttggcggcgatgtggaggcgcgctggccaatccagcggcgcttggctgctctctatggagcctgcaggttagcattctgtgagagatgaaaaaatttgaaacttgacactttaggccttgttcgtttacgtcggattacacccggaatcgtttcggctaaacaaagtttatataaattagagaagcaatccggctaggaatcgttccgacccaccaatccgacacaaacgaacaaggccttatagtaactccatacgcattttg

SEQ ID NO: 143568 - DNA, 222 bp, Zea Mays
ttttttacaatgggataccccctatttcattaagaaatagaaaccaaacacagttcttacagaattcacgacaaatccaacagtcacaagccgataagcctaccacattatcagctacacaaaggtatgaaacccaactgaaggaacacagcaaaccagaagaagtccgacagtctaacagacatcactgaatatctacaaaggatagatcccaaaagcagc

SEQ ID NO: 143569 - DNA, 298 bp, Zea Mays
aaagatctaaaatataacagttcgatcaagttgcataagatgtacaattttccaattgcttctgcatttggaagtccacctttctatgttatctttgctatttctgacttaatagaatccaaatagtattgaacactaagaaaactacaaaatgagatggagttgtgttgactgaaaaatatatgtatgtagcatttggaataaaaaaatacactttaagtattcaagtaccagataatgccagacaagggattaattccacagattaaagtacaaaatccatgacaagatatttcat

SEQ ID NO: 143570 - DNA, 3254 bp, Zea Mays
attaaaaacgaagcctgtagcagagagcggcatgcaatccacgggattaataaactgatcctgacaatggcctaaaagatcacagccgtacagtgagctccaatcagaaccggcgcattattgccacggcttcgaataaatccaaacaatcaccaaaagcgcccgacccgaatgctcgctcacccctccaaccagcggccagccccgtctctatcggatccgcgccccaccccctgcgaacccgtcagtggccgccgtcgccgggggaggacgaggagggcggcgcgatggacgacggcggaatccaggaggagccgccgtcgacgcggttcctgacgccgacgcgctcggggggcacacgctgggtggacggcagcgaggtcgactcgtccgagtccacgccgtcgtggtcgctcgaggacgaacgctcggcggggggcgtctcctccaacgggggcgccgcggcggcgtctcgggtgtcctccggcgcattccggcggcggttcgggaagcggccccgccgcgtcgactcgctcgacgtcgagtccatgaacgtgcgcggcgcgcatggccacagctccaaggaaatatcgatgttgagcaccctcgcaatggccttccaaacccttggtgtggtgtacggcgacatggggacaagccctctctatgtcttcagtgacgtgtttagtaaagtccccataaagtcagaggtcgagatacttggagcactttcgctggtcatgtacactatcgcattaatcccattcgctaaatacgtcttcatagtcctcaaagctaatgacaatggcgaagggggcacttttgcgctgtattcattgatttgcagatacgcaaaagttagcctgcttccgaatcagcagcgtgtggatgaagatatttctagttttaggcttaagttgcctactcctgaacttgagcgtgctatctctgtcaaagactgcctagaaaagaagccactcttcaagaacattctcctgtttttagttctgatgggtacctccatggtgattggcgatggcattctcactccgtcaatgtcagtcatgtctgctgttagtggtctccagggccaggttccaggatttgacacaaatgctgttgtaattgtctccattgttgttcttctgctattgttcagtgtgcagaggtttggaacaggcaaagttggattcatgtttgcccctattttggcattatggtttattaatttgggatccatcggaatatataatcttgttaagtatgacatttctgttgtgagagcattcaatccagtgtatatatatttgtttttcgagacaaacggcattaaggcgtggtcagctcttggtggttgtgtcttgtgcatcacaggagctgaagcaatgtttgctgatttgggccatttctctgtcaaatcaatacaggtagcatttaccgccgtcgtattcccctgcctgctaattgcttacatggggcaagctgcttttttgatgaaaaacccacttgttgtagaaagaatattctatgattctgtaccaggggttttattttggccagtatttgtgattgctacacttgcagctatgattgccagccaagctatgatatctgcaacattctcttgcataaagcaggccatggctcttggctgcttccctaggattaagataatccatacttccaagaaagtgatgggccagatttacatacctgtgatgaattggtttctaatggtcatgtgcatcatcatcgtggcaacttttaggagtaccaatgatattgccaatgcatacggcattgctgaagttggcgtcatgatggttagcaccgcactggtgactttggtgatgcttcttatatggcaaaccaacttgttccttgtgctatgcttccctattctttttggtgcagtagagtttgtttacttaactgccgttctgtcaaagatacaagaaggggggtggttgccgctggctttctcatcactgtttctctgcataatgtacacgtggaactacggaagtgtactgaagtaccagagcgagatgcgcggcaagatatccctggacttcattcttgatctgggagccacacttggcaccgtaagagttccaggcattggactcgtgtacaacgagctggtccagggaatcccatcgatctttggccagctattagtcacacttccagcgatgcactctacaattgtctttgtttgcataaagtatgttcctgtcccttatgtccctcttgaagaaaggttcttgttccgaagggttgggcagaaggactaccacatgttccgcagtgttgcacgctatggttacaaggacgttaggaaagaagaccatggcttctttgagcaacttctggttgagagcctggaaaaatttctcaggagggaagcccaggaaattgcgctggaggcgagcacaatggaggcagagcgtgatgacatatctgttgtatccgaggtgcctcagactcctgcaggtgacggggacctgcaaactccactgctttctgaccagagatcaggcgataacaacaggatggccgccacagatggaagcgaccctgtgctcccctccagctccatgtctttagaagaagatcctggcttagagtacgagctgtctgctctgagagaagccatggcctctgggtttacgtatctcctagcacacggagatgtgagggcgaggaaggaatcagtcttcacgaagaagttcgtcatcaactatttctatgcgttcctcaggaggaactgcagggccggcactgcaaccctgaaggtcccccattcgaacatcatgcgtgttggtatgacgtacatggtctgactgggactctgctactgttgcgtcacaggactgtaccacgaatcttgtatggactggtgctgcaccagctcgtagtttaggggctgtactgtggtaccgattacattcattgctgcctctggccatctgcccggaatttgtcacagaaatgactgtatttgttcgatgtgtgattccttccgcctttggtcgtcatgtggtctgtatgatatatgtggatactgtatctgtatgaacaggtatttgtgcaaatgctccttgcatttgttgccccctcaaataatgcagtggggggtaaatgccaaatattgggcttggctccccacatgctaagctgtactgtacataattctttgtccatttcagtttcatgtgtccgacatcttattgagatgatgctgctaaaag

SEQ ID NO: 143571 - DNA, 1451 bp, Zea Mays
aggaaacaaacgtttcatttgcatttaataacatttgtgttctttgaactcgcaggcattgctgaagttggcgtcatgatggttagcaccgcactggtgactttggtgatgcttcttatatggcaaaccaacttgttccttgtgctatgcttccctattctttttggtgcagtagagtttgtttacttaactgccgttctgtcaaagatacaagaaggggggtggttgccgctggctttctcatcactgtttctctgcataatgtacacgtggaactacggaagtgtactgaagtaccagagcgagatgcgcggcaagatatccctggacttcattcttgatctgggagccacacttggcaccgtaagagttccaggcattggactcgtgtacaacgagctggtccagggaatcccatcgatctttggccagctattagtcacacttccagcgatgcactctacaattgtctttgtttgcataaagtatgttcctgtcccttatgtccctcttgaagaaaggttcttgttccgaagggttgggcagaaggactaccacatgttccgcagtgttgcacgctatggttacaaggacgttaggaaagaagaccatggcttctttgagcaacttctggttgagagcctggaaaaatttctcaggagggaagcccaggaaattgcgctggaggcgagcacaatggaggcagagcgtgatgacatatctgttgtatccgaggtgcctcagactcctgcaggtgacggggacctgcaaactccactgctttctgaccagagatcaggcgataacaacaggatggccgccacagatggaagcgaccctgtgctcccctccagctccatgtctttagaagaagatcctggcttagagtacgagctgtctgctctgagagaagccatggcctctgggtttacgtatctcctagcacacggagatgtgagggcgaggaaggaatcagtcttcacgaagaagttcgtcatcaactatttctatgcgttcctcaggaggaactgcagggccggcactgcaaccctgaaggtcccccattcgaacatcatgcgtgttggtatgacgtacatggtctgactgggactctgctactgttgcgtcacaggactgtaccacgaatcttgtatggactggtgctgcaccagctcgtagtttaggggctgtactgtggtaccgattacattcattgctgcctctggccatctgcccggaatttgtcacagaaatgactgtatttgttcgatgtgtgattccttccgcctttggtcgtcatgtggtctgtatgatatatgtggatactgtatctgtatgaacaggtatttgtgcaaatgctccttgcatttgttgccccctcaaataatgcagtggggggtaaatgccaaatattgggcttggctccccacatgctaagctgtactgtacat

SEQ ID NO: 143572 - DNA, 1002 bp, Zea Mays
gccgccgccatcccttctccctctccctcctctcctctagcttctctccctcgcttccctcccctgcagcttcctcacgccatgcttccggacccgcgccaagccttggccacgcagcgagcgcccaacccgacgcagccgcgacaccgaccctgcccctccctgcactcgacgcgcctggagccccgccagccgagtactgtgaagcgcgccaccgaccggcatccagacccgcgtcgagccccagcccgacaccccggcttccccgcgtctacgcagcagcgccctgctcatccgcaagaactggcagcgaagcttgtcgttaaggagatattaatcatgtggagatgcagaggattgacggagaggaagcaaaaaatgactgtatgggagaatatgcagaaagctgaagcagaagcagccatacaaaaccttgtgataaaacttgaaaagaaaaggccatactcgctagagaggattttcaacacccttaggtctggctctcggaagacacaggtggtacgcagtacatcaaccgcaaatcagaatcagcatatttccagaactatcaaaacggcgccaaacctcagcaagaacggtcaaatgagttcattgagtggatgcttcagacaagatctatagcatggatcataatctggattgtccttaagtttttattgtgctaggggaacataagaaagtatgtagagcaaaatgagaggagctgttgttaccctcaattctttgtgattattgtgctagagtgatgtagttgtttggctttttgaacaatagctggagtgatatgaaacattagtgatctagttgtgaatgatattataattgtgatggttttgtgaatatataattgtggtgcttttgtgtttatgtgatggatctatgactgtggtatactgattaactgtgtatgtctttatgatttgtgtataaaaatctgtgatttatggtgcttaattaaatgtatattattattaataaaaa

SEQ ID NO: 143573 - DNA, 1206 bp, Zea Mays
agccgccgccatcccttctccctctccctcctctcctctagcttctctccctcgcttccctcccctgcagcttcctcacgccatgcttccggacccgcgccaagccttggccacgcagcgagcgcccaacccgacgcagccgcgacaccgaccctgcccctccctgcactcgacgcgcctggagccccgccagccgagtactgtgaagcgcgccaccgaccggcatccagacccgcgtcgagccccagcccgacaccccggcttccccgcgtctacgcagcagcgccctgctcatccgcaagaactggcagcgaagcttgtcgttaaggagatattaatcatgtggagatgcagaggtttgtaaaacctgtccaactaggctgccccttctgttttcatgtccatactaattaaatttgtaccgcaggttagctagatctctacgtcagtgcttgatttgatttgtttaacttcccatggtaaaagttgctcagatcccatgtagttcagctttgttttcttatagatcagttggatgtacttgcttttttgtataaaggattgacggagaggaagcaaaaaatgactgtatgggagaatatgcagaaagctgaagcagaagcagccatacaaaaccttgtgataaaacttgaaaagaaaaggccatactcgctagagaggattttcaacacccttaggtctggctctcggaagacacaggtggtacgcagtacatcaaccgcaaatcagaatcagcatatttccagaactatcaaaacggcgccaaacctcagcaagaacggtcaaatgagttcattgagtggatgcttcagacaagatctatagcatggatcataatctggattgtccttaagtttttattgtgctaggggaacataagaaagtatgtagagcaaaatgagaggagctgttgttaccctcaattctttgtgattattgtgctagagtgatgtagttgtttggctttttgaacaatagctggagtgatatgaaacattagtgatctagttgtgaatgatattataattgtgatggttttgtgaatatataattgtggtgcttttgtgtttatgtgatggatctatgactgtggtatactgattaactgtgtatgtctttatgatttgtgtataaaaatctgtgatttatggtgcttaattaaatgtatattattattaataaaaa

SEQ ID NO: 143574 - DNA, 1074 bp, Zea Mays
agccgccgccatcccttctccctctccctcctctcctctagcttctctccctcgcttccctcccctgcagcttcctcacgccatgcttccggacccgcgccaagccttggccacgcagcgagcgcccaacccgacgcagccgcgacaccgaccctgcccctccctgcactcgacgcgcctggagccccgccagccgagtactgtgaagcgcgccaccgaccggcatccagacccgcgtcgagccccagcccgacaccccggcttccccgcgtctacgcagcagcgccctgctcatccgcaagaactggcagcgaagcttgtcgttaaggagatattaatcatgtggagatgcagaggtttgtaaaacctgtccaactaggctgccccttctgttttcatgtccatactaattaaatttgtaccgcaggattgacggagaggaagcaaaaaatgactgtatgggagaatatgcagaaagctgaagcagaagcagccatacaaaaccttgtgataaaacttgaaaagaaaaggccatactcgctagagaggattttcaacacccttaggtctggctctcggaagacacaggtggtacgcagtacatcaaccgcaaatcagaatcagcatatttccagaactatcaaaacggcgccaaacctcagcaagaacggtcaaatgagttcattgagtggatgcttcagacaagatctatagcatggatcataatctggattgtccttaagtttttattgtgctaggggaacataagaaagtatgtagagcaaaatgagaggagctgttgttaccctcaattctttgtgattattgtgctagagtgatgtagttgtttggctttttgaacaatagctggagtgatatgaaacattagtgatctagttgtgaatgatattataattgtgatggttttgtgaatatataattgtggtgcttttgtgtttatgtgatggatctatgactgtggtatactgattaactgtgtatgtctttatgatttgtgtataaaaatctgtgatttatggtgcttaattaaatgtatattattattaataaaaa

SEQ ID NO: 143575 - DNA, 1228 bp, Zea Mays
agccgccgccatcccttctccctctccctcctctcctctagcttctctccctcgcttccctcccctgcagcttcctcacgccatgcttccggacccgcgccaagccttggccacgcagcgagcgcccaacccgacgcagccgcgacaccgaccctgcccctccctgcactcgacgcgcctggagccccgccagccgagtactgtgaagcgcgccaccgaccggcatccagacccgcgtcgagccccagcccgacaccccggcttccccgcgtctacgcagcagcgccctgctcatccgcaagaactggcagcgaagcttgtcgttaagggatccaaaaacagataaacaaaattgttttgggctgattccaaaatgacccaaatctgaacttttgcaagacattaaggagttcttttccttttcaggagatattaatcatgtggagatgcagagctagatctctacgtcagtgcttgatttgatttgtttaacttcccatggtaaaagttgctcagatcccatgtagttcagctttgttttcttatagatcagttggatgtacttgcttttttgtataaaggattgacggagaggaagcaaaaaatgactgtatgggagaatatgcagaaagctgaagcagaagcagccatacaaaaccttgtgataaaacttgaaaagaaaaggccatactcgctagagaggattttcaacacccttaggtctggctctcggaagacacaggtggtacgcagtacatcaaccgcaaatcagaatcagcatatttccagaactatcaaaacggcgccaaacctcagcaagaacggtcaaatgagttcattgagtggatgcttcagacaagatctatagcatggatcataatctggattgtccttaagtttttattgtgctaggggaacataagaaagtatgtagagcaaaatgagaggagctgttgttaccctcaattctttgtgattattgtgctagagtgatgtagttgtttggctttttgaacaatagctggagtgatatgaaacattagtgatctagttgtgaatgatattataattgtgatggttttgtgaatatataattgtggtgcttttgtgtttatgtgatggatctatgactgtggtatactgattaactgtgtatgtctttatgatttgtgtataaaaatctgtgatttatggtgcttaattaaatgtatattattattaataaaaa

SEQ ID NO: 143576 - DNA, 128 bp, Zea Mays
tagtgaaccgcccagtttttaagaaactggtttatggaaactgaggtggtttcaaacataccagtttatgccttagtttatataaattggatacatagtttcttaaaaactaagaagctagcctcttc

SEQ ID NO: 143577 - DNA, 116 bp, Zea Mays
attaattatgaataatgtggttttatgtgtactagtcggttgcccgtgcgttgcgacggcttacaacaataaccatgtaaattatccaccaaaaaatttcaagatttttattgatt

SEQ ID NO: 143578 - DNA, 177 bp, Zea Mays
atggcgatggccgacatgcgagtgcgcgggtctgacgggatccggtgcagacggggaatggctctgcccgacgagtggctgagtggttctggcgtggacataaggggtttgcggcaggcggacaatgagttcgcggttggtggacggacgtggcgccgtcacaggcaacacatatga

SEQ ID NO: 143579 - DNA, 2636 bp, Zea Mays
aggcggcgagatgcggaagtggacgaggaagctgggccacaccctctcccgcatcgtcacgaccaagccgcgcttcgccttctcccagcccaggcctaggcccaggcccaggcccgcacaacccggtctgccttcctcacaacccgtctcgatcccgccgcagccgccggagcttccccccttcgtccccaccgccatgccgcaccacggcagccaccgcccgccggcgccgccgccggggggccccgtgttcccgcgcgcaacgtccacggtggtgcccgacccgtcccgcttcttcgcgccgccgctcctcgccgcgccgctccccaccaactccttcttccagaacttcgtgctcaagaacggggaccagccggagtacgtccacccgtactccgtccgctcccccggaggcgccgctctcgacatctgctacccttcgcggaaccactcgccgtccttcgtcatccagaccttcgtccccgacctcaccgtctccgacgccgccgggagcgcgcagcgccactgcgtctcggctttcgacgacctctccgtcacgctcgacgtctccccgtccctccgcgcgcacctcgtccgcggatgcccgtacgtcaccgtcaccaccacggccggcgccgtcgacatctccgtcgcgtccgtccatgccttcctcgacgtcgcctcctgcgacgactccggcaccaagtggcgcctcgggatgaacagcggccagaccttcctcctctacgcgtcggccccgatccgcctcgcgcagaccaccaccacgcagctctccgcgcctggcttcgccggagccatccgggtcgcctacctccccgacgcgtccatggagccggtcctcgaccgctacagccgctgcttcccgaccgccggccacgcggccctgagccggcccttctgcgtcgactacgcctggcgcaaggacgggcccggggagctgctcatgctcgcgcatccgctccacctccgcctgctcgccgacgactgccccgtgcgggtgctcgacgacttccggtaccggagcatcgacggcgatatggtcggcgtggtcggcgacgcctgggtcctgcgcaccgaccctgtttccccgacgtggcactcgacccgcggcgttagcgaggacggcgtcgccgaagtggtggccgcgctgcgagctgacgtggccggcctcgcgtccaccgcgataaccaccacttcgtcctacttctacgggaaggcgatcgcgcgggcggcgcggctggcgctgatcgcggaggaggtggggtgccccgacgtgatcccggcggtgcagcagttcctcaaggccgctgtgacgccgtggctggacggcagcttccaggggaacggcttcttctacgacgccaaatggggcgggctggtgacgctgcaggggctcaaggactccggcgccgacttcgggttcggcatctacaacgaccaccactaccacctgggctacttcctgtacgccatcgcggtgctgtccaagatcgacccgtgctggggccgcaagtacatgccgcaggcctactccatggtggccgacttcatgacgctgtcgcgcaacaaggccggcgccagcttcacccgcctgcggatgttcgacctctggaagctgcactcgtgggccgggggcctgacggagttcgccgacgggcgcaaccaggagagcaccagcgaggccgtgaacgcctactactcggcggcgcttgtggggctcagctacggggacgcgcacctcgtctccgtgggcgcgacgctcaccgcgctggagatgctggcggcccagacgtggtggcacgtccgggaaggggagggcatctacgaggacgacttcagcgggaacaaccgcgtggttggggtgctgtgggccaacaagcgcgacagcgggctgtggttcgcgccgcccgagtggaaggagtgccggctggggatccagctgctgcccgtgctgcccatcagcgaggcgctgttcccggacgtggcgttcgtcaaggacctggtggcgtggacgctgccggcgctggcgagggacggcgtgggcgaagggtggaaggggttcgtgtacgcgctggaggggatctacgacagggaggcagcgctgaccaagacccgcgccctcaaggggcatgatgatggcaactcgctgaccaacctgctgtggtggctccacagccgaggcagcgtcgtcggtgacggcgacgctgggttcggccgctgctgctggtaccgccagtactgccactgacgaaagtgtggtgaccagcacgagtgtggttgttcatgtctgcttgcggagcagagcacgtagatcagtgaagggatggagttgatacgttgcaaagtcattgtggttgttattcgttgatactacacacttctatacagttgaataaagtcagtcctttatgtgaagcttgatgatgctatctgttacatggatcttgggttatcataaatttctggcttgaggagattgttggttacttaattttgattccttaatggcattgaaagacaaggcaacatctatcttttttaatctctcactctccaagacaagatagaataaaaggatgaaaagaatattaaagacaacataaaacacaagttaa

SEQ ID NO: 143580 - DNA, 1835 bp, Zea Mays
ttattgatcaagcaggtagcagcctataaagtttcctcgctcccagtctcacactctcactccacggtgtgatctgagtagtccaccatggatacctcgaacgccttcgcggtcgtcactctcctcctactcccgctgcttctcgccctagcgcaacttgtacgacgtggatctccccagtacccgccggggccgatggctcttcctgtcatcggtcaccttcacctgcacctcttcgagaggcccctccaccgcaccctggcgtgcctcgcagctcgccacggcactgtcttccagctctggttcggttcccgccgcgtcatcgtcgtgtcgtcggctgatgccgccaaggagtgcctggccacgctcgacgtggcgttcgccaaccggccgcgtctgccgtcaggccggatcctctcctacgactggaccaccatgggcacctctaactacggaccctactggcggcgcgtccgccgcatcaccgtcacccatattctctccgtgcactgggtgcagcagttcgccgacgtgcacgagcgcgagacgcgggccatggtgcggggcctctaccgccccacggcccgcaacggcgtgcgacgcgctcgggtggagctcaagtcgcggctgttcgagctgctgatgaacgccatgatggggatggtgtgcgctaagaggtactacggctgcgacgggaaggagaacgagacagaggcggaggtgagcgaggaggcgcggtggttcagggagatggtggaggagaccatggagctgagtggcgcgtcgacggtgtgggacttcctgccggcgtgggcacggtggttggacgtgggcggagtggggcgccggctgtggcggctgcgggaaagccggactaagttcttgcaggggctgatcgaggagcagaggaaggagatggagaatggcccgcagccgcaggcacggaagaccatgatcggagtgctgcttacgctgcagaacgaggaccccgacgcctgcccggacaacctcatccgcaccatgtgcattagttccctcgaagctggaacaagtacttcagcggacgcagtggagtgggcgatgtccctcctgttaaacaaccctggcgcgctggcgaaggctcaagaagaaatagacgcatgcgtagggcaaccagcacgcctaatcgaggcggccgatctcccgaagctgcaatacctttggtgcatcatcatggagacgttgcgtctatacccgccgacgccccttcttcttcctcatgaatccgcaaatgactgcacggtcagcggatttcacgtacccatggggacaatgctcctagtcaatacgttcgcgatacatagggaccctgagatttgggatagacctggaagcttcatgccagagaggttcctgggtgagaacagtgaaggcaagatgttcaacccatttggtatgggaaggagacgatgcccgggggagaatttgggcacgcagatggtaggacttgctctggggactatgatccagtgtttcaattgggaaagagtaggagatgatcttgttgacatgaccgagggagctggattaaccatacccaaaaaagtgccactggaggccttctatgagccccgtgcttctatggcgaatctgctttcgaagatttagaggtgtcgtgcgagttttatagtaaagtttatagctacatagtggttattaatcctagacaacgtatttacgtgtgttgagatatatgttggatataataggatttcgtttcctattgtatattcatacatagtgaaggtatcgacaaccttaagggtttaagcccttacaataatttttatggtatc

SEQ ID NO: 143581 - DNA, 399 bp, Zea Mays
atggtcccaacgaccaccgatgtcggcggagttggggaacgaggaccaactgccactgcagtgggtggaggaggcggtggtgccgccagatcgacgtccatcggtgcagttaccgacgattccgcgtcacccatcggcatcggtggtgacgaggacgcagtggggaggccacactccaccaccggcagcggtaaaaccgctgtccatccgtggatgacacagaaatgcacattttgcacttgcacatggcattcagggatggcgtgcactggtgggatcgctgcgtcttgcctagcagcaaacgcctccaacagtgtgtcatcaacgacatggagaacttcacgcatacgacggatgcgaagagaaatggtttgctccatacctttcctgttgatttga

SEQ ID NO: 143582 - DNA, 725 bp, Zea Mays
agcccaaaggacacatgcatggcgccaggcgctagcgctgcgcaccggagcagcggccacaccgcctcgccctccctccaccggcacggcggcacctgcgaccatgatcaacaactcctcatcaccaccaccgtcacccgcgcagcctccgactcccatcgacccgtggggcgatacatttctctcccgcctctccgccgtcgtcctcctcctcgcctactcctcctgcgccgccgtctgcctctaccacaccgcgcgcttcctcctccaatgcctcgagcgccgccgcgccgcgcgggaggcgcaggatcctaagcccccctcccaagccgtggacggcgccggcgccggcgccgtgtgggcggaggccgactgcgccatctgcctgtccgagctcgacccggagggcggcgagcgcgttcgcgtgctcccggcgtgcggccacgcataccacgacgcctgcgtgcaagcctggctcgccacgcgcgcgtcctgccccacctgccgcgcgccctcccggtcccggccgtcacggacgaccagagcgccgtagccaagccggatcagcaggcagcctacagctgcggtgctgcctgacggctctgtctatgacacgtacaagaagcggcgccatatagttccgtggtgtttgtttgactatagcggatacaaatgcaaagttaactgcgactagtagactagttcatgtggaattagagctctca

SEQ ID NO: 143583 - DNA, 1627 bp, Zea Mays
cgcgtccattctcattctcagtatagagaggggaagaggaacagagagagagagagagagagagagagagagagagagagagagagagagagagagagagagagagagagagagagagagagagagagagagagagagagagagcaatggggaacaggcacctctgctgcctgtgcttgctccttctcctgggactggcgtccggccaggtcctgttccaggcgttcaactgggagtcgtggaagcagagcggcggatggtataacctcctgatggggaaggtcgacgacatcgcctccgccggcgtcacgcacgtctggctcccgccgccgtcgcactccgtctccacccaaggttacatgcctggccgtctgtacgacctggacgcgtccaagtacgggacggcagcggagctcaagtccctgatcgccgcgttccacggcaagggcgtgcaggtggtggcggacatcgtcatcaaccaccggtgcgccgactacaaggacgcccgcggcatctactgcatcttcgagggcggcacgcccgacggccgcctggactggggcccccacatgatctgccgcgacgacaccatatactcggacggcacggccaacctcgacaccggcgccgacttcgccgcggcgcccgacatcgaccacctcaacgaccgcgtccagcgggagctcaccgactggctgctctggctcaagtcgtccgacctgggcttcgacgcctggcgcctcgacttcgccaagggctactcccccgaggtcgccaaggtctacgtcgacgccacggccccgaccttcgccgtcgccgaggtatggaacagcatggcgtacgacggggacaacaagcccgagtacgaccaggacccgcaccggcaggcgctggtggactgggtggacagggtgggcggggcggcttcgccggccaccgtcttcgacttcaccaccaagggcatcctcaacgccgccgtcgaaggcgagctgtggcggctcatcgacccgcaggggaaggcgccgggagtcatcggctggtggcctgccaaggccgtcacctttgtcgacaaccacgacaccggctccacgcaggccatgtggccgttcccctccgacaaggtcatgcagggctacgcctacatcctcacgcaccccggcaacccgtgcattttctacgaccacttcttcgactgggggtttaaggacgaaatcgccgccctggtggcggtgcgcaagcgcaatggcatcacgccgacgagcgagctcaccatccttgagcacgacggcgactcctatgtggcggagattgacggcaaggtcatcgtaaagatcgggtccaggtacgacgtcggccatctcatcccggcgggttttgaggttgccgcccacggcaacgactacgccgtctgggagaaagccggcgccgaacaagtgactcgagcataatagagtgctcgagataccgatttgattctcagtacaatgtacacgggactgcattgataaaataagtggtttctcctctaataagtaagggagcgtaaaagggcaattggagccatgcatatgtaaccttaaaatattgttgagtaaaatataaaggtgatccctaaattctccttttc

SEQ ID NO: 143584 - DNA, 1926 bp, Zea Mays
gtccttgcattgcctaatttcactgaagtttttacagttgagactgatgctagtgatgttgggttgggtgcagtgcttatgcaaaaaggacagcctctagcatacttgagcaaggctttatctgagaagaacaaacatttgtccatctatgacaaagagtttctggccttgattatggcagtagaaagatggcgatcttatttgcagtaccaagagtttgttattcttactgatcatcaaagtttgtgttatctggaaagtcagcaactgcaatctgatctccagaggaaggctatgtctaaactcatgggtttgcagttcagaattgtatatcgaaaaggaagggagaacttagctgctgatgcattatccaggatgggatctgtcctgtctttgcagactgtgtctgaagttcaaccaatgtggttgcaagaaatccttaattcttatatgacagacccggtggcccaacaacttttggctcagttggctgtcagtagtcctaatgaagaaggtttttccatacaccaaggtctgataaaaaaagggaatcagctttgggtgggtcacaattcagctctcaggaccaaacttatttctgttttacatgatagtgctttgggaggtcattctggtatcatggctacatatcaaagggtgaagaaagcattttattggcaaggtcttaagagggatgtggaggactttgtgaaacagtgctgcatttgtcagaaagccaaatctgagcatgtccaccctgctggtcttcttcaacctttacctattcccactggtatttggcaagatatctctatggattttatagaagggttacctaaatcggatggctattctgttattttagtggtggtggataggctatccaagtatgcccattttttccctctcaagcacccatttacatctggtcaagtggctcaagttgtgtttgacaacatctgcaagttacatggattgcctaaatcgattgtctcagatcgcgataaagtgttcactagcactttctggaagcagttgtttactctgatgcagaccaagctcttattgtctactgcctaccacccacagagtgatggtcaaactgaacgtgtcaatcaatgtcttgagatgtatctcagatgtgctactcatgattctcctactaagtggaagctgtggttacctttggctgaattttggtacaatactacatatcacacctctttgggttgctctccttttaaagtcgtctatggatatgatccccctgtggctgctgctcctagtcttttgttacctgaatctggtgggaatggggttgtgcctgcgattgatatggctgtccaggatctgctgttgtctcacgaacgacatctggaattgcttaaggtgcagttggctcgagcccagaatcgtatgaaacagaaggctgatcgttcccgtactgagagggagtttcaagttggtgaattggtgctgcttaaactgcagccatatgtgcaacattctgtggtttttcgttcctgtccgaagctggcttttcattactttgggccttataaggtgttgcagcgtattgggcaggtggcttacaagttggatttacccccggattctaagatccatcctgtctttcatgtgtctcagctcaagagtttcaccccaaatcattgtccagtgttttctgagttgcccactactctgtctttagatcagggcgttctgaaaccagttcgtattttggatcgtcgtttggtccgtaaagggaatcaggctgttcctcaagtgcagatccagtggactaacaagaaggatgaagctacttcctaggaggattggaatgtgcttattcagctctttcctgaattaagtacttggggtcaagtaccaactgaagagggggcgagtgtgacgacttcgaaggtc

SEQ ID NO: 143585 - DNA, 2507 bp, Zea Mays
gtgtgtgatgtactcatgtgtagtataaaggatgtgatgggatgagacggttccttttaccaatcattccctacttatattacccgtccatcatgcagccatccgatttttctttcttgttttaccgtatactacagcacaaggataaattcctacagaccgacctcatatgcattgcatggtgagcccttccacatatacacacatgcatgtagtggcagtagctaggcgagctagttttttttttatatagatatccagccgtagtgctctcacatcgatcgctcgcactcgcactcgcactcgcactgacctgacgctacgctgcctacaatctatctacctctaccctccctcatcacttgttccactacgaccggccacctcgccgcgcgcgcaagcctgcgtcaccacccaccgtgcagcacgacagccagcaatggccgccgcccactgaggcagagtcgcagtgacggcacgggacgcacacccacgggcgctggcggcatgccgggcgacgcctacgacctcctgtgcgccgaggacgacgccgccggcagcgccctgctgtgcaccaccgacgacgacgacgggtgctgctccgctgtcgaggacgactcggcggcggcggcggcggcatccatcgccgagctcatcggcggcgaggcccagtactcgcccaggccggactaccccgacaggctccgctccaggtccatcgacccggccgcccgcgccgagtcggtcgcatggattctcaaggtgcaagaatactatgggtttcttccattgacagcctacctcgccgtcaactacatggaccggttcctctctctccaccgtttgccgcaggaggacgggtgggcgatgcagctgctggccgtgacctgcctctccctcgctgccaagatggaggagaccctcgtgccctccctcctggacctgcaggtcgagggaaccagcaggtacgactgcttcgagcctgggacggtcggccagatggagctcctcgtcctgatggcgctcaactggcggctgcgctcggttactcccttcaccttcgtcgacttcttcgcgtgcaaggtcgacccaggagggaggcacaccaggtgcctcattgcccgggccacgcaagtgattctggctgcgatgcatgacgtcgagttcttggaccactgcccgtcatcaatggcggcagcggccgtgctctgcgccatcggtgagacgccgtcgctggagtcggtcagccctggggctgccgtcagctggtgcatcggccttgcagaggaagggatcagcagctgctacagactgatgcagcggctggtgataggcaacgtccggacaagggtcgccagcacgacgaccattaccatggcagcagtgaacctgtgctgctcggatgaggcgctgtcctcgcattcctctgccacctcctcgccacccccggccaagaggaggaagaggtcgccaacggccacgtgaaaactgaagaacgcaagtagataggattatttatacgctttttgggggggcagattaacagggtttgatcgatttctttgcagtttgtttgtcgttttttcttctttgtgattctttctcctttttttcccccttttgccatttatttgttctgttcttttgggttggatctctactcctcggtggggggattctgcctgcctgctcgaccggcccagtcatcatggtggcctctggcctctgcaacgcgcgccagccagtatgtgaaggcgacgagactcgagagagagagaaagaaagacagctactacgtataacagacacatctgtgtttctctgtgcaacactctgtggggcttcttcaaccccgacgcagagctgcagagagggaccattgattggtgagcgagggcagccatggcggcagatggagatggagagggtgggggaaagaggcaatgagttgcggtggatggatgatgattggtagggttaaatgaggtggtcaaagggccgggcggtcagtgctcctgccaagatgcagccctgcctgcaaagtttctgttcatattcatgagggcaaaaattgtttgtttccgagtggtttgtttgtattttgttgatgccgctgaggcgagggcgtcagagagagagaaagagagagagagaaagaggggcatgctttgctttgctgtgatgggagtcacatggatatgccctactgtggtggtgctctggagggaaatatttgtccatctccagagctaacagtgtccaagcatggggcttttgggggcccttgctgattgtttgtatctcttttttcttgcttgtgtatcaatgaagattttgccatttgaattggcctgagaagagagtacaagctgaagagagagtttctgtgttttgcctgctgctggattatatgtttgtacctcttccttcttgtttatgtatcaataaagattttgccatttgaattggcttgagaagagagtaaaaaagagaaaattggtgttttt

SEQ ID NO: 143586 - DNA, 2388 bp, Zea Mays
gtgtgtgatgtactcatgtgtagtataaaggatgtgatgggatgagacggttccttttaccaatcattccctacttatattacccgtccatcatgcagccatccgatttttctttcttgttttaccgtatactacagcacaaggataaattcctacagaccgacctcatatgcattgcatggtgagcccttccacatatacacacatgcatgtagtggcagtagctaggcgagctagttttttttttatatagatatccagccgtagtgctctcacatcgatcgctcgcactcgcactcgcactcgcactgacctgacgctacgctgcctacaatctatctacctctaccctccctcatcacttgttccactacgaccggccacctcgccgcgcgcgcaagcctgcgtcaccacccaccgtgcagcacgacagccagcaatggccgccgcccactgaggcagagtcgcagtgacggcacgggacgcacacccacgggcgctggcggcatgccgggcgacgcctacgacctcctgtgcgccgaggacgacgccgccggcagcgccctgctgtgcaccaccgacgacgacgacgggtgctgctccgctgtcgaggacgactcggcggcggcggcggcggcatccatcgccgagctcatcggcggcgaggcccagtactcgcccaggccggactaccccgacaggctccgctccaggtccatcgacccggccgcccgcgccgagtcggtcgcatggattctcaaggtgcaagaatactatgggtttcttccattgacagcctacctcgccgtcaactacatggaccggttcctctctctccaccgtttgccggaggacgggtgggcgatgcagctgctggccgtgacctgcctctccctcgctgccaagatggaggagaccctcgtgccctccctcctggacctgcaggtcgagggaaccagcaggtacgactgcttcgagcctgggacggtcggccagatggagctcctcgtcctgatggcgctcaactggcggctgcgctcggttactcccttcaccttcgtcgacttcttcgcgtgcaaggtcgacccaggagggaggcacaccaggtgcctcattgcccgggccacgcaagtgattctggctgcgatgcatgacgtcgagttcttggaccactgcccgtcatcaatggcggcagcggccgtgctctgcgccatcggtgagacgccgtcgctggagtcggtcagccctggggctgccgtcagctggtgcatcggccttgcagaggaagggatcagcagctgctacagactgatgcagcggctggtgataggcaacgtccggacaagggtcgccagcacgacgaccattaccatggcagcagtgaacctgtgctgctcggatgaggcgctgtcctcgcattcctctgccacctcctcgccacccccggccaagaggaggaagaggtcgccaacggccacgtgaaaactgaagaacgcaagtagataggattatttatacgctttttgggggggcagattaacagggtttgatcgatttctttgcagtttgtttgtcgttttttcttctttgtgattctttctcctttttttcccccttttgccatttatttgttctgttcttttgggttggatctctactcctcggtggggggattctgcctgcctgctcgaccggcccagtcatcatggtggcctctggcctctgcaacgcgcgccagccagtatgtgaaggcgacgagactcgagagagagagaaagaaagacagctactacgtataacagacacatctgtgtttctctgtgcaacactctgtggggcttcttcaaccccgacgcagagctgcagagagggaccattgattggtgagcgagggcagccatggcggcagatggagatggagagggtgggggaaagaggcaatgagttgcggtggatggatgatgattggtagggttaaatgaggtggtcaaagggccgggcggtcagtgctcctgccaagatgcagccctgcctgcaaagtttctgttcatattcatgagggcaaaaattgtttgtttccgagtggtttgtttgtattttgttgatgccgctgaggcgagggcgtcagagagagagaaagagagagagagaaagaggggcatgctttgctttgctgtgatgggagtcacatggatatgccctactgtggtggtgctctggagggaaatatttgtccatctccagagctaacagtgtccaagcatggggcttttgggggcccttgctgattgtttgtatctcttttttcttgcttgtgtatcaatgaagattttgccatttgaattggcctgagaagagagtacaagctgaagagagagtttctgtgtt

SEQ ID NO: 143587 - DNA, 808 bp, Zea Mays
ctctcatgagctctttcttagttaatgaaggctgatgaacgtcgattggttgttgttgattgcactgcattgcaggtcgagggaaccagcaggtacgactgcttcgagcctgggacggtcggccagatggagctcctcgtcctgatggcgctcaactggcggctgcgctcggttactcccttcaccttcgtcgacttcttcgcgtgcaaggtcgacccaggagggaggcacaccaggtgcctcattgcccgggccacgcaagtgattctggctgcgatgcatggtaatataataatgcactgcttgtgcttggggctgggggccgccggggtaaacttggtgctgcgctgcagtgcatgcagttccaacctccagtgtactaactgcggaactgccacagacgtcgagttcttggaccactgcccgtcatcaatggcggcagcggccgtgctctgcgccatcggtgagacgccgtcgctggagtcggtcagccctggggctgccgtcagctggtgcatcggccttgcagaggtatatactccacacaagaactattagtctattacgatatgccaatttttttagctttataatttggaagtatatacgtgccaaacatttggtttttttttttgcctgaatataggaagggatcagcagctgctacagactgatgcagcggctggtgataggcaacgtccggacaagggtcgccagcacgacgaccattaccatggcagcagtgaacctgtgctgctcggatgaggcgctgtcctcgcattcctctgccacctcctcgccacccccg

SEQ ID NO: 143588 - DNA, 706 bp, Zea Mays
ataatttttgggaataatttttttggcttcgagttgctcttcctactccgcgcccggccgcctttgcctgccttcccatctcctctggtcttccgccatggcccagcccgtattcctctcctctctccgctcccgcctctgctccgcgccgccgtcgccgcaccatcacctccagcccagccgcggctaccacgtcgagctcggcgctcgcgagaaagcgcttttggaggaggatgttgctttgaagaggttcaaatcatacaagaacagtgtgaaacaggtctccaagattgggaatgttctcactttagctgttgtatttggttgtagctacgagcttggtgtgttggcggcaagcatgaagtgaaggaaaacacagccattattccgggaagtgatccatcagcgtagactgtcattctatcacctcgtgtttttagcctgtctgcgtctctctttttttttttgtcgtgcatcatgtataaaataaaactaaactaggttaaccttgatttgcgaataacgttttctgtttctatggcctagtcgcaaacgaagtggcacaagcattccatggctaatcttgatgaatgagcatcgcctgcttttgtttgccacctggcagtgcatcctgctgcacagacagtataacagacgtatcatttgtcgaattcggttcatcaacaaaataaaggtcgttaatccc

SEQ ID NO: 143589 - DNA, 1389 bp, Zea Mays
gggtttgaatcattcttccaactggtcgaccatgaactccaatagatcatcaaaaatcaagcccttatgggaggggagctgtgacgatgttgacatgtgtgagtttgcagacaaggatgaatatgcaccagtaggatctagctataatcctatgtcagaaccatttgataactgggaaaacaagtttgacacaagcccagagcaaagttctcatgaaccaatggaatttggtgaattggccaaacatgctgaaagcagcataactgagaatgattttacgtgtcctgttgagggaagttgtgaagatgatgtacttacagagtcaaaaataaaggcatttcttgaggagaaggctcttgacctgaaaaagctacaaacacctttgtatgaggagttctacaacactgtgcacggagggagttgccaaacttccaagggaaaattcccaatcagtccaaaattgccccctcgaggaaagtcacctccaagtaagacgaggggaggtgcatgtgacactttgaataacacagctcccgaaagctgcagcaagcaatttcctagaagcagtgtggtggagagcagccgaattttgagagaaattgcttctcctcaacttaatgagtttgctgataaactccatcttgatgcccaagatagcccaagcatcagcttcaccgaaaggcagaggaagtggaaagaagagttggaccaggaacttgagagggagagagtgatgagattagctggctgtggtaaaactccatctccaaatagaggttccaacgtgaaaaaggagtgtcatgctgaccattgaacagacagcagcattcgtcgtctctttatatcatcccacagaagacacaacaaatgatagtaaagtacacagtgtgccagagattggtggcaacagcagtacagcctgtgccaccttatcatttgcggtgttagccaagctatgatcgcagaaccgtcctgtacaaaatgacagatttacgttgaagtggatcggtacagggggcactcatcacccattcaccctcaaatcaggatcattgtcgctgctgcctagaaggacgtcatgctgacacttccctgattttaaggccgcatttatcattctttttgatgcagtgctatacgtcgggcttcggttatgtatggtttatgttgagaaaacggtcttgccaaaattgtgtttgtaagcccagattggcgtggggcttggttttgtatggagcttgtttgcgaaagtgtgtaataagatagtgatgcgagatacgggtcattctgcatttctgcttgcagaatgaatctgagcttttctgaagctacaactgactgtaattaataatttcaatcaaatcgtgagtcctgtgcctgtatgttaca

SEQ ID NO: 143590 - DNA, 855 bp, Zea Mays
atgcgacgggacgacgccggcggaggaaccgggttccacgacttgtttgactcggtgcgccgctccatctccttccggcccaccgcccccgccccggaagcccccgcgggcccattcggcgcgggggcaggggggatcggcgtgcggatcagctcttgcctccggaagtcgcgggggatggggctgctaggtctcatcactaaaagcccctcgccgccgcgccgcatgctaccgccgatgcccgatcagtcggacggcggcagcggagggggtggggccaacggcggagtcggagaggagaacccactgatccggtggcgtaagggggagctcatcggggccggtgcgttcgggcaggtctaccttgggatgaacctggactcgggcgagctcctcgctgtcaaacaggttttgatcggcacgagcaacgcgacacgggagaaggctcaagctcatattaaagagctcgaagaagaagtgaagctactcaagaacctgtctcaccccaacattgttaggtaccttgggactgttcgtgaggaagacacactaaacattttgctggaatttgtccctggagggtctattcagtcacttttggggaagcttggttcattcccagagcctgtcattaagaaatacactaagcaaattttgcaaggattggagtatctgcatagcaatgcaataatacatagagatataaagggtgcaaacattcttgtagataataaagggtgcatcaaacttgctgattttggggcatctaagcaagtggcaaagttggctaggttcagggatgtaaaatttatacaaagtaggatgaaggggctgaatttccaagcgaaggcttaa

SEQ ID NO: 143591 - DNA, 2539 bp, Zea Mays
accgggacgcgagcccgaggcaaaacccctatcgagaagaaacccaaaccgccctcagccctggcagcgaaacacccagcggtcccttccaggctaagctacccttttcctccccgacgccttctctctcccggcgcataaaaccaagcgcgcaccacaccacgcgcacttcacactcccaggctccggctccagctacagcatcagccccagccccagccccagccccagccaggagccagccacgggaacaaaggaaccagtgcaccacaagctccaaagcagccaacacacaccaagaaaaaaccaaaagccatgcccccggtagcagcaaaagcaccaatcgttccccgccgccgtctctaagctactgtgcatacccccacctcgcggccgctcgccggtccatgggtgcggctcgtccgcggcgctggaagctgccgttccaccgcaccgtcagcgccgtgggcggcgggggcggcgcgccgtgctcgccctcgtccaggtcgtcctcctcgcccgcgcggtccgaggcgtgggcggccgaggcggtgccggaggagttcctgtgcccgatctccggcgcgctcatggcggaccccgtcatactgccgtcggggaagaccttcgagcgggcctgcctccaggcctgcgcggagctcgcgtttctgcctccgggagtcgaggccggggacgcggacactgtcatccctaactccgcgctcaaggcggccatctgcacttggtgcgcgcgctccggacgggaggtgccggcgccgccgtccgccgaggcggcgcggcaggccgtgcagcgcgctatgcctccggcggctgccaagtccgtgaggacgaccaccacaaggcgcgcggtggtgatggccgcgagcacatcaaactcgtccacgtcgtcgtacgggtcggcctcggagatcaccgcggcggaggacgaggccaaggccaaggaagaggcgccgcggaggaggacggtcaaggaagcggaggtggagccggcggcggcgccgccggctgacccgctggaggacgatgtggtgggcaaggtgatggacgcggacgacgacggcgtggtcgctgcggcgatgggcgcgctgcgggaggccacgcgcgagggcgaggagcggcggcgcgcgctatgcacgccgcgccttctcggcgcgctgcgccgcgtgctgctgctcccacgccacgcggccgcccgggtggacgcggtggccgcactggtcaacctctccctagagcccgccaacaaggtgcgcatcgtgcgcgcgggggcagtgccggcgctcgtcgaggtgctccggtcgggcgcgtcggcgcccgaggcgcgggagcacgcggcgggggcgctcttcgggctggccctcaacgaggacaaccgggccgccatcggcgtgctgggcgcggtaccaccgctcctcgacctgctcacgtcgcccacccacgcgccccgcgcgcgccgcgacgccgggatggcgctctaccacctcaccctcgcggccgtcaaccagtccaaggtcgcgcgcttccccggcgcgcccaaggcgctgctcgccgtggcctcgggcgccgcggagccggggcccatccggaggctggcgctcatggtggcctgcaacgtggccgcctgcgccgagggccgcaacgcgctgatggacgcgggcggcgtggcgtccgtctccggcatcctcctctcgccttctcacgacaccaccaacggcggcggtggcaccgcggacctggaggagtggtgcctgtcggcgatgtacgcgatgagccgaggcagcctccggttccgcggcctggcgctcgcgtccggcgcggaccgggcgctccggcgcgtggtggccgacgagggcggcggcgtccggcgcgagattgctcggaagaccctccgcgccatgcggagcgacctcgacgaggacggcggcgagtacaacgacctgaccggaagcagcgcggagtgcggcgacggtgaggactgcggcgggagcatcgtgtcggacgggctcatgtcgttccggcgccggcagcgcgagctcggcgtctcgtcgtgcggcaacaccgccgagttctgaacccgttctccggcgaccggtgcccgtccacgtccattgcgactgatgttttgcgcatgtataaattgcttggttttaggttcacgaggttagacatttgtgccgtgtgtgaagcagatgatgaaaaacttccatggtttttggaacctgtgtgtgtgactgtcagtgaagctccctgctcgtacctcacgttggcctgtttggtgctcagctgttgggagtaacgggatgtgtaaagcgaccggctcgtgtgccggacaaggaggttgggttgggtgttgcttgcaagtcagagcatgcctttgttcttcttgtatccgtactccctcgcgctcctgatctgctcgcaggcagctcgtgtccttgacggcccaaccatatagcttagagcgagagagacacacgcatgtgtctccatcagtaaaggaagccatctttgtgctctg

SEQ ID NO: 143592 - DNA, 1146 bp, Zea Mays
caaaccctaatcccctcaaccctcatcccctgcacagcccacagccaccgagcacctgcaggctgcagcctcgcgttcggcgttcctggctccccgcaccagcggctcagcccccatgtggccagcaggagcacgacgcgcaacccaacaggagcatggtcagcacgggcccgatgcccgcgagagcacgacgcgacgccctgcactacgcggttgcgcccctaccagcccggtcgccatcctgcctcttcttctcctccctcgcctcgatctgctgctgacgctgatccagcccggccaccatcctgcctcttcttctcctccctcgcctcgatctgctgctgccggtgatatgctgctgctagatccgagtgccgtgcccacgggtcacggctagcgatcagatagtgactgcccctgcagcctgttgtgccccctgccagtgagcagacagacaccgcccctgcccacgggtcatggccaggctccaccgatcactggatctccagcctgcttcttcggtttagacagtgacaacgagtgctcaatttggttgtactttaattggccgattgtttagttttgtttagttctaaaaaaattggttccatgacaatgtgatgcatcagcaggatggcatctagaagtggctctggctcgcaagctccttgtccaccaccctcctcacaagctggtttgaggagacatatctcaaatagagctagtgctacttgttggggcgaaggcgaagacgctacccttcgctccaggccttcatcacctcgctgcaccaacggaggcaagatgactggcgcggctcacccttcgtcctcctcactgcaagacgaaggcctacgacgaagtctctccatcccacgtcctcacccaacctggaggcccacgtgggattcggcccattgtaacagaccccgcacggagaagcgtgttacatacccgatttgtaatagcttttctgtaatgatagtctataaccctcccctgtgggaatattctggggatagtccaggtgcctgagggcataagcgtccttacatcgggacgttgggcactcgggcacctataaatactctcgtacaatgcccttgagaggctggattaacagagcaattgtcatctcgaggtaaa

SEQ ID NO: 143593 - DNA, 1743 bp, Zea Mays
accggcttctaccatccgccaccgcccgccgcggaattcggaaaccccaaaccccaacgcggccgctgtgacgctgtccctggagatggcggcgtacttgagcatgggtgaagcgcaacgccgcatcggcgactacctctctcgggtgaccaacgccatctcctgctccgacgccgccgcgctcgcctcccttctttccgtctcctccgcgccggcctccaccccgctctccgacgcgctcgccgccatcccggacttcccgcgcctcgctggagatcgctaccccgaccttgccgacctcctcgttccgttgctccgagccatccacttccactccatccagcgcttcgccgacgcctactcctcgttcgagaaggcctccaacgcgttcctgcaggagtttaggaactgggagacgccgtgggcgatggaggcgatgcacactgtggcgctcgagatcaggctaatcgccgagaaggcagatagggagcttgcgacgaatggaaagaaccctgacaagcttcaggcggctgggtcttttctgatgaaggtttttggtacactagcggtgaaagggcctaagcgtattggggcactctatgttacctgccagctattcaaaatttacttcaggcttggaacagtaaacctttgccgtagtgtcataagaagtatcgaaactgcaaggaattttgattttgaagactttccagtgaaagacaaggtcacttatatgtactacactgggcggttggaggtgtttaacgagaactttcttgttgcagatcagaagctaacttatgctttgatgcattgcaatcctcaaagcgagtcaaatttgaggagaattttgaagttccttatccctgtaaagctttcaataggtgtactgccaaaaaggactcttttggagcggtatagtttgcttgagtatgcagatgttgtcactgcacttaagagaggagatctcaggcttctcaggcaagctctagacaggcacgaagaccaatttttgaaatctggcgtctaccttgtactggagaaacttgaacttcaagtctatcagagattagttaagaaaatccacatcattcagagacagaaggaaccagctaaggcacatcagattaagctagatgttgtcgtaaaagctctgaaatggcttgaaatcgacatggatgtggatgaggtggagtgcatcatggcatgccttatatacaagaaccttataaaagggtactttgctcacaagagtaaggtccttgtcctcagcaaacaagaccccttccccaagttgaacgggaagcctgtttaaatacaattgtcacggagaaatcctgtaatacaatggtattttttttgtttagtatgcagagatgctttccatattaagtgaaactccaagcctgacaaggacatttagggcctgatcggttataccggaataagccaggattcattctagctcatcaaaatctatataaggccttgttcgtttgtgccggattggtgggtcggaacgattcctaaccggattgtttctctaaattatataaactttgattagctgaaacgatttcgggtgcaatccgacacaaacgaacaaggcctaaattagagaagtaatccagctaggaattaatccgggactccaatcccaaacaaccgaacaaggccttatatttaatcacctctggatgtaatgtaacctgtatcattattgcctcattgaccttcattttc

SEQ ID NO: 143594 - DNA, 1480 bp, Zea Mays
accggcttctaccatccgccaccgcccgccgcggaattcggaaaccccaaaccccaacgcggccgctgtgacgctgtccctggagatggcggcgtacttgagcatgggtgaagcgcaacgccgcatcggcgactacctctctcgggtgaccaacgccatctcctgctccgacgccgccgcgctcgcctcccttctttccgtctcctccgcgccggcctccaccccgctctccgacgcgctcgccgccatcccggacttcccgcgcctcgctggagatcgctaccccgaccttgccgacctcctcgttccgttgctccgagccatccacttccactccatccagcgcttcgccgacgcctactcctcgttcgagaaggcctccaacgcgttcctgcaggagtttaggaactgggagacgccgtgggcgatggaggcgatgcacactgtggcgctcgagatcaggctaatcgccgagaagatagggagcttgcgacgaatggaaagaaccctgacaagcttcaggcggctgggtcttttctgatgaaggtttttggtacactagcggtgaaagggcctaagcgtattggggcactctatgttacctgccagctattcaaaatttacttcaggcttggaacagtaaacctttgccgtagtgtcataagaagtatcgaaactgcaaggaattttgattttgaagactttccagtgaaagacaaggtcacttatatgtactacactgggcggttggaggtgtttaacgagaactttcttgttgcagatcagaagctaacttatgctttgatgcattgcaatcctcaaagcgagtcaaatttgaggagaattttgaagttccttatccctgtaaagctttcaataggtgtactgccaaaaaggactcttttggagcggtatagtttgcttgagtatgcagatgttgtcactgcacttaagagaggagatctcaggcttctcaggcaagctctagacaggcacgaagaccaatttttgaaatctggcgtctaccttgtactggagaaacttgaacttcaagtctatcagagattagttaagaaaatccacatcattcagagacagaaggaaccagctaaggcacatcagattaagctagatgttgtcgtaaaagctctgaaatggcttgaaatcgacatggatgtggatgaggtggagtgcatcatggcatgccttatatacaagaaccttataaaagggtactttgctcacaagagtaaggtccttgtcctcagcaaacaagaccccttccccaagttgaacgggaagcctgtttaaatacaattgtcacggagaaatcctgtaatacaatggtattttttttgtttagtatgcagagatgctttccatattaagtgaaactccaagcctgacaaggacatttagggcctgatcggttataccggaataagccaggattcattctagctcatcaaaatctatataa

SEQ ID NO: 143595 - DNA, 1477 bp, Zea Mays
accggcttctaccatccgccaccgcccgccgcggaattcggaaaccccaaaccccaacgcggccgctgtgacgctgtccctggagatggcggcgtacttgagcatgggtgaagcgcaacgccgcatcggcgactacctctctcgggtgaccaacgccatctcctgctccgacgccgccgcgctcgcctcccttctttccgtctcctccgcgccggcctccaccccgctctccgacgcgctcgccgccatcccggacttcccgcgcctcgctggagatcgctaccccgaccttgccgacctcctcgttccgttgctccgagccatccacttccactccatccagcgcttcgccgacgcctactcctcgttcgagaaggcctccaacgcgttcctgcaggagtttaggaactgggagacgccgtgggcgatggaggcgatgcacactgtggcgctcgagatcaggctaatcgccgagaaggcagatagggagcttgcgacgaatggaaagaaccctgacaagcttcaggcggctgggtcttttctgatgaaggtttttggtacactagcggtgaaagggcctaagcgtattggggcactctatgttacctgccagctattcaaaatttacttcaggcttggaacagtaaacctttgccgtagtgtcataagaagtatcgaaactgcaaggaattttgattttgaagactttccagtgaaagacaaggtcacttatatgtactacactgggcggttggaggtgtttaacgagaactttcttgttgcagatcagaagctaacttatgctttgatgcattgcaatcctcaaagcgagtcaaatttgaggagaattttgaagttccttatccctgtaaagctttcaataggtgtactgccaaaaaggactcttttggagcggtatagtttgcttgagatgttgtcactgcacttaagagaggagatctcaggcttctcaggcaagctctagacaggcacgaagaccaatttttgaaatctggcgtctaccttgtactggagaaacttgaacttcaagtctatcagagattagttaagaaaatccacatcattcagagacagaaggaaccagctaaggcacatcagattaagctagatgttgtcgtaaaagctctgaaatggcttgaaatcgacatggatgtggatgaggtggagtgcatcatggcatgccttatatacaagaaccttataaaagggtactttgctcacaagagtaaggtccttgtcctcagcaaacaagaccccttccccaagttgaacgggaagcctgtttaaatacaattgtcacggagaaatcctgtaatacaatggtattttttttgtttagtatgcagagatgctttccatattaagtgaaactccaagcctgacaaggacatttagggcctgatcggttataccggaataagccaggattcattctagctcatcaaaatctatataa

SEQ ID NO: 143596 - DNA, 1471 bp, Zea Mays
accggcttctaccatccgccaccgcccgccgcggaattcggaaaccccaaaccccaacgcggccgctgtgacgctgtccctggagatggcggcgtacttgagcatgggtgaagcgcaacgccgcatcggcgactacctctctcgggtgaccaacgccatctcctgctccgacgccgccgcgctcgcctcccttctttccgtctcctccgcgccggcctccaccccgctctccgacgcgctcgccgccatcccggacttcccgcgcctcgctggagatcgctaccccgaccttgccgacctcctcgttccgttgctccgagccatccacttccactccatccagcgcttcgccgacgcctactcctcgttcgagaaggcctccaagagtttaggaactgggagacgccgtgggcgatggaggcgatgcacactgtggcgctcgagatcaggctaatcgccgagaaggcagatagggagcttgcgacgaatggaaagaaccctgacaagcttcaggcggctgggtcttttctgatgaaggtttttggtacactagcggtgaaagggcctaagcgtattggggcactctatgttacctgccagctattcaaaatttacttcaggcttggaacagtaaacctttgccgtagtgtcataagaagtatcgaaactgcaaggaattttgattttgaagactttccagtgaaagacaaggtcacttatatgtactacactgggcggttggaggtgtttaacgagaactttcttgttgcagatcagaagctaacttatgctttgatgcattgcaatcctcaaagcgagtcaaatttgaggagaattttgaagttccttatccctgtaaagctttcaataggtgtactgccaaaaaggactcttttggagcggtatagtttgcttgagtatgcagatgttgtcactgcacttaagagaggagatctcaggcttctcaggcaagctctagacaggcacgaagaccaatttttgaaatctggcgtctaccttgtactggagaaacttgaacttcaagtctatcagagattagttaagaaaatccacatcattcagagacagaaggaaccagctaaggcacatcagattaagctagatgttgtcgtaaaagctctgaaatggcttgaaatcgacatggatgtggatgaggtggagtgcatcatggcatgccttatatacaagaaccttataaaagggtactttgctcacaagagtaaggtccttgtcctcagcaaacaagaccccttccccaagttgaacgggaagcctgtttaaatacaattgtcacggagaaatcctgtaatacaatggtattttttttgtttagtatgcagagatgctttccatattaagtgaaactccaagcctgacaaggacatttagggcctgatcggttataccggaataagccaggattcattctagctcatcaaaatctatataa

SEQ ID NO: 143597 - DNA, 1417 bp, Zea Mays
accggcttctaccatccgccaccgcccgccgcggaattcggaaaccccaaaccccaacgcggccgctgtgacgctgtccctggagatggcggcgtacttgagcatgggtgaagcgcaacgccgcatcggcgactacctctctcgggtgaccaacgccatctcctgctccgacgccgccgcgctcgcctcccttctttccgtctcctccgcgccggcctccaccccgctctccgacgcgctcgccgccatcccggacttcccgcgcctcgctggagatcgctaccccgaccttgccgacctcctcgttccgttgctccgagccatccacttccactccatccagcgcttcgccgacgcctactcctcgttcgagaaggcctccaacgcgttcctgcaggagtttaggaactgggagacgccgtgggcgatggaggcgatgcacactgtggcgctcgagatcaggctaatcgccgagaaggcagatagggagcttgcgacgaatggaaagaaccctgacaagcttcaggcggctgggtcttttctgatgaaggtttttggtacactagcggtgaaagggcctaagcgtattggggcactctatgttacctgccagctattcaaaatttacttcaggtaaacctttgccgtagtgtcataagaagtatcgaaactgcaaggaattttgattttgaagactttccagtgaaagacaaggtcacttatatgtactacactgggcggttggaggtgtttaacgagaactttcttgttgcagatcagaagctaacttatgctttgatgcattgcaatcctcaaagcgagtcaaatttgaggagaattttgaagttccttatccctgtaaagctttcaataggtgtactgccaaaaaggactcttttggagcggtatagtttgcttgagtatgcagatgttgtcactgcacttaagagaggagatctcaggcttctcaggcaagctctagacaggcacgaagaccaatttttgaaatctggcgtctaccttgtactggagaaacttgaacttcaagtctatcagagattagttaagaaaatccacatcattcagagacagaaggaaccagctaaggcacatcagattaagctagatgttgtcgtaaaagctctgaaatggcttgaaatcgacatggatgtggatgaggtggagtgcatcatggcatgccttatatacaagaaccttataaaagggtactttgctcacaagagtaaggtccttgtcctcagcaaacaagaccccttccccaagttgaacgggaagcctgtttaaatacaattgtcacggagaaatcctgtaatacaatggtattttttttgtttagtatgcagagatgctttccatattaagtgaaactccaagcctgacaaggacatttagggcc

SEQ ID NO: 143598 - DNA, 646 bp, Zea Mays
accggcttctaccatccgccaccgcccgccgcggaattcggaaaccccaaaccccaacgcggccgctgtgacgctgtccctggagatggcggcgtacttgagcatgggtgaagcgcaacgccgcatcggcgactacctctctcgggtgaccaacgccatctcctgctccgacgccgccgcgctcgcctcccttctttccgtctcctccgcgccggcctccaccccgctctccgacgcgctcgccgccatcccggacttcccgcgcctcgctggagatcgctaccccgaccttgccgacctcctcgttccgttgctccgagccatccacttccactccatccagcgcttcgccgacgcctactcctcgttcgagaaggcctccaacgcgttcctgcaggagtttaggaactgggagacgccgtgggcgatggaggcgatgcacactgtggcgctcgagatcaggctaatcgccgagaaggcagatagggagcttgcgacgaatggaaagaaccctgacaagcttcaggcggctgggtcttttctgatgaaggtttttggtacactagcggtatgttatcgttcaaaagatttgtgcagtcttcttaatcagaatttggtctttttaagcatttgatgaattaccagg

SEQ ID NO: 143599 - DNA, 644 bp, Zea Mays
gtggtggtggttgggggcagtggcaaaaccagcgtgctggaagccatctatacgctcggccatggtcgggcgtttcgcagtttgcagattggtcgcgtcattcgccatgagcaggaggcgtttgttctccacgggcgattacagggcgaagagcgcgagacagcgattggcttaaccaaagacaaacagggcgacagcaaagtccgcatcgacggtacagacgggcataaggtcgcggaactggcgcacctgatgccaatgcagttgataacgccagaagggtttactttttctctacggcggccccaaatacagaagagcattcctcgactggggatgctttcacaacgaacccggatttttcaccgcctggagcaatctcaagcgattgctcaagcagcgcaatgcggcgctgcgccaggtgacacgttacgaacagctacgcccgtgggataaagagctgatcccgctggcggagcaaatcagcacctgcgcgcggagtatagcgccggtatcgcggccgatatggctgataccttgtaagcaatttcttccctgagttttctctgactttccttttccagcgcggctgggaaaaagagaccgaatattgctgaagttgctggaaccgtaattttgaacgc

SEQ ID NO: 143600 - DNA, 1410 bp, Zea Mays
atgccgcctcgtagagctcggggtagtccgcaagctcctagtggggactcgatgagtccggcggcaatgttagccgcgatgcaggccatgcagcaggagttggcccttctgaggcaagccattcctgtcgcccctgcaggtgctgctcagggtgctggaggtggagaagtgcccgggggcgctgtccctgcgggtgctgttcctggtggcggggccggggtgcctcttccagttagtggtctttctctgatgcagtggatgggcatgaagttggattcttttgatggcagtggtactccggtcgaggcggcagattggctgacttatgtggaggataagatgaatgtcttcgagattgcttatgaagatcgggttcgctttggcactcagctgctgaagggtgaggcgcagatttggtggagaggcgtgcaggcagcgcactcctcctcaccaggagtcctatcatgggatgttttcatcaggcagttcgaaaggagattctacccggtcacctttctggagaaaatgaagattgacttgcagtcctacaagcaggagaagaagtctgtcacagagtatgaggtgggcttcaacaaaatggtccgctttgtccctcatgtggcttataatgagatggagaaggcgagccaattccgtcagggtctgaagccttctatcaggcatgctctgggggcctttccattggtggacttccgtaccacagtggagcaggcgctgggtgtggagatgcaacaccagtacaccatggagtcgcagaagtcttcgggtgttgatcaacctcgtagccaggacacgaggaggggcaacactgggggttcagctcacaagaggggcaagtctcagcatcagcgccaccatccttaccgtggcaaatcttctgactcaggtacttcaggaggaagtactcagaggtttcgggccgttcctaagcccgggttggggctggtgtgtttccgctgtggagatgcgcatcgccgtgcagagtgtcagtggagtggcaggtgttctatctgcagtcaggaccacaaggatgtggtgtgtaggaggaatcccaatgggaagctcagatgggagccgatagcttcctcctcttcacagggcactatcaatatgatgtcaagtgctgagcagcagttttcagttcctcttcctccacagcagctttatgtgcccgggacttctcagttcgcgccgatgcaaggttttccgcagtatcaggttgtgcctactcctgcgccgtctacccctgtgctgtctcagtttggagctccgcgccagcctcctccggtggctcagtggggctcttctgttaatttcactccgggagcttcctcttctgcgggaagagtcaagtctagggaattattacattctaatctttcatggtag

SEQ ID NO: 143601 - DNA, 1271 bp, Zea Mays
agaaaggtggtcatcttgcaggatggtgaacctcgtacacgtagccaagaaacagctggtgcagcgcctggcgaagatggccggactgcggcagcgcgccgtcgacgtcgatgatgccggcacagtcatcagtatctgggtacccaaggacaagctaccggctggccccaccgctgaggagatggagacggagaggaggaagaaggagacgaagcggaacggcggcaggctctccgtcgtgctcctgcacggcttcgctggtgatgggattctgacgtgggtgcttcaggttgtcgcactggcgagacactacgacgtgtacgtgccggacctgctcttcttcggtggctcggtgtcgccggcgggcgcggaccagactccgggtttccaggcggagtgcgtggcgtccgcgctgcggaggctaggggtggagcggtgcgtggcggtcgggttcagctacggcggcttcgtggcgttcaagatggccgaggcggacccggctctggtcgtgtccgtcgtcgccacggggtcgctggtctacatgacccgctccaccagcgaggccatgctgcggaggctcggcgcggcgtcgttcgccgagttcctcctgcccaacgatgtcgccgggctcaagtcgctcttcgccgctggcacctataggaaatggtggctgcctgatcgcgtcctcagtgactatatgaagctgatgatctttaaccgcaaggaaaggacgcagctgctggaaggcttggtggtcagcgatgaagacgcagctgttgtcgtccgttcttatcggcagcttctctatgcatcccggctctactcatgcaaagaagcgaccgcagccaggcttccgagcgaagctcacggcgagcgtacgcgcccagccaggctcagcgcatgcagcggcacgtataccgaggagatactcttgctctggggcgacaacgacagcatcttcaacatggagcttgcgagaagcctcaaagagcagctcggcgagaaggcgacgctgcgaagcatagcaaaggcgggccacttggtgatgctggagcggccgcgcgtcttcaacggctgtctcagagagttcctgttgcggcagtcacgctgatgcatcaccacgacgacggccgcggcgcggcgtacgcccaggcctgctatctagctaagatctagtcaagctatagctagacttgtgtacatatgctaataataaagaacattgtgctagtgtgttgaccagcttcatgcatatatgataattattatcg

SEQ ID NO: 143602 - DNA, 3019 bp, Zea Mays
gttcaaaaaaaccaatctcactctctccctccaccgccactgccccacccacccctaccccaatcccctcttccccattcaccagatcgagcgccgcgtgcctagggtttgcgcccccgccggtagcgatgcccccgtcctccgtgtcggggggcagcggccccggaggcgtctccccggacgccatcatcgagtggctgcaggacgagatggggtaccccacggccccgcccgcaccggagcagctccgcaagatctgccggggcaacatgatccccgtctggtccttcctgctccgacgcgtccgctccgagcgcaccgttgccactgcgcgccgcaacatcctcgtccacggcgtcgcggcccggcgggcgcgggagggcggggtgataggggcgggcgtgggtgacgccgcggccagggaggccgaggcgagggagcgggacctcgccgccgaggaggccgagcggctgcgcggaatcgtgaggaggcagcgcaaggagctccgcgcgcgcatcgcggaggtcgccagggaggaggcggagcgcaagcgcgtccttggcgagcgctccaatgccaggcacaagcaagttatgctcgaagcatatgaacagcaatgcgacgaagcatgcaaaatatttgctgaataccagcgtcggctacatcagtttgtcaaccaagcaagggacgtgcaaagatcaagtataggtgtggctggaactacaggttctgttgaagatatgcaattgcagagcaatagagacgacctttactcatcaactattaaaagcaataggttgtcagaggatcttttagaaactgcaggtgaaaggagcatccggaaggcatgtgaaactcttgctgcagatatgattgaaacgattcgaagttcattcccggcatttgaagggagtggcattaattcaagttgccaattaactgcagcaaagctgggtattgacttggatggtgaaatacccacagatgttaaagctgttgcattggattccctaaagaatccgttcctgcttctgcagtcaatcattacctacacatcgcgcatgaaaacacttatacatagagaaacagacaagattgacatacgtgctgatgcagaattactgaggtgtatggcaatgggaagattggatctcagttgccaactcgaggaacatatgatcagctattagaaagacagaaagaacatgtacagcaattcttggcaacagaagatgctttgaacaaagctgcagaagctaaagcactaagtcagaagcttttgcaacgcctgtatggaaccattgatatggcaggaagtaaaaagttgcctactgggaacaccacacaaaatgtgaccaacagtaggcatttagagctggatgtttgggccaaggaaagagaagttgcaggactaaaggcaagcttgagtacacttacatctgaggtacaacgtttgtataagttatgtgctgagtggaaggaagcagaagattcactgaagaagaaatggaagaaaatcgaagaatttgacgcccgtcgaacagagctggagtgcatttacagtgctcttcagcgggctaatatggatgcatcatcattttgggagcaacaaccattatcagctagaggatatgcatcaagtacaattatccctgcgtgccatactgtggtagacatgtctacgaactcaagggacctcatagagcgagaattagctgcatttagccagagcttggataatagcttgtgcaggttgccagcaaccccgcaggcccttttggaggccgtgggttctaacggcatgacaggatcagaagcacttgcagctgcagagaaacatgcagctctgttaactgcaagagctggtgctagagatccatctgctgtgccatctatatgccgcatctctgctgctcttcagtataattttggtacagaaggcacagattttggcttggcttcagtattaaattcactggagttctgtctaaagccttgtgggtctgaagctagcatattagaggatttatcaaaatctatcaacttcgtgcacacacggagaaatcttgttgaaaatgaccgtgttttgctgaaccgtgcacatcgtgctcaacaagaatatgaaagagtggccaactattgtcttaaattagctggcgaacaagaaaagctggtgagtgaaagatggcttccggagctgagaaatgcagttcaagaagctcggaggtgttttgatgactgccagcgtgttaggggcttggttgatgagtggtacgagcagccagcagccacaattgtcgattgggtaacgatagatggacagagcgtgggtgcctggatcaacctcgtgaagcaactccacatggagatctccagacggacgctggcaatgtcatctgtaggagacgactgaagcaaccagctgtgacccagctgtggctttggatgttcggaggctccgtgtgatgggttcggtttggcaccaagatatcttctatctactcgatagccttttcccattgtagtttatacgcctctctctggtttggtttgtaattagtttttttgtatggtgtcaattgccatgtgttgaatttgtcatttgtcacaaattatcggtgttggtgttgtggctttgctgattgggctgcacgtcccgacgtgccgtcctgctgttagttgtacagggtcgcgcctcacctttgagtgttcaagcagtccgtgaattatctcagttatataatgactgcacgtaatgctaagggtagctgtgatggtgggttttagcaccattatgggcgctactatagagaataaaagttttagcagtgattcaggtggaggcagtaaggttgtcgcttccacccaaaaaatgggaaggagcccattcactggcacaagtgtgacatcactatctttgctcatctaaagcttgtattttattcacgatcaagtttatagagataaacacattcaagtgtaggagtaactgttggtggatataacagtgctgcattct

SEQ ID NO: 143603 - DNA, 3098 bp, Zea Mays
gttcaaaaaaaccaatctcactctctccctccaccgccactgccccacccacccctaccccaatcccctcttccccattcaccagatcgagcgccgcgtgcctagggtttgcgcccccgccggtagcgatgcccccgtcctccgtgtcggggggcagcggccccggaggcgtctccccggacgccatcatcgagtggctgcaggacgagatggggtaccccacggccccgcccgcaccggagcagctccgcaagatctgccggggcaacatgatccccgtctggtccttcctgctccgacgcgtccgctccgagcgcaccgttgccactgcgcgccgcaacatcctcgtccacggcgtcgcggcccggcgggcgcgggagggcggggtgataggggcgggcgtgggtgacgccgcggccagggaggccgaggcgagggagcgggacctcgccgccgaggaggccgagcggctgcgcggaatcgtgaggaggcagcgcaaggagctccgcgcgcgcatcgcggaggtcgccagggaggaggcggagcgcaagcgcgtccttggcgagcgctccaatgccaggcacaagcaagttatgctcgaagcatatgaacagcaatgcgacgaagcatgcaaaatatttgctgaataccagcgtcggctacatcagtttgtcaaccaagcaagggacgtgcaaagatcaagtataggtgtggctggaactacaggttctgttgaagatatgcaattgcagagcaatagagacgacctttactcatcaactattaaaagcaataggttgtcagaggatcttttagaaactgcaggtgaaaggagcatccggaaggcatgtgaaactcttgctgcagatatgattgaaacgattcgaagttcattcccggcatttgaagggagtggcattaattcaagttgccaattaactgcagcaaagctgggtattgacttggatggtgaaatacccacagatgttaaagctgttgcattggattccctaaagaatccgttcctgcttctgcagtcaatcattacctacacatcgcgcatgaaaacacttatacatagagaaacagacaagattgacatacgtgctgatgcagaattactgaggtataaatatgaaaatgagcaggttattgatgctgcttcaactgatgcaagctcacccttaccgtatcaggtgtatggcaatgggaagattggatctcagttgccaactcgaggaacatatgatcagctattagaaagacagaaagaacatgtacagcaattcttggcaacagaagatgctttgaacaaagctgcagaagctaaagcactaagtcagaagcttttgcaacgcctgtatggaaccattgatatggcaggaagtaaaaagttgcctactgggaacaccacacaaaatgtgaccaacagtaggcatttagagctggatgtttgggccaaggaaagagaagttgcaggactaaaggcaagcttgagtacacttacatctgaggtacaacgtttgtataagttatgtgctgagtggaaggaagcagaagattcactgaagaagaaatggaagaaaatcgaagaatttgacgcccgtcgaacagagctggagtgcatttacagtgctcttcagcgggctaatatggatgcatcatcattttgggagcaacaaccattatcagctagaggatatgcatcaagtacaattatccctgcgtgccatactgtggtagacatgtctacgaactcaagggacctcatagagcgagaattagctgcatttagccagagcttggataatagcttgtgcaggttgccagcaaccccgcaggcccttttggaggccgtgggttctaacggcatgacaggatcagaagcacttgcagctgcagagaaacatgcagctctgttaactgcaagagctggtgctagagatccatctgctgtgccatctatatgccgcatctctgctgctcttcagtataattttgtttcaccaggtacagaaggcacagattttggcttggcttcagtattaaattcactggagttctgtctaaagccttgtgggtctgaagctagcatattagaggatttatcaaaatctatcaacttcgtgcacacacggagaaatcttgttgaaaatgaccgtgttttgctgaaccgtgcacatcgtgctcaacaagaatatgaaagagtggccaactattgtcttaaattagctggcgaacaagaaaagctggtgagtgaaagatggcttccggagctgagaaatgcagttcaagaagctcggaggtgttttgatgactgccagcgtgttaggggcttggttgatgagtggtacgagcagccagcagccacaattgtcgattgggtaacgatagatggacagagcgtgggtgcctggatcaacctcgtgaagcaactccacatggagatctccagacggacgctggcaatgtcatctgtaggagacgactgaagcaaccagctgtgacccagctgtggctttggatgttcggaggctccgtgtgatgggttcggtttggcaccaagatatcttctatctactcgatagccttttcccattgtagtttatacgcctctctctggtttggtttgtaattagtttttttgtatggtgtcaattgccatgtgttgaatttgtcatttgtcacaaattatcggtgttggtgttgtggctttgctgattgggctgcacgtcccgacgtgccgtcctgctgttagttgtacagggtcgcgcctcacctttgagtgttcaagcagtccgtgaattatctcagttatataatgactgcacgtaatgctaagggtagctgtgatggtgggttttagcaccattatgggcgctactatagagaataaaagttttagcagtgattcaggtggaggcagtaaggttgtcgcttccacccaaaaaatgggaaggagcccattcactggcacaagtgtgacatcactatctttgctcatctaaagcttgtattttattcacgatcaagtttatagagataaacacattcaagtgtaggagtaactgttggtggatataacagtgctgcattct

SEQ ID NO: 143604 - DNA, 452 bp, Zea Mays
caggtgaagaagatgatcgtctatgccgttgagcatgctttggcgattctgaaagagccttgcacaccccgcgagtccgcctgaacaagctggcatcatatctgggtttctgctagtcaacgagggaaactagagaacatgatgcgatgttgtgcgacagtagacgtggggtagcgctagttgctttgcttgtcggcacaaataataatcttggaaatattactaataagggctcggttaggaagggattggaggagattaaattttttttttttattttaactgaatagaaagagatttgatgagatccctatacaatcgaaaaaggcctaaaatggtagattttgctgatggtgtgcatcactgaagagctgggcatgctgaaaaaaatagatgtcatactgtaaatctacaaaatgtggcttcgtttccaaaaggccttgcccctgtta

SEQ ID NO: 143605 - DNA, 653 bp, Zea Mays
tctggaagccttacggcgcaggtgctgtttgaatttttattggtttgggatttactccaagaggtgcaactgtaccctaatgtggaggatcaacatcggtggttgccatcctcctcggggctgtattccgccagctctgcttatttgcgcttccatggtggtgcaacaacctttgagcctgctacaagaatctggaagacttgggccccccgcgctgcaagtatttcatttggcttgcatctctcaaccgatgttggacggctgatcgactggcacgtcatggaatggatcatccagatagttgtcccttgtgtgatcagcaggatgagtcagtgcatcacttgctggtggattgtgtttttacgagggaagtttggtttacaacactaagcaggctaggtttgcaacatcttgctcccacgtctgatgctacagggtttcaagattggtgaagtgaggcagaaagacaagtgtctaagcataagaaaaaaggtttcaactctattgtaattttagtagcttggcagatttggaagcatagaaatgcgtgtgtgtttgacaatgcttccccaaacattcacgcaattttgctgtccatccatgatgaggctttattatggggtcttggaggggctgctgctcttaggcaggtt

SEQ ID NO: 143606 - DNA, 502 bp, Zea Mays
gtaatcgcggtcagcaaaggcgacggggattttgcccggtaacccaattgtgaaggaggtgagattggagaggaacaataggagaaaggagataggaaattcttgcttgccctattgaaacagccacctgctttatatttagccaggccggcgtaaccaacccctatttattctctatacttatctaaacaacttcctaacaacttatccctatttgctagcagcggccagctctgatctgttgctgcacgtgagcttatcttctaaacaaatctcctattttctagctactagcaactactagctattttcatacctgggtcttcatctgggtcttcatcttccactacaccatcaaatccaacatccacacctgatgttctcattcccattacaaatccttctacttcagcacccacttcaaactttgcatctaaaccaccagttaccagaacctacatttgtcgtcctcgcactagttccacggcctgtcctgatgatg

SEQ ID NO: 143607 - DNA, 2840 bp, Zea Mays
atccgcctcaccgcctgaggcctgagctcaatcgcacccaacccaatacatcccgtcgatccgcgtaggctttgctcctgatttgatagattctcagacctcgcgtcgtcggccgatctgccgcgccgtgttcctgccgccgtgtcctggccatgacggcggtggagctcaggatcgggccgctagagtgggcgatggatgacgagagcccaggtgtgggcgacgaggatggcaaggacgaggactgggctctcgatatggagaggaagggaaggggaaagcggaagaggtccgctcctcggagacgctcgggacccaagcggcgccgcgccgctgcggcgatggcgcccgcgcccgcgcgatcacagtcagagccgtgcccggggacagccgagccttcgccagaacatggcttcaatgctgctgctgcggcggcgggagttaaggaggaaaacggggtgaggaaggaggaaggggagaacgtggctccgagcaccagtggcagaggaggaggcggcgggaggaagccgggggctaggaggtcgtgccaccagtgcaagagggtcaagcgtctgaaggagatggtcaggtgccagtgctgtgacgagaggatctactgcgacctctgcatcaggaacaggtacgcgatgatgtcaccggatgctgttagagagcagtgccccttctgccgtggactctgcaattgtacgcgatgccttaacaaggatagggataagcagcttggacccgagaacttggttttgaggaaatgcaatagcaatgaatcatctaaaagggaaaagaggcccacttctgcaggtgtgatatcaccccaggctcatagtgcagcaccatgtactaaagaaattggactctcctttgtgactacaaataggatgaataatgtgtctgccatgtgggccaaagtggatacatcagatgtgagggctgaggaggttgaccctgaaacaaaacgcaaatacgcaagctacctattgcactacctgttgccttgtttgacacaactcaacaaggaccagatggaagaaagagaagcagaagccaaaattcgaggattgcaattgtcggaattgattgttgagaaagctgtctcctggaatgatgagagggtgttctgtaacaattgcaaaacgtcaatatttgatctgcatagaagctgctcaaactgctcgtacgagttgtgcatcagttgttgtaaggagctccgtggaaattttcttaagatcaattgtcaaaagggactggtacctgagcataagagtagaggaattgactatatgcatggtggtgattgtaagccacctaatctagaaaatgacagagaaacaggtttgtctagttaccaatctaagtctatcaagtgggaagctgatcctggtgggaccatttattgccctccatctgaactagatgggtgtggtaaccatgttcttgagttgaaacaaatttttgaaacagataggttaattaagcttgaaatggaagcattgcggctgagcaaccagatagaaccttctgatatttccagtatagatatatgtgaatgctcatgttcagctaataatgtaagttcaaggaaagctgccaccagagagaactccacagataacaacatatactgtccaatatcagataatggtgggccagatgatctcaagcacttccaaaagcactgggtgaaaggagagcctgtaatagtgcaaggggtgctcagtgaaatgtctgatttgagatgggagcctgaaaaaatgtgggctgaagtacatgacgccaatactagttctgagatgaaaagtgtgaaaaccactgattgtatgtcttgttgtgaggttgagataagtgccaaggactttttcaatgggtattatcatggtcggatgtatcataatctttggcctgaaatgcttaaattgaaggattggcctacttcagaccattttgagaatattttgccttcccatggaaagacgtacatcaattctttgccttttcaaccatacacaaatttgaaatctggtttactaaatgtctctgcattgcttcctggtgacgtcttaaagcttgacatgggcccaaaatcatatatagcttatggctatgcagaggaactcattagaggagattctgttacaaagcttcattgtgatttgtctgatgcagttaatgttttaatgcatactgccaaagttgtgccttctgaagaacaaaaagaggggataagagatttgaaaataaggcatgcagaacaagataaaaaggaatgcttggggaattcatcaatagatggaaataaaacaagcatggagcatgctcatatatcatcagtttcctgcgaggatggtggaggtgcactatgggatatttttaggagggaggatgttggaaagctgaaagagtacctcacaaaacattccaaagaatttcgccatatgtactgttgtccagttgaaaagatatttaaccctgtacatgatgaaacattttatctgaccaacaaacacaagagaaagctcaaggaggagtatggaatcgagccatggacctttgtgcaaagacttggagatgcggttttcatacctgctgggtgtcctcatcaagtacggaatctaaagtcttgcaccaagatagctctggattttgtatcaccagagaacattcagcaatgtctcagcttaaccgaggatttccggagacttccagtgggccacagggcaaaagaagataaactagaggtacagacctttaatgcacatccatcttgaacttgtcctcttatcagctcgttggtatcagcgacagaccatctacacagggataag

SEQ ID NO: 143608 - DNA, 1525 bp, Zea Mays
ctcactgactccaccgtgcacgtggcccgtcgcctccgcctcgcaagcccaccgacagcagccagccctgcgccgaatcaatggagatttcgactgttccgttggaattgtcgagctggatcgcaattctgcaagcagttcattgattgctagctgctgctgtctctctctctcttctgccattttcattcacgattgatggtaggggtgtcggtgtggctagctcatcaggctccctgtccctgcatttcgccattccttgtcccttgcttcatacagtacagtgatgcatgaatggttccttgtcacctactacctactagccctaggatcgaaccgcgtttaaggttcgatacgatacgatctacctcagttcgtcatctagaacacgcacgtaatattcacagcaacaattataaactagcaaatcaactttgggcaatgcaacttctttgtaaattctaactgcgtatgtatgacacctcctgctgctgctgcatcgtgatcaaacagctgctgctggagggcgacccgggagcccaggagcacggcgcggtgctggagaagtacaaggcgaaggcggagcactacctgtgcgcgtgcctgggccggaacggcggcaacggcagcgacgacgtggagcggagccccggcgggatgctgtacgtgcgccagtggaacaacctccagtacgtctccagcgccgccttcctcctcaccgcctactcgcgctacctcggcggcggcctcctccgctgccccgcgggcgcccccgccgcgccgtccgacctgctggccctggcgcgctcgcaggccgactacatcctgggccgcaacccgctgcggctcagctacatggtcggctacggccgccggtacccggtccgcgtgcaccaccgcggcgcctccatcgtcgcgcacaaggccaacagccgcttcatcggctgcatgcagggcttcgacgactggttcggccgcggccgccccaaccccaacgtgctcgccggcgccatcgtcggcgggcccaactccagggacgagttccgggacgagcgcgagaactacatgcagaccgaggcctgcacatacaacaccgcgccaatggtcgccgtcttcgccaggctgcaccgcctggcgcgcgacggcggccctgccggaggtgtgccggagaggaacgacgcccgatgagctaggcggactgtagataaaaaatggtggcggcggtggtatggaaaggcgggccagggtaattcttttttttctttctcataagcttataatttactactagctgcttccatataattatttttttgaagtgttaatatgagagaaagataaaggaaaagagagttttggttagtgaaagaaaggacaggaatcatagtggagcaataaggacgagaaaagggccggtgtgcagtgtatgtgtttaaatctaggtgtctcagaactgaaaagaactgtaatatttatttactgggagaaacagcaaatacatagtcacagacaaattacatgctct

SEQ ID NO: 143609 - DNA, 2521 bp, Zea Mays
ccgccaccaacaagccgaaactgtcaatcgatcgcccactcacccatcacttcatcaggcaaggcaccagcgtagcccgtcgtcgatcggcagctcgcctgcccaaccacccgccgcagccactgttcgaactgagaacccaaccagccggcggggcgacacgccaagtccgcacccctgccggagcacgcgtacatgtcgcggggcgggcaggagagggtgcgccgatcatttctcgcacacctggaaagcggagagcgcgagagagccccccgcaggcagatcgccagtggctgaccgcccgcagagcgcagacgccccccccccccccacatccggcatccgtcctagagacgcaacgcaacaataaaagaggacaggacagagaggaaaccccgaacaccgagagcccctcccgtcccgtcccaacccaagcaccgcgtcgaacaaagcatcgacatacagacagccagactgcgagggaaaccgggtcccccaaaaccaaatactctgtgtgcgtacgcgcggcagtgagcgacgaggcgcggtgcgcgcgcactggccatgagccggggccgcgcacgccggccggttccaggcagcggcacccgcgccggcgcgctcgaggtcctcctcctcctggcgtccgccgtgctgctggcagcgtgccccgccgcggccgtggaggcagaggcaggggacgaggaggcggtggactacggcgctgcgctgtccaagagcctgctctacttcgaggcgcagcggtcggggcggctgccgcacaaccagcgcgtgccgtggcggggccactcgggcctcaccgacgggctgcagcagggcgtggacctggtcggcggctactacgacgccggggaccacgtcaagttcggcctgcccatggccttcaccgtcaccatgctctcctggggcgccatcgacttcgccgacgacgtcgcggccgccggcgagtggggccacgcgctcgaggccatcaagtggggcaccgactacttcgtcaaggcgcacaccgagccattcgtctactgggcagaggtgggcgacggcgacacggaccactactgctggcagcggccggaggacatgacgacgtcgcggcaggcgtaccgcatcgacaaggacagcccgggctccgacctggccggcgagaccgccgccgcgctcgccgcggcctccatcgtcttccgccgctccaacccgcattactcccacctcctcctgcaccacgcccagcagctgttcgagttcggagaccggtaccgcggcacgtacgacagcagcatcgaggaggtgcgcagctactacgcgtccgtgagcggctaccgggacgagctgctgtgggcggcgctgtggctgcaccgcgccacgggccgcgacgagtacctccgctacgccgtcgacaaggccgactccttcggcggcgtcggctgggccatgaccgagttcagctgggacgtcaagtacgccggcgtccaggtcctcgcagccaagctgctgctggagggcgacccgggagcccaggagcacggcgcggtgctggagaagtacaaggcgaaggcggagcactacctgtgcgcgtgcctgggccggaacggcggcaacggcagcgacgacgtggagcggagccccggcgggatgctgtacgtgcgccagtggaacaacctccagtacgtctccagcgccgccttcctcctcaccgcctactcgcgctacctcggcggcggcctcctccgctgccccgcgggcgcccccgccgcgccgtccgacctgctggccctggcgcgctcgcaggccgactacatcctgggccgcaacccgctgcggctcagctacatggtcggctacggccgccggtacccggtccgcgtgcaccaccgcggcgcctccatcgtcgcgcacaaggccaacagccgcttcatcggctgcatgcagggcttcgacgactggttcggccgcggccgccccaaccccaacgtgctcgccggcgccatcgtcggcgggcccaactccagggacgagttccgggacgagcgcgagaactacatgcagaccgaggcctgcacatacaacaccgcgccaatggtcgccgtcttcgccaggctgcaccgcctggcgcgcgacggcggccctgccggaggtgtgccggagaggaacgacgcccgatgagctaggcggactgtagataaaaaatggtggcggcggtggtatggaaaggcgggccagggtaattcttttttttctttctcataagcttataatttactactagctgcttccatataattatttttttgaagtgttaatatgagagaaagataaaggaaaagagagttttggttagtgaaagaaaggacaggaatcatagtggagcaataaggacgagaaaagggccggtgtgcagtgtatgtgtttaaatctaggtgtctcagaactgaaaagaactgtaatatttatttactgggagaaacagcaaatacatagtcacagacaaattacatgctct

SEQ ID NO: 143610 - DNA, 1203 bp, Zea Mays
tcctgcatgctactattaaacaaggaagccatgggagagaacaggaagatcacccgcgggtcaaggctggtgacaaacaagctgctgcaccgctgccagcaactgcatggccacggatctgtatctggggtttctgaaaccttggggaagagacccttgaatgggaacaaggatacacttgtgtacagtgtgtttgccagcacctggaatgtcggcggcgttacaccatccgatggcttggacttggaggattggctggacacaagggctaacgcctacgacatctacgtcctagggttccaggagatagtgccactgaacgcgagaaatgtgctgggtcctaggaagagccgcgtgtctgccaagtggaactcgctgatcggggaggcgctcaacagaaggtgtcgagaagaaggcggggcgaacacgaacagcagcgccaaggacgacgaaggctctgtggagggatcacagggcttcagatgcatcaggagcaagcagatggtcggcatcttcacgtcggtgtgggcgagaagcagccttaggccgctcatccgtcacctggatgcgtcgtgcatcggctcgggcatcatgggctgcctagggaacaagggctctgtttcgatccggttcgtgctgcacgacacgagcttctgcttcgtctgctgtcacctggcttcaggcggcaagcaaggggacgtgctgctgaggaacttggacgtcgcggacatacttgcaaggacaaggttccctggccctgcagctcacgagttgccggagaagatccttgatcatgaccaagtggttttgctcggtgacttgaactacaggatatccctggaggaggccgagacgaggtcgctggtgagagccaagagatggcccgtcttgttggaaaacgatcagctgctgttcgagttctcgagagggcggcattttgagggctggcaggaaggcctgatcaccttctcccccacctacaagtaccagcccaactccgaccagtaccactggtgcttcgacagtgcgggcagcgacaagaagcgtgctccagcatggtgcgatcgcattctgtggcgaggcaaggggctgaagcaagtgcaatacgagacgtgcagctacaggctgtcggaccaccggccggtgagagcggttttccacgccgaatgcgacgcgttatcggaggcggtgtcgcacaagtaa

SEQ ID NO: 143611 - DNA, 117 bp, Zea Mays
gtttagagatagttcttagaagtcctaattcaccacctcttaggcgtcaccgtttcctacaaacgcgctatgggaagagcccctcatcgctggggcccgttagtcagtcgaagaggc

SEQ ID NO: 143612 - DNA, 1508 bp, Zea Mays
atgtgggccccacccgcggcgtcgccgacaggggcattcccctcgctccggccgtcgaggacggcggtggtccgcgtcctagtcacgctgcctgccgctgcgcggccgcaggatcagccgcggcggcggctctgtctcgcggtaccacggcccgctccggagatggcctctgcggctgctgaaggggagggggaggaggaggacgtggtggtggtggaaggggacacggggaagaagacggcggtggagatggacgcgacggtgaggcgggagctggcgatccggagactgcgagaggaggccgaggaggaggcgaacgaggcggggacgaggaggaggagcagcagaagggatttcgccgtgttcgagaccgccaggggcgacgcgctcttcacgcaatcgtggactccggccgccgacgatcgcctcaagggcgttgttatactgttgcatggtctaaatgagcatagtggaaggtacagccatttcgcaaaactgttgaatgatcaagggcttaaagtttatgccatggactggattggacatggtggaagtgatggagttcatggatatgtttcgtcacttgatcatgctgttggtgacttgaaagaatttctggaggatgttgtattggaggaaaaccatggtttgccgtgcttcttatttgggcactccacaggtggagctattgttttgaaggccgcgctggatccttctgtagaacttcatgtagaaggtgtggtcttaacgtcgccagctattcatgttcaaccatctcatccaatcatcaaagttgttgcaccaatattctccatgttagctccaaaataccgtgtcagtgctttgcataagagaggacctcctgtttcccgcgatccagaggctctgaagatgaaatattcagatcccctggtgtatactggaccaattagagtcagaactggcaatgaaatcctccggatatcatcatttctgcaaagaaacttgagcagagttactgtcccttttcttgttctacatggtacagctgacacaataactgatccaagagcatccgagcgattataccaaacatcaatgtcaacaaataaatcaataaaattatatgatgggtatttacatgatctcctctttgaacctgaaagggatgatatcgcaaatgatatcatcaattggttgagcgcaagacttagtgttcttcagagatggtgagctgaatcaagtatgaactacaaggtgcttccccttatgtagttaccggcggttttactggaactgtatacatggcatagagtgcagaatagtgtaaatgtaaactaggatgttatcattatgtcttcacggtcacggtcatttcttgtcttcagctctgctgtataagtttgggaagagcctacatgagatgtaaataatattagagttaagctgaaaataatgtatctcctaatacacaggtagttcagtgtcactttttttttaaaaggacttggttcgcatctttttctgaa

SEQ ID NO: 143613 - DNA, 2219 bp, Zea Mays
atggaggcgagctcggccgcgtcgccggacctgtcgctgcacatcagcctgcctagcagcgcggcggggtccggcccgtccggcaggcgcgccgccgtggggggaggaacgggaggaggaggaggcgccgggggagacccgtggcggaggctgaacgggtccacagcgtccacggagctgtccctgtcgccgccggtcgagcaggagcacgcggacgcgctgccgtggcgacaccggccgtcggcggcggccgcgtcctccgcgggccaccacgtcggcgggcgccacgctgatgcccgccatgccgatgcttcagccgctggacggcgggggcgggctaggcgccggcgccggcgcaggagggggagcgtcggtggcgctgccaatccgagggatacctatctacaacggcccggggggcttcccgttccttccgccggcctccggggccgacggcgcccccctccaccaccaccagcagcagcagaagctcgggttctacggctcgtaccacccgagcacgtggccctcgtcgctcggctccacgtcgccgtcgccgtcgccgctcgcgccgggcacgccgccgtccccgctgctggacccagcgtcggcggcgttcctgtccccggccgcgcatcaccaccaccggatgctgtcggcatcgggccggctcaacggcatgctcaccgacaccctccgcggctacggcgctggcggcgtcggcggactgggcggcatcgtcggcgggcaccaccaccaccaccaccacctccacggcgcgcagccgttcggcctgggctcccggttcatgcccaagctccccgccaagcgcagcatgcgcgcgccgcgcatgcggtggacgagcacgctccacgcccgcttcgtccacgccgtcgagctcctcggaggccacgagagggctacgcccaagtcggtgctggagctcatggacgtgaaggatctgaccctagcccacgtcaagagccatctccagatgtatcggaccgtgaagagcactgacaagcctgcggcgtcatcaggggcgaacgacggcggctccggcgacgaggacttcgccggcggtggccaggctggctccggcggcgagaacatgtgcgcgaggccgttcggggagcaccggtccacctccgagggtgcggcgagctcggtgggcggcggcggcgggggcgacatggaccagtcttcggcaggcaacggcagcaccaggtggagcaactcgtcaagggacccatggctgtcgtcgaattcatgcaacatggatgctcatcgcttggcagcgttgtcttctccgattgagaacggggagccttgccgatcgagcagctcgcaggtgtcgaaccaggagctgatgagcagcccgagcctggagttcacgcttgggaggccggactggcagggcacggatcatgactagcagtagcaatagctaagctactagctgctagccatgcgtcgaccgtacgtggagctctagctagctagaaggctaacttcttcattgaggccgggtggttatagtagcagcactactactgatatcaggcggtgcgcgcgtgtgcatgcctgatgatcccccaagcaactcgtagacgacgacgacgacgacaggttttttcgcctgcgaagtcgaacagatcaatcaacaagtacagcagcagcagcaaccgcgcgcgtctccatcgatgggtgtggagatcatggtgagtacgtacgtgccgacggacggagcaccggcctggaagaagggattttaaagacttactgggtcactctctctatttcttctctgtcagagagagggagggagagttgagtgggctgcctttgggtgagtggtttgttagattggccatgccatgttcctgatttccttttctttcttgcttctctctctttttgtttccttgtgccatgtcgagcgggcgcgagattgtgtcagcgcagccggcggtgcagcagggggtatgcatgatgggagtcgtcgtagctggctggctagctgatgatggcgagagagaggcgtaaagctagccttgtgtggtggtgtgggagtgagtgagtgagtcgtgtgcgttcgtccaatgcatgtttggtccgtgtggtgtgtgaagctagctatacctagcgtatcattagcacatgcaaagctggaaaggagagaaaagaaagaaaagggaatgagttctcatgaagcaata

SEQ ID NO: 143614 - DNA, 2319 bp, Zea Mays
aagctagccgggcatgaagagaggagagaccgcggggtgggaactgcaagcgtcgtgcgatcaggagagaggggcgtcagccgaaggtagacggcgggcgatggaggcgagctcggccgcgtcgccggacctgtcgctgcacatcagcctgcctagcagcgcggcggggtccggcccgtccggcaggcgcgccgccgtggggggaggaacgggaggaggaggaggcgccgggggagacccgtggcggaggctgaacgggtccacagcgtccacggagctgtccctgtcgccgccggtcgagcaggagcacgcggacgcgctgccgtggcgacaccggccgtcggcggcggccgcgtcctccgcgggccaccacgtcggcgggcgccacgctgatgcccgccatgccgatgcttcagccgctggacggcgggggcgggctaggcgccggcgccggcgcaggagggggagcgtcggtggcgctgccaatccgagggatacctatctacaacggcccggggggcttcccgttccttccgccggcctccggggccgacggcgcccccctccaccaccaccagcagcagcagaagctcgggttctacggctcgtaccacccgagcacgtggccctcgtcgctcggctccacgtcgccgtcgccgtcgccgctcgcgccgggcacgccgccgtccccgctgctggacccagcgtcggcggcgttcctgtccccggccgcgcatcaccaccaccggatgctgtcggcatcgggccggctcaacggcatgctcaccgacaccctccgcggctacggcgctggcggcgtcggcggactgggcggcatcgtcggcgggcaccaccaccaccaccaccacctccacggcgcgcagccgttcggcctgggctcccggttcatgcccaagctccccgccaagcgcagcatgcgcgcgccgcgcatgcggtggacgagcacgctccacgcccgcttcgtccacgccgtcgagctcctcggaggccacgagagggctacgcccaagtcggtgctggagctcatggacgtgaaggatctgaccctagcccacgtcaagagccatctccagatgtatcggaccgtgaagagcactgacaagcctgcggcgtcatcaggggcgaacgacggcggctccggcgacgaggacttcgccggcggtggccaggctggctccggcggcgagaacatgtgcgcgaggccgttcggggagcaccggtccacctccgagggtgcggcgagctcggtgggcggcggcggcgggggcgacatggaccagtcttcggcaggcaacggcagcaccaggtggagcaactcgtcaagggacccatggctgtcgtcgaattcatgcaacatggatgctcatcgcttggcagcgttgtcttctccgattgagaacggggagccttgccgatcgagcagctcgcaggtgtcgaaccaggagctgatgagcagcccgagcctggagttcacgcttgggaggccggactggcagggcacggatcatgactagcagtagcaatagctaagctactagctgctagccatgcgtcgaccgtacgtggagctctagctagctagaaggctaacttcttcattgaggccgggtggttatagtagcagcactactactgatatcaggcggtgcgcgcgtgtgcatgcctgatgatcccccaagcaactcgtagacgacgacgacgacgacaggttttttcgcctgcgaagtcgaacagatcaatcaacaagtacagcagcagcagcaaccgcgcgcgtctccatcgatgggtgtggagatcatggtgagtacgtacgtgccgacggacggagcaccggcctggaagaagggattttaaagacttactgggtcactctctctatttcttctctgtcagagagagggagggagagttgagtgggctgcctttgggtgagtggtttgttagattggccatgccatgttcctgatttccttttctttcttgcttctctctctttttgtttccttgtgccatgtcgagcgggcgcgagattgtgtcagcgcagccggcggtgcagcagggggtatgcatgatgggagtcgtcgtagctggctggctagctgatgatggcgagagagaggcgtaaagctagccttgtgtggtggtgtgggagtgagtgagtgagtcgtgtgcgttcgtccaatgcatgtttggtccgtgtggtgtgtgaagctagctatacctagcgtatcattagcacatgcaaagctggaaaggagagaaaagaaagaaaagggaatgagttctcatgaagcaata

SEQ ID NO: 143615 - DNA, 1443 bp, Zea Mays
tcgcaataaaaccgctccccactgtctccggccgcaccgggctgaggaggccatcggacgcacaaggacagcaagcagagtgcagggccggagcgagcgaccgagagtgtgtgtgagagagagatggcgtccagcgcctcgtgtaccctgctgctgccaacgctctcgctcgcggtgatcctgctcgcgctgtgcgcccgcggcggcgaggccaggccgccgccgccgctccacggcgtgcgcccgctcgccttcgacgaggggtacacccagatcttcggcagcgccaacctcgcgctcctccgcgacggtaggcgcgtccgcctcacgctcgacgagtccaccggagccgggttcgcgtcgcaggacgtcttcctccacggcttcttcagcgccgccatcaagctgcccgccgactacgcggcgggcgtcgtcgtcgcgttctacctgtcgaacggcgacgtgtacgagaagacgcacgacgagctggacttcgagttcctgggcaacgtgcgcggccgcgagtggcgggtgcagaccaacgtgtacggcaacggcagcaccgacgccggccgggaggagcgctacgacctccccttcgaccccaccgacgacttccaccactactccatcctctggaccagcgaccgcatcattttctacgtcgacgagaccccgatccgggaggtggtgcggacggcggccatgggcgcggcgttcccgtccaagcccatgtccctgtacgccacgatctgggacggctccgcgtgggccacgctgggcggccggtaccgcgtcaactacaagtacgcgccgttcgtggccgagttcgccgacctcgccatccagggctgcgccgtcgaccccgccgccgaccacgccgtggcgtcgtgcggcgcgggcctgggcctggccccgctcgccgtgtccgcggagcagcgctcggccatggcggcgttccggcgcgcccacacctcctactcctactgccacgaccggcggcggtaccccgtcgcgctgtcggagtgcggggccggcgcggggctcctccccggccgcatgtttggccccgacgggatgaagcagcaccggcgccaccggggcgcggcgcgcggccaccgcggcggcgcccaggacgacgacgtcatgtgatcgccggtccctggcccctcgccacgtcgcggcggcggggcggggatggttgcaccgacgacggcgggcggcggcctagctcggggggaacttgcacatgaatggccctgcgccgctgcgcgtcaacggggaggcgtgcccgtgtgcctcgatagggggactggggaagggaagggggctgtgtctttgtcggaggtggaaggaaagagaatccccttttcccagcgatacgacgaacggagattcccgcgttgcttgccttgcgttgcgcctgtcactgttcccaaacgg

SEQ ID NO: 143616 - DNA, 1399 bp, Zea Mays
accgggctgaggaggccatcggacgcacaaggacagcaagcagagtgcagggccggagcgagcgaccgagagtgtgtgtgagagagagatggcgtccagcgcctcgtgtaccctgctgctgccaacgctctcgctcgcggtgatcctgctcgcgctgtgcgcccgcggcggcgaggccaggccgccgccgccgctccacggcgtgcgcccgctcgccttcgacgaggggtacacccagatcttcggcagcgccaacctcgcgctcctccgcgacggtaggcgcgtccgcctcacgctcgacgagtccaccggagccgggttcgcgtcgcaggacgtcttcctccacggcttcttcagcgccgccatcaagctgcccgccgactacgcggcgggcgtcgtcgtcgcgttctacctgtcgaacggcgacgtgtacgagaagacgcacgacgagctggacttcgagttcctgggcaacgtgcgcggccgcgagtggcgggtgcagaccaacgtgtacggcaacggcagcaccgacgccggccgggaggagcgctacgacctccccttcgaccccaccgacgacttccaccactactccatcctctggaccagcgaccgcatcattttctacgtcgacgagaccccgatccgggaggtggtgcggacggcggccatgggcgcggcgttcccgtccaagcccatgtccctgtacgccacgatctgggacggctccgcgtgggccacgctgggcggccggtaccgcgtcaactacaagtacgcgccgttcgtggccgagttcgccgacctcgccatccagggctgcgccgtcgaccccgccgccgaccacgccgtggcgtcgtgcggcgcgggcctgggcctggccccgctcgccgtgtccgcggagcagcgctcggccatggcggcgttccggcgcgcccacacctcctactcctactgccacgaccggcggcggtaccccgtcgcgctgtcggagtgcggggccggcgcggggctcctccccggccgcatgtttggccccgacgggatgaagcagcaccggcgccaccggggcgcggcgcgcggccaccgcggcggcgcccaggacgacgacgtcatgtgatcgccggtccctggcccctcgccacgtcgcggcggcggggcggggatggttgcacgctgtggattggattggattggattggattggattggggggttgggcggggattgtccgggatggaaaagctcgcctcattgtactattcgcgccatggaagtaggtcgtgtttattgcctgtggtgggacccatgtccgtgccaacgccaattgccagccgcgtagccgttgatgaagaaaaagccattcgctggccgctctttaccttgtagcgttaaagggtaa

SEQ ID NO: 143617 - DNA, 1102 bp, Zea Mays
ttttttctttcgagaaggatttacagggcagttaggaacacgcttctagaaatccttgctaggtgtactactaggtagtagtagtagttgaggagaaaatagaggcaaagcccaaagcggaacccagtttgggcctccggttgccgaattacacagcccaacatcagtcatttaatttaccagtagatagataaaaacaaatggatccaaagcccagcgggtcacagtttggaatcgacttgacctaaataataatccacatctgacaatagtacaccacgcagccatcaaacaaagaagcagtgaccgtagccacgtatgcatatagagctgcacttattttccctcgccaacctagccggccggtgatgattgatatggggcatgcggcgaccggcctgcttcactatttttgctgcatcacaccagtcttcatatggactgcacggccctggccatggcgaaggcggcggcggaggcgagcgcgccgacgacggtggtctggacggcgctgaagaaggggcggtcgcccgtgaagcggcccttgacgaagccgaagaagagcagcgccgcgagcgtcacggcgacggacacggccatggcgcgcgcggcctccggcacgaacatgtaggggagcagcggcaccagcccgcccgcgacgtaggacagcgcgatggtggcggcgctcaccagcgcgcgccggggctcaggcctctccagcccgagctcgaacttcatcatgaactccagccacgccttggggttgttgcggagggaggtcaccacggggccgtactcctccgggcccagcccgtactgcgacaggatgtcggcgatctcggcggcctctgcattatttgcatgcgaaatgtacaggacggacgaggcgatggtcagacgaccttactacatatgcattagccgtctgaagagaagaaggtgagctcgtcgcgggcggttgcgtttgcttaccgacgtcggggacggtgtcgatctcgtcctgctcgcgctgcagctcccggttgtagtggtcagcctcgctcttcgccgccaggtacctgaacgcacgcacagcacagcaactgaagaggttagttttggt

SEQ ID NO: 143618 - DNA, 238 bp, Zea Mays
atgtcatttcgactttggagttctggatccctccttgtgtatcttatttgccaagagcacatctccataaattgtttgtccacaaatataggaagctcgcttatttacttgctagttgatgtcaccatctccatgagaatcaaacgcatgtttttatatatcaggaacaacatgtatatttgggctgtaaaatacagcattatctcgaatgatgcttttccaattgttctaaagtgag

SEQ ID NO: 143619 - DNA, 2497 bp, Zea Mays
cgagcccacgacggcccacgttcttgcatgttttgaagggaagagacatttcttagcggagaattgaagccaccgcccaccggacctggcgcaccgcgcacgacaccaaagtaccaaacgcttgggagctttggactctacaccgcgcatagatcgtgggcatcgcgacacctcacctgcccccctgcggccgccgtctctcctcgccggttaccccttgctgcccgctcccctgcgcctcgcctttctcgccctctttccgcctttctcacacgtgcccgccttctccgcccctctcctcaccagcggtggcgtcgaccggcagcggcgttcaactgcgccccacgagcaggtttcttggccccgtcgacttccagtgagttcagtttagctcagtaagcatctgatcaacttcgaggtgccagacagatcctatgctgccttactgggatgaaaggtggctgtctgcataggctccttgtccacaagctatgctttggcctgagtattctcactgtgccgattattgttctgttactggaaggagccccagtactcactatcttcagcccaacaccagggcaattaaaagttctctctcaaggttttctacatcagcaggagcaggaacatcttggagatgatggagcaaccctagctggatctccaggtccagcttccaggagccgctcgcaaaaaagtaggggcaaagtgatgaaaaattgcaactacgcaaaggggaagtggatagaagatgataagcggccgctgtactctggtaatgagtgcaaacaatggctgtcaaaaatgtgggcttgtcgaatgatgcggcgcacacatttctcttatgagaattaccggtggcaaccacatgactgtgagatgcctgagtttacagggcctaagttcttaaaaaggatgagaaaccgaactcttgcttttgttggtgattcacttggcagacaacaatttcagtcaatgatgtgtatagcaactggtggcaaatacagtccagaggttgaagatgttggttggaaatatggccttgtcaaagccccaggtgctctaagacctgacgggtgggcttatagattttcgtccaccaacacaactatccttttctactggtctgctactctgtctgaattggaacctctgaatacagaacacacagttaccagatatgcattgcatcttgatcgaccagttacatttttgaaggagtatcttaatgactttgatgtcctagtacttaacactggccatcactggaacagagggaaattcaatggaaatcactgggaattgcatgctgacgggaagcctgtaggcaatggtagtagactcgcagacctaaaccgtgcaaaaaatcttacattgtatagcattgctagatggatggattcagaactcacacggcatcctaagatgaaagttttcctcaggacaatttcaccaaggcactttgtaaatggtgactggaacacaggtggaacatgtggaaatactgtcccctttactaatggaagtgaagtgttgcaggatcattcaattgatatacccgcagaaaatgctgtgaagggaactcgggttaagcttttggatatcactgctatctcaaaactacgggatgaggggcatatctcaaactctagtttcaaaaaggcttccaccggaattaatgattgcttgcactggtgcttacctggtataccagacatgtggaatgagcttctctttgtacagatttagtatcaccctctggttaggcagatctttttcagagccccaaggatctccgctgttcatagcatagaagtaaagtttatggaattttgggtcgcccatatggaggtgttcacaagatgatactattgatttctatgaagtacgaaatttacagtgtggaacagattattccaacttcctttcggagcagagtagatggaggtgttgcccagcccaatctgactatcgagtattcttcaggcacgttgaactttgtttctacttttaccttactgtaaaaccctaccacggtttaccatgtgcagcatatatccttcagaaaaatgttcatacctgttggtcgtaattatatttgttcattcagatgaaattaaaacttcaacatccgattgatttgtcatttgtgtgagctcaaaggcttcactcttgtctgtgtaacattttcagtgatagatgacctgatataccatgcatcttatacctatatgacacacctagggcccggacggacgacctcgtctggatgtagcccgtgcgaaatgggggaccgcatgggcgcatggcatgtgaaaggaggccagtgctgccagcttaccgcgacgactgattcgttattcgagttatttacaagtacctaatatatctagatgatacatttgcaacatgcatcaaaatttgctgaaacatttcgaatgtgtttgtaacataagtatagttattacaatagactccctcggttcgtttttta

SEQ ID NO: 143620 - DNA, 2476 bp, Zea Mays
cgagcccacgacggcccacgttcttgcatgttttgaagggaagagacatttcttagcggagaattgaagccaccgcccaccggacctggcgcaccgcgcacgacaccaaagtaccaaacgcttgggagctttggactctacaccgcgcatagatcgtgggcatcgcgacacctcacctgcccccctgcggccgccgtctctcctcgccggttaccccttgctgcccgctcccctgcgcctcgcctttctcgccctctttccgcctttctcacacgtgcccgccttctccgcccctctcctcaccagcggtggcgtcgaccggcagcggcgttcaactgcgccccacgagcaggtttcttggccccgtcgacttccagtgagttcagtttagctcagtaagcatctgatcaacttcgaggtgccagacagatcctatgctgccttactgggatgaaaggtggctgtctgcataggctccttgtccacaagctatgctttggcctgagtattctcactgtgccgattattgttctgttactggaaggagccccagtactcactatcttcagcccaacaccagggcaattaaaagttctctctcaaggttttctacatcagcaggagcaggaacatcttggagatgatggagcaaccctagctggatctccaggtccagcttccaggagccgctcgcaaaaaaattgcaactacgcaaaggggaagtggatagaagatgataagcggccgctgtactctggtaatgagtgcaaacaatggctgtcaaaaatgtgggcttgtcgaatgatgcggcgcacacatttctcttatgagaattaccggtggcaaccacatgactgtgagatgcctgagtttacagggcctaagttcttaaaaaggatgagaaaccgaactcttgcttttgttggtgattcacttggcagacaacaatttcagtcaatgatgtgtatagcaactggtggcaaatacagtccagaggttgaagatgttggttggaaatatggccttgtcaaagccccaggtgctctaagacctgacgggtgggcttatagattttcgtccaccaacacaactatccttttctactggtctgctactctgtctgaattggaacctctgaatacagaacacacagttaccagatatgcattgcatcttgatcgaccagttacatttttgaaggagtatcttaatgactttgatgtcctagtacttaacactggccatcactggaacagagggaaattcaatggaaatcactgggaattgcatgctgacgggaagcctgtaggcaatggtagtagactcgcagacctaaaccgtgcaaaaaatcttacattgtatagcattgctagatggatggattcagaactcacacggcatcctaagatgaaagttttcctcaggacaatttcaccaaggcactttgtaaatggtgactggaacacaggtggaacatgtggaaatactgtcccctttactaatggaagtgaagtgttgcaggatcattcaattgatatacccgcagaaaatgctgtgaagggaactcgggttaagcttttggatatcactgctatctcaaaactacgggatgaggggcatatctcaaactctagtttcaaaaaggcttccaccggaattaatgattgcttgcactggtgcttacctggtataccagacatgtggaatgagcttctctttgtacagatttagtatcaccctctggttaggcagatctttttcagagccccaaggatctccgctgttcatagcatagaagtaaagtttatggaattttgggtcgcccatatggaggtgttcacaagatgatactattgatttctatgaagtacgaaatttacagtgtggaacagattattccaacttcctttcggagcagagtagatggaggtgttgcccagcccaatctgactatcgagtattcttcaggcacgttgaactttgtttctacttttaccttactgtaaaaccctaccacggtttaccatgtgcagcatatatccttcagaaaaatgttcatacctgttggtcgtaattatatttgttcattcagatgaaattaaaacttcaacatccgattgatttgtcatttgtgtgagctcaaaggcttcactcttgtctgtgtaacattttcagtgatagatgacctgatataccatgcatcttatacctatatgacacacctagggcccggacggacgacctcgtctggatgtagcccgtgcgaaatgggggaccgcatgggcgcatggcatgtgaaaggaggccagtgctgccagcttaccgcgacgactgattcgttattcgagttatttacaagtacctaatatatctagatgatacatttgcaacatgcatcaaaatttgctgaaacatttcgaatgtgtttgtaacataagtatagttattacaatagactccctcggttcgtttttta

SEQ ID NO: 143621 - DNA, 2268 bp, Zea Mays
cgagcccacgacggcccacgttcttgcatgttttgaagggaagagacatttcttagcggagaattgaagccaccgcccaccggacctggcgcaccgcgcacgacaccaaagtaccaaacgcttgggagctttggactctacaccgcgcatagatcgtgggcatcgcgacacctcacctgcccccctgcggccgccgtctctcctcgccggttaccccttgctgcccgctcccctgcgcctcgcctttctcgccctctttccgcctttctcacacgtgcccgccttctccgcccctctcctcaccagcggtggcgtcgaccggcagcggcgttcaactgcgccccacgagcaggtttcttggccccgtcgacttccagtgagttcagtttagctcagtaagcatctgatcaacttcgaggtgccagacagatcctatgctgccttactgggatgaaaggtggctgtctgcataggctccttgtccacaagctatgctttggcctgagtattctcactgtgccgattattgttctgttactggaaggagccccagtactcactatcttcagcccaacaccagggcaattaaaagttctctctcaaggttttctacatcagcaggagcaggaacatcttggagatgatggagcaaccctagctggatctccaggtccagcttccaggagccgctcgcaaaaaaattgcaactacgcaaaggggaagtggatagaagatgataagcggccgctgtactctggtaatgagtgcaaacaatggctgtcaaaaatgtgggcttgtcgaatgatgcggcgcacacatttctcttatgagaattaccggtggcaaccacatgactgtgagatgcctgagtttacagggcctaagttcttaaaaaggatgagaaaccgaactcttgcttttgttggtgattcacttggcagacaacaatttcagtcaatgatgtgtatagcaactggtggcaaatacagtccagaggttgaagatgttggttggaaatatggccttgtcaaagccccaggtgctctaagacctgacgggtgggcttatagattttcgtccaccaacacaactatccttttctactggtctgctactctgtctgaattggaacctctgaatacagaacacacagttaccagatatgcattgcatcttgatcgaccagttacatttttgaaggagtatcttaatgactttgatgtcctagtacttaacactggccatcactggaacagagggaaattcaatggaaatcactgggaattgcatgctgacgggaagcctgtaggcaatggtagtagactcgcagacctaaaccgtgcaaaaaatcttacattgtatagcattgctagatggatggattcagaactcacacggcatcctaagatgaaagttttcctcaggacaatttcaccaaggcactttgtaaatggtgactggaacacaggtggaacatgtggaaatactgtcccctttactaatggaagtgaagtgttgcaggatcattcaattgatatacccgcagaaaatgctgtgaagggaactcgggttaagcttttggatatcactgctatctcaaaactacgggatgaggggcatatctcaaactctagtttcaaaaaggcttccaccggaattaatgattgcttgcactggtgcttacctggtataccagacatgtggaatgagcttctctttgtacagatttagtatcaccctctggttaggcagatctttttcagagccccaaggatctccgctgttcatagcatagaagtaaagtttatggaattttgggtcgcccatatggaggtgttcacaagatgatactattgatttctatgaagtacgaaatttacagtgtggaacagattattccaacttcctttcggagcagagtagatggaggtgttgcccagcccaatctgactatcgagtattcttcagtgatagatgacctgatataccatgcatcttatacctatatgacacacctagggcccggacggacgacctcgtctggatgtagcccgtgcgaaatgggggaccgcatgggcgcatggcatgtgaaaggaggccagtgctgccagcttaccgcgacgactgattcgttattcgagttatttacaagtacctaatatatctagatgatacatttgcaacatgcatcaaaatttgctgaaacatttcgaatgtgtttgtaacataagtatagttattacaatagactccctcggttcgtttttt

SEQ ID NO: 143622 - DNA, 2216 bp, Zea Mays
cgagcccacgacggcccacgttcttgcatgttttgaagggaagagacatttcttagcggagaattgaagccaccgcccaccggacctggcgcaccgcgcacgacaccaaagtaccaaacgcttgggagctttggactctacaccgcgcatagatcgtgggcatcgcgacacctcacctgcccccctgcggccgccgtctctcctcgccggttaccccttgctgcccgctcccctgcgcctcgcctttctcgccctctttccgcctttctcacacgtgcccgccttctccgcccctctcctcaccagcggtggcgtcgaccggcagcggcgttcaactgcgccccacgagcaggtttcttggccccgtcgacttccagtgagttcagtttagctcagtaagcatctgatcaacttcgaggtgccagacagatcctatgctgccttactgggatgaaaggtggctgtctgcataggctccttgtccacaagctatgctttggcctgagtattctcactgtgccgattattgttctgttactggaaggagccccagtactcactatcttcagcccaacaccagggcaattaaaagttctctctcaaggttttctacatcagcaggagcaggaacatcttggagatgatggagcaaccctagctggatctccaggtccagcttccaggagccgctcgcaaaaaaattgcaactacgcaaaggggaagtggatagaagatgataagcggccgctgtactctggtaatgagtgcaaacaatggctgtcaaaaatgtgggcttgtcgaatgatgcggcgcacacatttctcttatgagaattaccggtggcaaccacatgactgtgagatgcctgagtttacagggcctaagttcttaaaaaggatgagaaaccgaactcttgcttttgttggtgattcacttggcagacaacaatttcagtcaatgatgtgtatagcaactggtggcaaatacagtccagaggttgaagatgttggttggaaatatggccttgtcaaagccccaggtgctctaagacctgacgggtgggcttatagattttcgtccaccaacacaactatccttttctactggtctgctactctgtctgaattggaacctctgaatacagaacacacagttaccagatatgcattgcatcttgatcgaccagttacatttttgaaggagtatcttaatgactttgatgtcctagtacttaacactggccatcactggaacagagggaaattcaatggaaatcactgggaattgcatgctgacgggaagcctgtaggcaatggtagtagactcgcagacctaaaccgtgcaaaaaatcttacattgtatagcattgctagatggatggattcagaactcacacggcatcctaagatgaaagttttcctcaggacaatttcaccaaggcactttgtaaatggtgactggaacacaggtggaacatgtggaaatactgtcccctttactaatggaagtgaagtgttgcaggatcattcaattgatatacccgcagaaaatgctgtgaagggaactcgggttaagcttttggatatcactgctatctcaaaactacgggatgaggggcatatctcaaactctagtttcaaaaaggcttccaccggaattaatgattgcttgcactggtgcttacctggtataccagacatgtggaatgagcttctctttgtacagatttagtatcaccctctggttaggcagatctttttcagagccccaaggatctccgctgttcatagcatagaagtaaagtttatggaattttgggtcgcccatatggaggtgttcacaagatgatactattgatttctatgaagtacgaaatttacagtgtggaacagattattccaacttcctttcggagcagagtagatggaggtgttgcccagcccaatctgactatcgagtattcttcagggcccggacggacgacctcgtctggatgtagcccgtgcgaaatgggggaccgcatgggcgcatggcatgtgaaaggaggccagtgctgccagcttaccgcgacgactgattcgttattcgagttatttacaagtacctaatatatctagatgatacatttgcaacatgcatcaaaatttgctgaaacatttcgaatgtgtttgtaacataagtatagttattacaatagactccctcggttcgttttt

SEQ ID NO: 143623 - DNA, 1417 bp, Zea Mays
cagttatgtcatatcattgtcgcgtcctcgtccccgttccatttcattatccccccggagctggtgcgcgagtcggagctggtgcagggtcacccttcccctcggcctcaagagctctgcggttgccgcggccaagggcgtccgtggagaagcgggagcaggtggcggcgatggaagagcaaggacgactccggcgtcctctccccctacagcttctccagaagggttcctaaagacgacgatgtcacgatcaaggtgctctactgcgggatctgccacaccgacctgcacgtcatcaagaacgactggcgaaacgccatgtacccagtcgtcccggggcacgagatcgtgggcgtggtgaccggcgtcggcggcggcgtcacgcggttcaaggccggcgacacggtcggcgtgggctacttcgtggggtcctgccgctcctgcgacagctgcggcaagggggacgacaactactgcgcggggatcgtgctcacctccaacggcgtcgaccacgcgcacggcggcgcgcccaccagggggggattctccgacgtcctggtcgcgagcgagcactacgtggtccgcgtccccgacggcctggcgctggaccgcaccgcgccgctgctctgcgccggcgtcaccgtgtacagccccatgatgcgccacggcctcaacgagcccggcaagcacctcggcgtcgtcggcctcggcggcctcggccacgtcgccgtcaagttcggcaaggccttcgggatgaaggtcaccgtcatcagcacgtccgccagcaagcgccaggaggccatcgagaacctcggcgcggacgagttcctcatcagccgggacgaggaccagatgaaggcggcgacggggaccatggacggcatcatcgacacggtgtcggcgtggcacccgatcacgccgctgctggcgctgctgaagccgctggggcagatggtggtcgtgggcgcgccgagcaagccgctcgagctgccggcctacgccatcgtgccgggcgggaagggcgtggctgggaacaatgtcggcagcgtcagggactgccaggccatgctcgagttcgcggggaagcacggcatcggggccgaggtcgaggtcatcaagatggactacgtcaacacggccatggagcggctcgagaagaacgacgtccgctaccgcttcgtcatcgacgtcgccggcagcctcggctctgccgcctaggcatggctgcaaaggtttcaatcagagcccagccgcaataatttgttagctaccgaatgaatgatggtctacgcttgttgatgagttggtgctttgtcgtggttttgtggatgtaataattcgatgtacaaataaaaaaaggggagacaaggtgcttgttcccttggtttggtgaaaaaaaaaaaaaaaaaacaaaaaa

SEQ ID NO: 143624 - DNA, 1594 bp, Zea Mays
ctcaaccatcctccctccacagatctctccggggaggcagcaacagttatgtcatatcattgtcgcgtcctcgtccccgttccatttcattatccccccggagctggtgcgcgagtcggagctggtgcagggtcacccttcccctcggcctcaagagctctgcggttgccgcggccaagggcgtccgtggagaagcgggagcaggtggcggcgatggaagagcaaggcggccaggcggcgctcgggtgggcggccagggacgactccggcgtcctctccccctacagcttctccagaagggttcctaaagacgacgatgtcacgatcaaggtgctctactgcgggatctgccacaccgacctgcacgtcatcaagaacgactggcgaaacgccatgtacccagtcgtcccggggtaaccgatccaatttcgctagcctagacgccccggatgctgttgcaaaactaacagcctctgtctgtctgaccccgtcggctggcgtggcgtggcgagcaggcacgagatcgtgggcgtggtgaccggcgtcggcggcggcgtcacgcggttcaaggccggcgacacggtcggcgtgggctacttcgtggggtcctgccgctcctgcgacagctgcggcaagggggacgacaactactgcgcggggatcgtgctcacctccaacggcgtcgaccacgcgcacggcggcgcgcccaccagggggggattctccgacgtcctggtcgcgagcgagcactacgtggtccgcgtccccgacggcctggcgctggaccgcaccgcgccgctgctctgcgccggcgtcaccgtgtacagccccatgatgcgccacggcctcaacgagcccggcaagcacctcggcgtcgtcggcctcggcggcctcggccacgtcgccgtcaagttcggcaaggccttcgggatgaaggtcaccgtcatcagcacgtccgccagcaagcgccaggaggccatcgagaacctcggcgcggacgagttcctcatcagccgggacgaggaccagatgaaggcggcgacggggaccatggacggcatcatcgacacggtgtcggcgtggcacccgatcacgccgctgctggcgctgctgaagccgctggggcagatggtggtcgtgggcgcgccgagcaagccgctcgagctgccggcctacgccatcgtgccgggcgggaagggcgtggctgggaacaatgtcggcagcgtcagggactgccaggccatgctcgagttcgcggggaagcacggcatcggggccgaggtcgaggtcatcaagatggactacgtcaacacggccatggagcggctcgagaagaacgacgtccgctaccgcttcgtcatcgacgtcgccggcagcctcggctctgccgcctaggcatggctgcaaaggtttcaatcagagcccagccgcaataatttgttagctaccgaatgaatgatggtctacgcttgttgatgagttggtgctttgtcgtggttttgtggatgtaataattcgatgtacaaataaaaaaaggggagacaaggtgcttgttcccttggtttggtgaaaaaaaaaaaaaaaaaacaaaaaa

SEQ ID NO: 143625 - DNA, 1492 bp, Zea Mays
ctcaaccatcctccctccacagatctctccggggaggcagcaacagttatgtcatatcattgtcgcgtcctcgtccccgttccatttcattatccccccggagctggtgcgcgagtcggagctggtgcagggtcacccttcccctcggcctcaagagctctgcggttgccgcggccaagggcgtccgtggagaagcgggagcaggtggcggcgatggaagagcaaggcggccaggcggcgctcgggtgggcggccagggacgactccggcgtcctctccccctacagcttctccagaagggttcctaaagacgacgatgtcacgatcaaggtgctctactgcgggatctgccacaccgacctgcacgtcatcaagaacgactggcgaaacgccatgtacccagtcgtcccggggcacgagatcgtgggcgtggtgaccggcgtcggcggcggcgtcacgcggttcaaggccggcgacacggtcggcgtgggctacttcgtggggtcctgccgctcctgcgacagctgcggcaagggggacgacaactactgcgcggggatcgtgctcacctccaacggcgtcgaccacgcgcacggcggcgcgcccaccagggggggattctccgacgtcctggtcgcgagcgagcactacgtggtccgcgtccccgacggcctggcgctggaccgcaccgcgccgctgctctgcgccggcgtcaccgtgtacagccccatgatgcgccacggcctcaacgagcccggcaagcacctcggcgtcgtcggcctcggcggcctcggccacgtcgccgtcaagttcggcaaggccttcgggatgaaggtcaccgtcatcagcacgtccgccagcaagcgccaggaggccatcgagaacctcggcgcggacgagttcctcatcagccgggacgaggaccagatgaaggcggcgacggggaccatggacggcatcatcgacacggtgtcggcgtggcacccgatcacgccgctgctggcgctgctgaagccgctggggcagatggtggtcgtgggcgcgccgagcaagccgctcgagctgccggcctacgccatcgtgccgggcgggaagggcgtggctgggaacaatgtcggcagcgtcagggactgccaggccatgctcgagttcgcggggaagcacggcatcggggccgaggtcgaggtcatcaagatggactacgtcaacacggccatggagcggctcgagaagaacgacgtccgctaccgcttcgtcatcgacgtcgccggcagcctcggctctgccgcctaggcatggctgcaaaggtttcaatcagagcccagccgcaataatttgttagctaccgaatgaatgatggtctacgcttgttgatgagttggtgctttgtcgtggttttgtggatgtaataattcgatgtacaaataaaaaaaggggagacaaggtgcttgttcccttggtttggtgaaaaaaaaaaaaaaaaaacaaaaaa

SEQ ID NO: 143626 - DNA, 1495 bp, Zea Mays
ctcaaccatcctccctccacagatctctccggggaggcagcaacagttatgtcatatcattgtcgcgtcctcgtccccgttccatttcattatccccccggagctggtgcgcgagtcggagctggtgcagggtcacccttcccctcggcctcaagagctctgcggttgccgcggccaagggcgtccgtggagaagcgggagcaggtggcggcgatggaagagcaaggcggccaggcggcgctcgggtgggcggccagggacgactccggcgtcctctccccctacagcttctccagaaggtgggttcctaaagacgacgatgtcacgatcaaggtgctctactgcgggatctgccacaccgacctgcacgtcatcaagaacgactggcgaaacgccatgtacccagtcgtcccggggcacgagatcgtgggcgtggtgaccggcgtcggcggcggcgtcacgcggttcaaggccggcgacacggtcggcgtgggctacttcgtggggtcctgccgctcctgcgacagctgcggcaagggggacgacaactactgcgcggggatcgtgctcacctccaacggcgtcgaccacgcgcacggcggcgcgcccaccagggggggattctccgacgtcctggtcgcgagcgagcactacgtggtccgcgtccccgacggcctggcgctggaccgcaccgcgccgctgctctgcgccggcgtcaccgtgtacagccccatgatgcgccacggcctcaacgagcccggcaagcacctcggcgtcgtcggcctcggcggcctcggccacgtcgccgtcaagttcggcaaggccttcgggatgaaggtcaccgtcatcagcacgtccgccagcaagcgccaggaggccatcgagaacctcggcgcggacgagttcctcatcagccgggacgaggaccagatgaaggcggcgacggggaccatggacggcatcatcgacacggtgtcggcgtggcacccgatcacgccgctgctggcgctgctgaagccgctggggcagatggtggtcgtgggcgcgccgagcaagccgctcgagctgccggcctacgccatcgtgccgggcgggaagggcgtggctgggaacaatgtcggcagcgtcagggactgccaggccatgctcgagttcgcggggaagcacggcatcggggccgaggtcgaggtcatcaagatggactacgtcaacacggccatggagcggctcgagaagaacgacgtccgctaccgcttcgtcatcgacgtcgccggcagcctcggctctgccgcctaggcatggctgcaaaggtttcaatcagagcccagccgcaataatttgttagctaccgaatgaatgatggtctacgcttgttgatgagttggtgctttgtcgtggttttgtggatgtaataattcgatgtacaaataaaaaaaggggagacaaggtgcttgttcccttggtttggtgaaaaaaaaaaaaaaaaaacaaaaaa

SEQ ID NO: 143627 - DNA, 2274 bp, Zea Mays
gagaagaaaatggatcacttcatttatcaaaccaaacacactctttatagagctttatttattacgtggctccttttccttttgcagccactctacaatttcccgtttgacaacggagccacgtgactagaagtggggtattttatcttactatcctaggtttagttcaccttcattccaaatcagcaggttgtgcacaaattcagtctaatatcatgtcaaatcttttttctcgttaacgacgggattttggagaagtttgtaggaagtctgtctccggaccatatcctagcgttagcgtccatggattatatgctgactcattgccacattggcccctcaaccatcctccctccacagatctctccggggaggcagcaacagttatgtcatatcattgtcgcgtcctcgtccccgttccatttcattatccccccggagctggtgcgcgagtcggagctggtgcagggtcacccttcccctcggcctcaagagctctgcggttgccgcggccaagggcgtccgtggagaagcgggagcaggtggcggcgatggaagagcaaggcggccaggcggcgctcgggtgggcggccagggacgactccggcgtcctctccccctacagcttctccagaaggtggtagcatctgtcacggtcgcccagcactgctctgctctgctctgctctgccatattttattgtgttgttgcagctcctggaagatgtctaattaccttctctgcagtctgcacagttttggggtctctagatttttggttaatccttggtcagaggcttacctaatatagagtattcttgttcatggaatccattactaatttcagggttcctaaagacgacgatgtcacgatcaaggtgctctactgcgggatctgccacaccgacctgcacgtcatcaagaacgactggcgaaacgccatgtacccagtcgtcccggggtaaccgatccaatttcgctagcctagacgccccggatgctgttgcaaaactaacagcctctgtctgtctgaccccgtcggctggcgtggcgtggcgagcaggcacgagatcgtgggcgtggtgaccggcgtcggcggcggcgtcacgcggttcaaggccggcgacacggtcggcgtgggctacttcgtggggtcctgccgctcctgcgacagctgcggcaagggggacgacaactactgcgcggggatcgtgctcacctccaacggcgtcgaccacgcgcacggcggcgcgcccaccagggggggattctccgacgtcctggtcgcgagcgagcactacgtggtccgcgtccccgacggcctggcgctggaccgcaccgcgccgctgctctgcgccggcgtcaccgtgtacagccccatgatgcgccacggcctcaacgagcccggcaagcacctcggcgtcgtcggcctcggcggcctcggccacgtcgccgtcaagttcggcaaggccttcgggatgaaggtcaccgtcatcagcacgtccgccagcaagcgccaggaggccatcgagaacctcggcgcggacgagttcctcatcagccgggacgaggaccagatgaaggtgtgggcactgggctgggatgccccccttctccacgctcactgctatgtaatgtaactaacgcggcgacatatatatacgtatctatgtgtgagatgagcaggcggcgacggggaccatggacggcatcatcgacacggtgtcggcgtggcacccgatcacgccgctgctggcgctgctgaagccgctggggcagatggtggtcgtgggcgcgccgagcaagccgctcgagctgccggcctacgccatcgtgccgggcgggaagggcgtggctgggaacaatgtcggcagcgtcagggactgccaggccatgctcgagttcgcggggaagcacggcatcggggccgaggtcgaggtcatcaagatggactacgtcaacacggccatggagcggctcgagaagaacgacgtccgctaccgcttcgtcatcgacgtcgccggcagcctcggctctgccgcctaggcatggctgcaaaggtttcaatcagagcccagccgcaataatttgttagctaccgaatgaatgatggtctacgcttgttgatgagttggtgctttgtcgtggttttgtggatgtaataattcgatgtacaaataaaaaaaggggagacaaggtgcttgttcccttggtttggtgacaacttgttcgtttacaccgatctatctctaaattagtatgaattaaaattaaa

SEQ ID NO: 143628 - DNA, 2234 bp, Zea Mays
aacgaattcctcctgtcgttgcactctccgcactgctcctgcgcagacgacgtacgtagccgttgttatcgcagcgcgctgcccccttgcaccgatcactatcctccccacccggcccatcggccgcggccggtgccggcaatgcggtgggcgcccgggcgggcggcctacgtcctcctcgcggcggcgctgtggtgcgcctcactcaccccgcgcgcggcgccggacctcgcggcggaccgggcggcgctgctcgcgttccgggacgcggtggggcagcggctcccgtgggacgcggccgcggcgtcgccgtgcgggtggcgcggcgtcaggtgcgaccccgccgcctcgcgcgtcaccgcgctgcagctccctggggccagccttgtcggcgcggtgccgctcgggacgatcgggaacctcacggcgctgcggacgctatccctccgcctcaacgcgctgtccggcggcatcccggccgacatcgggagctgcacggagctccggcacctgtacctccaaggcaaccagctggatggacaggtaccggaggggttcttcgacctcgggctcctgcagcggctcgacctctcgaacaaccgcatcgccggcggggtctcgccgggcttcaacaggctccagaggctcgctactctgtacctggagaacaacagcctgaatggcacgctgccgtccaaccttgacctcccgaagcttcagcttttcaacgtgtccagaaacaacctcaccggccctgttccaaagtcgctcgcccgtatgcccgccagcgcctttgatgggacagggctctgtggtaaccctctagccccgtgcccaacccctccgccgccgccgtctgttccggccgctgctaatggtagcatcagcgcaaagctctctactggtgcgatcgccggcattgctgcgggtgctgccgtggcgttcttggttctgatcgccgtgatcttgttcctctgctttcggtgtcagaggacaatggccgaaaaatccgcggagacggcagccgacgccgacctggacgggtctcccgtgtcggtcaccgtggcgagcatggacatgaagaacgcgacgaggcggtcctcgcaggccacggcaggcaacagcgacaagaagctggtgttcttgggagcggcgccggacgcgccgtacgatctggagtcccttctgcacgcgtcggccgaggtgatcgggaagggctggctgggcacgacgtaccgcgccacgctggagggcggcgccaccaccgtggccgtgaagcggctcagggcggcgcccatcccggagcgggagttccgggacaaggtgatcgcgctgggcgcgctccggcacgagaacctggtgccggtccgcgcgtacttctacagccgggaggagaagctgatcgtgtacgacttcgtgggcggcggcagcctctgctccctcctccacggcgggagccccgagcggctggacttcgaggcgcgggcgcgcatcgcgctggcggccgcgcgcggcgtcgcgttcatccacggcgccggcccccgctcgtgccacggcaacatcaagtcgtccaacgtcctcgtcgccgacgcgcgcgacggcgcctacgtgaccgaccacggcatcctccggctcgtcggcgcgcacgtgcccctgaagcgcgtcaccgggtaccgcgcccccgaggtcaccgacccgcgcagggcgtcgcaggagacggacacgtacagcttcggcgtgctgctcctcgaggcgctgacggggaagccgccggtgaactcggtccccgggagcaccggcggcgtggagctgccgctgtgggtgcgcacggtggtgcaggaggagtggacggccgaggtgttcgacgccagcatcgcggtcgaggagcgcgtggaggaggagatggtgcggctgctgcagctcgccgtggaatgcaccgacgaccggccggaccggcggcctcggatggccgaggtggtggcgaggatcgaggtcatcgtccggagcgcggagctgaaggcgaaggccgacacggaggatgacgacttccatagcatctctccctaacctgccagcgcggtcgttctctgtggttattttcagatcttgggtgcacattgtgcggcgatgtacatgttcgtaacattagtcgttcttcattatttctctgcgaaggcatgtttacagttgtcgttcgtcgtgctagtactagcaactctgttagctgctgctta

SEQ ID NO: 143629 - DNA, 677 bp, Zea Mays
atggatttttaaaatctgtagtgtttaaagaaccagaaatggatttgcttgtttctaattcattttgcttgttggatgtcgatatgcacatgcattttcaggtaacttatgatcaaaggggacaaataagatcatgccaactctactccatgtactgctggtgtcacagactcacctctgcggcagtatgccctgcctttgctgtgtacttaaatctgctggaggatgatgcatgggcatgcacggcattagattctattgctgtttgtttggctcacgataatgatcacagaaaagtggaacaatcactgttgaaaaaagaggccattcagaatttagtgaagttcttccaagattgcccataacagttttttggccatatattagacgctttcttgaagataataacgaaatcttctaggctaaatacaacaatggctaccaatggtttaacaacattgctcattgcaagacttgaccattcaaatttggtggtcgcaaaagtgtggagacttgaattcatataatgttaggcttaacattaacattagtgcaaacagttgtattttagtttagatttagagtacacttatgtatgcgttgtttgacaatgcttatttataatatattgaatggtacttatttatattatattaattataatgttgttcaatata

SEQ ID NO: 143630 - DNA, 94 bp, Zea Mays
ttattttttttattttacaaaaaatcatatatacatatgtacaatttatattcaatattataaacacctgagcatgatgttctactggttagat

SEQ ID NO: 143631 - DNA, 288 bp, Zea Mays
atgactagcgagctagcaagtggatgcggtcctttgtccaggacggaatacgcgtgtctcctggatggccggccccacggtgtaggtcgtgttgcgcttggcctggttgcttcgctgctcgcgggtccctttcgcttgctttgcacgggctgctacgtgaagcggcttccatttgcgcttttgtttactagaaaaagaggcgcgcttcgcggcgccctaccatgggaaactcaagcatgccagactaatctaactcagcaaagcacgtcacagtttgctgcaatgtag

SEQ ID NO: 143632 - DNA, 1782 bp, Zea Mays
ctggccgagcctttcggacagccgcgcgtgtcgttagttgatttcgagctgctagtagtctgatcgctcgtgtgggatggggatggttaacggatccatctctgggttcttgctttgctgtgtgtatttatgtgccggcgtctgattgtcagaggcatgtgtgcaatctctctccccagcttacttcggcggagcaggagcagcagcagcagccccggcaatggactggtccttcgctagcaagcccggcgccgccccggcgttgatgtcgttccggtcagcttcgttcccccagttctcctccttcgacggcgccaagaacccggcccctcgtatcctcacgcaccagaggtcgttcggccccgacagcacgcactacgccgccgcgcaccgcacgcagcatgcgctgaacggggctagagtcactccggtctcgtcgccgttcaaccagaacagtccgatgttcagggtccagagctcgcctagccttccgaacggtactgcgttcaagcagccgccttttgccatcaacaacaacgctgcggccagttctactgttggtttctatggaacaagggatgtggtgaggccaaagacagcacaattgacgatcttctatgctggttctgtcaacgtattcgacaacgtctcagctgagaaggctcaggagctcatgctcttagccagcagagggtctcttccaagctcagcccccgtggcccgtaagccagaagctcctattctcgctccagcaaaagtcacagcgcctgaggttttgcatgcaacacagatgctgtttcaaaaaccacaacacgtttctccaccttcgtctgccatctccaaaccaatccctggcatcttgcaagctgcaagtctccccaggagcgcctcgagctctaaccttgactccccatttccaaaatcttcagtgccatttcctgtttctcctgtaagtcaggctccgagagctcagcctgcaaccattgccgctacaactgcagcagcaataatgcctagagctgtccctcaagctagaaaggcgtcccttgctcgattcttggagaaaagaaaggaaagggtgacaactgctgcaccttacccatcagccaagagcccgatggagagcagtgacacgtttggcagtgggagcgccaacgacaagtcatcatgcacagacattgccctctcaagcaaccatgaggagtccctatgtttagggcagcccaggaacatcagcttcatccaagagtcccccagtacaaaactacagatctgatctgaatatctgatcatgcccaatgttcatagatttgtccaggctgactgatgcaaggaccatacgatacttttgcattcaggcaaggactcgagaggaagagattacgtatgttatcggtgccgctagctgttgtttatgatgatgttttgttgtgctagtttactgtgatgctggtggtgcccccacctaactaacaagagagctgtcacttgcagactcttgatttttttttgtcctagcgccatttctttagcggtatcaagtcaatttatataggcttacaaattctgcgccttttgtatggccaaagtgtaatatttttgttcttgtattatgaacctccatgctgcagaatgcaagagcaaatcttattgtcgatggtgttctcattgccagcatgtgtacgcagtagcggttcatgttgttttgagctgttctgttttaataatatctcaaaaggttgccgattggtgcccgtaaggatgacatttcaagaacagatg

SEQ ID NO: 143633 - DNA, 1965 bp, Zea Mays
aagccattaaacaaacacaaatagcacacacgggcacacggcaggcctacaactacaagaggagaggagaagagagaggagaattttcaatgctgccgcgcaccgtcatcactagctagtggaggggcggacgagaaggcgaggagctgaggggagagaggcttcacagagcttgcttgagcctggagggggctgccgctgtttgtctctccactccacccaccagcagttacctcgggagggcatggcaaaatctggtgcctcctttccggagtccagttggatggagagggatttcctggccgcgatcggcaaggagcagcagcacccgcacaaggaggaggcaggcgcggaggaatctgcttacttcggcggagcaggagcagcagcagcagccccggcaatggactggtccttcgctagcaagcccggcgccgccccggcgttgatgtcgttccggtcagcttcgttcccccagttctcctccttcgacggcgccaagaacccggcccctcgtatcctcacgcaccagaggtcgttcggccccgacagcacgcactacgccgccgcgcaccgcacgcagcatgcgctgaacggggctagagtcactccggtctcgtcgccgttcaaccagaacagtccgatgttcagggtccagagctcgcctagccttccgaacggtactgcgttcaagcagccgccttttgccatcaacaacaacgctgcggccagttctactgttggtttctatggaacaagggatgtggtgaggccaaagacagcacaattgacgatcttctatgctggttctgtcaacgtattcgacaacgtctcagctgagaaggctcaggagctcatgctcttagccagcagagggtctcttccaagctcagcccccgtggcccgtaagccagaagctcctattctcgctccagcaaaagtcacagcgcctgaggttttgcatgcaacacagatgctgtttcaaaaaccacaacacgtttctccaccttcgtctgccatctccaaaccaatccctggcatcttgcaagctgcaagtctccccaggagcgcctcgagctctaaccttgactccccatttccaaaatcttcagtgccatttcctgtttctcctgtaagtcaggctccgagagctcagcctgcaaccattgccgctacaactgcagcagcaataatgcctagagctgtccctcaagctagaaaggcgtcccttgctcgattcttggagaaaagaaaggaaagggtgacaactgctgcaccttacccatcagccaagagcccgatggagagcagtgacacgtttggcagtgggagcgccaacgacaagtcatcatgcacagacattgccctctcaagcaaccatgaggagtccctatgtttagggcagcccaggaacatcagcttcatccaagagtcccccagtacaaaactacagatctgatctgaatatctgatcatgcccaatgttcatagatttgtccaggctgactgatgcaaggaccatacgatacttttgcattcaggcaaggactcgagaggaagagattacgtatgttatcggtgccgctagctgttgtttatgatgatgttttgttgtgctagtttactgtgatgctggtggtgcccccacctaactaacaagagagctgtcacttgcagactcttgatttttttttgtcctagcgccatttctttagcggtatcaagtcaatttatataggcttacaaattctgcgccttttgtatggccaaagtgtaatatttttgttcttgtattatgaacctccatgctgcagaatgcaagagcaaatcttattgtcgatggtgttctcattgccagcatgtgtacgcagtagcggttcatgttgttttgagctgttctgttttaataatatctcaaaaggttgccgattggtgcccgtaaggatgacatttcaagaacagatg

SEQ ID NO: 143634 - DNA, 261 bp, Zea Mays
tgttgctcgaagtttccggtccgctcctggcattggtcgtaacttatgctaagtaacatgaatatcatttttgcatgcacggtttttcaagtttcgagtgacctgcagttcaaatctgaatttttcgaagaaattcaaataaacgaactaaatctactaacgattgaaaacacttttagaattgtctaaaaatggtacatgtaggtctatatagtgtagaaacacaccacaaaaattttggttgggaaaataaaaaaaata

SEQ ID NO: 143635 - DNA, 126 bp, Zea Mays
cacacaaaatattattctcttctcttttattatctaaaatttgggtattactatctatgttctcgaatatttgttgtcggctagttaatttttaaactaaagtacgacaaataaaaaataacggag

SEQ ID NO: 143636 - DNA, 474 bp, Zea Mays
ttttaacatattattcatcctaatacattgatgaagtataaaacaataaaatttcaggacgatgatgaagacaatagagacgtcgaaatagatggtgaattgggtgaaaggaataacaaggaaattcaagatgtatctaatatacttgaagggggtgtggacaatgttcaaatacctataccaatacgttcatttgaagaggatcacgcgaatatgaatgagagtggtgaccatgaacaaaatgatcatgtcagaaagaaactggattttgcagtcgatgggataagcttggcaagaccaaataactcaaaacccaaaggaagaacaataaaggggagtgaacaaaaggttattaaattgggagcaaaaggtacaaagaaaatgaacaggaaatgccagaagtgtggaattgctgatggtcacaacagtaggacatgtttgtcattggaggagaatagattacagttgggctag

SEQ ID NO: 143637 - DNA, 1195 bp, Zea Mays
atggaagttacaattgatccgaggttggtacctaaagttggtatgacattcagtggtgtggatgaagcatatcaattttatagtaggtatgcatatgaagttggcttcccattgaaaaagtatagggaactgaaaaattgtaagtggttgaattgctcgatggaaggaaagagtgtagtaaggggaatatcaaacccaaagaaggatatagaaaagaatcaattacaatgcaacaagacgcatgatcctgaatacatggagttcataagttcaatgcaggagagtcgaatcccgcaacattgtattatggattatgtttcagaaatgcacggtagtcctgagagtgtgcctgtaacagcacaggacatgtataacctgaaaaaggcaaagcaacgagagagaaatgcaaatgatgtgacaaagctactatctttttttgcatcatgcaaaaaggataatccacaatttttctctgacttccaattggataaagaaggaaagattttgagcatattttggtcacatgcaagccagcaaggggactacatggattttggtgatgcagttacatttgacacaacacataagactaatctgtatgaaaaaccactaggtatgtttgttggttcgaatcaccacctccattgcaccatatttgctttcgcattatttggggatgaaactgttgatacatttgaatgggcattcaacgccttcaaaacatgcatgggaatcaaagggccacgagtgatgctgccagatcaagatcctgcaatgccagtagcactcgagagggttttcccacacacaatacatcggttgtgtctatggcatgtgcaaaataggtatatgccttttctaaacgagttgtatgcaaggtttgagtaaatggactttaagacaaggttccaatctataatacatcatcctttgactgagttggagtttgagactacatggtcaatgctacttgaagatttccatctgcacgataacattactctcaataagttgtatggaatacgtaaggattaggtgcctgcctttttcaagaatcattattgtgggctaatgttatctacatagcgaaagcatgaacaagcttgtgaaaagtgcacatgtcgatgcaaacactccgcttcatcaattcgccaagcaaatgatgaagcttctacacagtagaaagatgaaagag

SEQ ID NO: 143638 - DNA, 2712 bp, Zea Mays
atggcttccgaatcccgacgcgtgagaaacgctagaggcccattttggttcccatgccactaccgggctttgacagtgcaccagcccgtgcagtcgagcaaggtattgcggcccgccatacagtcagctgcttctccactgctgctgctctcgcctttattgctacttcgttcttcctcgtttgcttcgtccccgcggcgacaacatccaccaccaagtcgtccactccgcgtgaacgcatccacgctccaatctcatctgttcgcggccgcctacgcttcctccgcctccagcgccatgatgaaggacaagatgaagggtttcatgaagaagatcacctcctccggctctgggaccccgtcctcattcaagggcacctcccacgtcctcggctccggcccctccccctcctcctcctcctcccaccccgcttcccgcccctcagaccctagcgcaaaccccaagcctgcccctaagcggccctcgccacctcccccgcccacttcaaccaccgatttcaccccgtacacgcccctcgtctcctcctcctcctcctcctcccgccgctccgtcgcgaatggcaccgcggccgccgccactatcgcgtgccccagctgcgaagacgcgttcccttccgagcttgccgtcaccgagcacctcgacggctgcctcgcgtccgcggggggcgcccgcgcgcgcgccgccgcgtacctcgctgccgacccacccccgccgcccgctgccgttgaagtggtcaaacgcctgctgggcaacctgctccgggagcccagcaacgacaagttcaggcgggtgaggctgggcaacccgcggatcaaggaggccgtggcggacagagaaggcggcgcggagctcctggaggccgtcgggttcagggtcggggatgagggcggggagcccttcgccgtgatggacgaagtgcccagcgacgccaggctcaacggtatcaggagggccctcctcctgctcgagggggcacactcctctgcggctccagggaaggtggaggctgaggccaaggagagttgcagcaatgtgcctgatgtgctgcaggacggtgctatgacaattgatcggcagattcgagtatttgtctctgttcccgggagttctgtgccacaaaatgatgtaccagattccttttacaagcttagtggtgaggagataaggaatgaagcaaagatgaggagggaaaggttagaacaatctaggttgctgataccaaagtcttacaaggagaagcacgcattggctgctcgacagaagtataaacaagcagtcatacgagttcagtttccagatagaatgattcttcagggcatattcctaccaggggaggccaccggttcgctgtatgagttcgtcacatctgctctgaagcaacaaggtttggaattcgaactcatctctccagccattcctaagccacgtgtggtgccacattttccaaacccgggagagcgggcacgcaccctacaagaggaggacctagtcccttccgcgctcctcaagttcattcccaaggagactgattccgtggttttcaccggtttgcttgatgagcttctcgaggccagtgagccgctacctgctgcatcacaatgaaccttaaaccgtttgagttgcagttcattggtaggctgctgggttttttttttttgaaccatatagacgatttcgtttttttccctaccgagcttctcttgatacaaactattgtgcaattaggcatcccatttaatcataacgcaattgaactacccaaattcatgaaaaattcttttaaaaataaaattttagatgaattttattatttactctaccgatacatcaaattttaatttatcatatgttaagagaaaaaaagaaaaaatataccattttaaagatttttattgaattataacttcaaatttatatattggtaaagtaaataatgaagtacaatctataaatttattttttaaagattttttaatgaaatttgggtaatttgattgtatggcgattgttcactgcagttttgtcctggttcttttacataggaattatagataacgatacatacgtgcattggctgacatcttgttaaaaagctactcaagaatttgttaggcccaaattgaactggatctgaagtgggctgggctagactgtaaaacttcaatgatttcttgattatgctgttgtggattcttaccgatttttccaaaggcccattttatgaactgtttatttttctctcacatatctactgaatgcagaaaaagtgttgcttcgtctgcaacagcagttttcgtccgacgtgacgattttacgcacgtcgcacatcttctccccgatgacgtgtaagaagttggcatgttagtatccaactatctatttgcatctttcttgtcgaagctaagtaggttggtctgctcctccgatcatctgggttagagtttagataattgtagatgactgagttttagtttaggacactaggttaaggtatagtggatttggatggaagtagagcccaattcaactaactaatctatattttactatgcattagtaagatgtcattatggacataattctacaatgcgtcacactcaatcaaagaagcaaaacaaacattggtcataataacaatcaggtgagcaaacaaagaagcaaaacaaacattggtcataataacaatcaggt

SEQ ID NO: 143639 - DNA, 1872 bp, Zea Mays
atggcttccgaatcccgacgcgtgagaaacgctagaggcccattttggttcccatgccactaccgggctttgacagtgcaccagcccgtgcagtcgagcaaggtattgcggcccgccatacagtcagctgcttctccactgctgctgctctcgcctttattgctacttcgttcttcctcgtttgcttcgtccccgcggcgacaacatccaccaccaagtcgtccactccgcgtgaacgcatccacgctccaatctcatctgttcgcggccgcctacgcttcctccgcctccagcgccatgatgaaggacaagatgaagggtttcatgaagaagatcacctcctccggctctgggaccccgtcctcattcaagggcacctcccacgtcctcggctccggcccctccccctcctcctcctcctcccaccccgcttcccgcccctcagaccctagcgcaaaccccaagcctgcccctaagcggccctcgccacctcccccgcccacttcaaccaccgatttcaccccgtacacgcccctcgtctcctcctcctcctcctcctcccgccgctccgtcgcgaatggcaccgcggccgccgccactatcgcgtgccccagctgcgaagacgcgttcccttccgagcttgccgtcaccgagcacctcgacggctgcctcgcgtccgcggggggcgcccgcgcgcgcgccgccgcgtacctcgctgccgacccacccccgccgcccgctgccgttgaagtggtcaaacgcctgctgggcaacctgctccgggagcccagcaacgacaagttcaggcgggtgaggctgggcaacccgcggatcaaggaggccgtggcggacagagaaggcggcgcggagctcctggaggccgtcgggttcagggtcggggatgagggcggggagcccttcgccgtgatggacgaagtgcccagcgacgccaggctcaacggtatcaggagggccctcctcctgctcgagggggcacactcctctgcggctccagggaaggtggaggctgaggccaaggagagttgcagcaatgtgcctgatgtgctgcaggacggtgctatgacaattgatcggcagattcgagtatttgtctctgttcccgggagttctgtgccacaaaatgatgtaccagattccttttacaagcttagtggtgaggagataaggaatgaagcaaagatgaggagggaaaggttagaacaatctaggttgctgataccaaagtcttacaaggagaagcacgcattggctgctcgacagaagtataaacaagcagtcatacgagttcagtttccagatagaatgattcttcagggcatattcctaccaggggaggccaccggttcgctgtatgagttcgtcacatctgctctgaagcaacaaggtttggaattcgaactcatctctccagccattcctaagccacgtgtggtgccacattttccaaacccgggagagcgggcacgcaccctacaagaggaggacctagtcccttccgcgctcctcaagttcattcccaaggagactgattccgtggttttcaccggtttgcttgatgagcttctcgaggccagtgagccgctacctgctgcatcacaatgaaccttaaaccgtttgagttgcagttcattggtaggctgctgggttttttttttttgaaccatatagacgatttcgtttttttccctaccgagcttctcttgatacaaactattgtgcaattaggcatcccatttaatcataacgcaattgaactacccaaattcatgaaaaattcttttaaaaataaaattttagatgaattttattatttactctaccgatacatcaaattttaatttatcatatgtt

SEQ ID NO: 143640 - DNA, 1705 bp, Zea Mays
ctcaagctcgttaggcccacaagcagttgcagtgccgccgctcctctcgtcttccccgtggccttaactttacggcttcaccgaccgaaaacccccatttcctcttctccaaaccccactcaccgcaacgagccgccggatccatggccggcaaagacggctccgtcccttccccgcctcctccccggctcccatcctaccctgagatgatcgtggaggcaatccgggcgctgggactcgagaacggctgcaacaagactgcgatctcggactacatcaagggcagctacggctccaacctccctgcccagcacaacgccgtcctcacgggccacctcgcccgcatgaaggctaccggtgagctcgccttcctcaggaacaactatctcctccccaacgaggacgaagcctccccgctgagcaccggtgggcacaagggccccgccgccgccgaggagtctactggcgtgttggacgttggtgacgatgtgttgcttgcttcccctctcgtcatcgacgctgacgccgtcgacattgacgtgcctgctccagctcccgttgtcaccgctgatgtcgacgacattgacgtgcttgctccagctcccgttgtcagcgctgatgtcaaccctgttcataccaagcggggacgcggacggcccccgaagcccaaggaccccgttgctgagggctacggtggtaagcccgctacagctcccgtcgccgccgctgccgtgcctgtcaagcgcgggcgcggacgtccgccgaaacccaagaaccccgtcgccgaggactcagctcccactgcgtcttccgtcgtcaccactgatggcaatgccgtgcctgtgaagcgtgggcgcggacgccccccaaagctcaaggaccccatcaatgtggccactgaccaggccaccagcggcatgctcagcccacgtggccgtgggcgcccgcccaagaaggccaaggtcgccgtggaagatcccagaggtgaacctgctgcagctcgagacgttgttgttgatgccagtgctgtacatgtcaagcgtgggcgtggacggcccccaagatgagtcctgctcctgcagctgcagtgactgggaagccgtctgagtcttaaaccatgaaaattgaatcctatggtggtaatggtttgggagtagcttggtgtatcaaattgagttctgaactatcttatccagttgggtgcatagcatcggaagactaatctcaataatcgagaaatttgctgttttgccactctcaaatttggctgcttgttattatgccatctcgtgtctatgactggtgggaccgtctgtgtctatgatttgtgggtccgatggcatactggcgaagcccacaaatgataatggcaaaattgccaatggctcctcaataatctggatggtttctgtacattgaatggcggatgatgcgtaatagttgactgctgctgaagacttgacttaatcattgctattttcttctcattgttgcgtgttaattccatcttagcattatccgtcaactatttgagttgttacttgcacctctgtatggaattcgtttatcttttcatcatcaaggtatacatgttatctacttatcttaagggtggtttataggaattgcttagagcttatctgttatgtgtcagatggatgttgacttaaattttttaatgtaaataaacattattttctaagtt

SEQ ID NO: 143641 - DNA, 5767 bp, Zea Mays
ctgtcctgtatctctcgcaaatctcccacccgccccacataataagaaccgccgccgccgccgccgccgccgctcttctccaacctccgtctctccgagcatgcactctgcgttctcgtcctgccgtcctactcgctacgcggcgcggctctgaattggcatctcccgaccccgcctctcgcgcgccgtccccccgtccccgcacctgccgaagctgaaccccggtcccggcggcattgcgcgcgcgctctctctttctctctctcgctggaggcgggaccgcgggagagccgtctcactcagcggcgccgcgggccgctggccctgccgcacccgcgcagggtggttggtcccgtgtcgggtgtggtgaggcgctgacttggacgggacgcaatcagcggacgaaggaagcttcgggcgtggccgcgtcgcttcgcctcgtctcctgctacttgttcggaacttctccatctttccccacagttggttttgatcttagcgtgccgtatcgccctatcggggatggggttgctggagttcgcggtgggtaaggccagatcccttgccgccgccactgacctggagcagcggcacgtgcacaagggcgagctcgcgcggatcgagacgcggcggtgccaggaggcgggccatggcgtgaccacgcccaaggcccaggggccggcttcgcccgtcgggccgcccacgcccccgcgccgcctgaccgaggcgagatctggaggccaagccgatgccggcccgcgctctcatcctcccggctgtgatactaggcgagtggatgaggaggctgctgacgagtcaggggcccagtttgcagcctctgtgactgacttcttacatgacttctcagataccgaatctagtgttagtaactccatgtacagatcaatgaccccaagccccacagggagtcctacttgtgtggtgaggctggatgatgcttcagatcatgatgcaacaacattgactgactcagacgatgcacgtgagctagtcagcgctgctagcatctctggtgaaggagaactcgtcaatggatcaccacatatcgttgattttggtgatgctatttggtgcccaccaccaccagaagatgagagagatgatgttgaatcgaggatatttggatctgatgacgacgacgacgatgctttcttagaacctagttgtttcggtgataataaaatagccagtgggtacggtgcctttggtgcatctcaacaagatggtgttcagaatgatttgctgaagcactttcgggctctagttgcacagttactggaggcggaaggcattagtttttccagtgacgacaattcaaaaagttggcttgagatagtgtcctcgttggcatggcaagctgctaactatgtgaaacccgataccaagaaaggtggcagcatggatcctagtgattacgtgaagattaaatgcatagcatctgggaagccaactgatagcaattttgttagaggaattgtttgctctaagaatgtaagacacaaacggatggtctcagaacacaggagtgccaaattgctcattttaggaggtgcacttgagtatcaaaaagtttcaaataaattggcatccatagggactatactcgaacaggaaaaggagtatcttaaaactgttgtgagcaagatcgagtctaggcatcctaatgtccttctagttgagaaaagcgcctcatcttttgctcaggagctcttagcaaaagatatttctttagttttgaatgtgaagagacctcttttgaacagaatatcaagatgcacaggtggtcagattgcctcatcaattgacaacattgcctcagctaggcttggacaatgtgacttgttcaaggtggagaaagtcccagaacccttattagctgaacatggagaaaaggggtcaattaagactctgatgttctttgaaggctgtgtgaagcacttgggttgcacggttctgttgaggggaacatgtcgggaagatttaaagaagattaagcgtgcaatgcaacttgctgtttttgctgcttatcacctctccttggagacatcattccttgctgatgagggagcaacacttccgaaagttccttcaatatctgtgacaggtgcaccaaatatttctgctagtcctactgatcatggcacttctgatagtcttaaaaatgctgaagagacatatccacaaaattctactatcagccagatttttgaggttatctctgcatcttcaactttattaccactcgctggagtaagccaaggaatcatgcctgaatgtagagcatcaaaatttctagttgatcctctcaactctcaagatccgtcgaacttatgccatccaaatgtttcctgcaatggtgatttaatatctccatgttctgtcagtggttttagagcaacatatgttggcacacaacatggtggttcaaacaagtctttgcaatcttcaattgctgctgatgtctggcgtgatggtgcattaactttgaaacatagccaaccatgtcattcagaaaaccatagtagcaaccctgctgcagggaatacagatgacaaagacaagctttcagctggttacttatctggtactgacaacaatcagagtatcttagtttccctctcaagcacctgcattcccaaaagctttgcatgccagcgttctcatctcgttcggatcaagttttatggtagttttgataagccattagggaggtatcttcgtgaggacttatttgatcaggcatattgctgcccatcttgtaaggagccttcagaatcacatgtgaggtgctatatgcaccaacatggcagcctaacgattagtgtcaggcgccttcagtctcaaaagttgccaggtgaacatgatgggaggatatggatgtggcacagatgcatgaggtgcaagcttaaggatggaatgccaccagcaacacacagagtaatcatgtctgatgcagcttggggcttatcatttggcaagttcctggagctcagcttttcgaaccatatgactgctaacaggattgcaagttgtggccattctctccaaagggattgtcttcgcttttatgggtatggaaatatggcggccgccttccactatagtcccatgattactctgtctgttaaccttccgcccccagtgctagatttcaatactcatgctacacaagattgggtgaaaagagaggctgttgaggtatttcacacaatggacttgctgcacactgaggtatatgatgcacttaacaatcttgagaagagtatcattactgatgatgattcaaccaagacaagcatacagaggcaaatagttgagatgaaagatttgcttaatgtcgaaagaaatgagtatgaggttttgcttcttccagttataatggggagttctcattcattcaaaccaaatattgatattttggagcttaatcgtgttagacgtagtctcctcctagatgctcacacttgggaccgcaggttgtgcggcatagattcactcgaagcagatagccatatttccagaactgatccgtttaatctagagaaaacccaaggaatcaatgaagggagatctgatttgcttcagactgttaggaaacacggaggaacatatgaagaaccatgtccccaacactcttcagaaagcccaaggaaatctctcttgtctacagagggccatctgaatgataaaaaatatgtcatggttgagacagatttgccggttgggctagtggatggtgatgcaggtcttgatttgatcttcaacaaattgaatacatgtgaagaaggacgttgtctatcaaaatatcctagcaagacaggaccagtagagaggttaccttcacttgcatctattttagctgacaaaatagatatggcatggtctggatttggtgaattagactacaatcttccacatggtttgagcaaagcaaatgaaaatacatctttgaacttgtttggcaatccaagttacaagaaggctactggtccagtccgaatccattcatttgatactgtgttgagattacatcagcgagaacaaactggagtaatacctgcttcactccattcagcactgaaatcaattgattcctttagagacttgacaagccttgttaaggatccaatgacaaacatgcggagagccttttctcaaatatctcccaggacaagaggaaacttaaatactgttcttacacgtgctcccaagtatatcacatcagcttctcgtatggtgaatgatggggctcgactgcttctgcccaatattagctgtgaaggttctgtttttgtcactgtctatgatgacgagccaaccagtgtagtgtcatatgctatgacatcacaagaatatgctgaacatgtcacacataaaatgaatgcaaatactagcttttcagattttactagtagtaatggacttgatggatctctgtcctcacatgaagagctttcaaattttagaggagctcacttcagattatccttcgatgatgatgcatctcctactgatagtacaaagttttctgtcacttgctattttgcaaggcagtttgctgcacttagaaagaaatgttgtccaagtaatagtgattacatacgctcgataagtcgttgtaagcgatggagcgcgcaaggtggaaaaagcaatgtttactttgcaaagacaatggatgagagattcataattaaacaagtcaccaagacagagctggactcttttgtagaatttgctcctcattacttcaggcacttgacagaatcattgacttctagaagccctacttgcctggccaaaatattggggctttatcaggttagtatcaagaattcaaaaggtgggcgtgaggtgaagatggatctgatggtgatggagaacatactcttccaaagatcaatatctagggtgtatgatctgaagggttctgtgcgttcacgttataattctgatgcttctggtcacaacaaagttcttctagactctaatctcatagaagcactacatacaaagcctatttttttggggagtaaggcaaaacaaagattggaaagagctgtctggaatgatacatcatttcttgcgtctttggatgtcatggactactcccttttggtcggtgtcgacgaagagaaaaaagagctggtggttggcatcatcgatttcctgcggcagtacacctgggacaagcagctggagacatgggtgaaggcatcggggatcttagggggccccaagaatgagtctcccaccgtgatttctccaatccagtacaaaaagaggttcaggaaggccatgtcgaggtacttcctcgccgtccccgaccaatggacctcgaaaggtggttaaatcttctcgctgtttttagctgcattttttttgtcagcgaaagcatcactcgttcatccttggcaaattttgagcgaaagggtgacagacggctaggtattctttatttgcctgttgcttccgttttttataccaacaggtgacatgcaatagcttagagcagatgtgagaggacctctgacctggtggatggactgtgacattaagcatgatcattgcagtgtccggtcacatcttgagcgcttgatccaatgtaaatttgacggcgagccacggcgggttatttgacgccgagttgcgccgtactgaggaattgtattagaggattggaacactgatgttaattaatagacatgtaacagcgctctcaacacagttgctttagcgtgaatgtgtg

SEQ ID NO: 143642 - DNA, 1189 bp, Zea Mays
gcaacacccgaaggcctgcgggcgcgcggcgtgcggccacgccaccgcgccatgggcaacgctctggcgggcaggcggcgcgcggccaaggtgatgacggtggacggcgccacgttccgctacaagacccccgcggcggcgtgcgcggcgctgcgcggccacccgggccaccagctcctggagtcggaggaggtgcggcggctgggcgtgcgcgcgcgcccgctggaccgcgacgcgccgctcaagcccgggaagctctacttcctggtgcagatcccccgcggcggcgccggggacggcgacgacccgcgcgcgccgcgcaagacgtggtcgggcgcgctgcgcgtgggcgcccgcgagcgcctggagggcctgatgctgtcccggcgcaccgtctcggacgtgtcgtccatcctgccgccgcccgccgccgcgcgcctcgccgccgcgtcgccgtcgccgtcgccgccgtcgtccgtggaggtgggcgccgacggcgcggtgcggctgcgcatgcgcctgcccaaggccgacgtggcgcggctgatgcaggagagccgggaccccgccgaggccgccgagcggatcatgcagctgtgcgtggccagggaccagggcgtcgtcgcagcgccgccgccctccgcgctgatgtccggcaagaacccggcgccggcggcggctccagcgccggcgttgaagaaagagaagcgaacaaggttcaaggcagtcccagacgagatcatcggatgacaagcggaagccttgagatcgagtactcctgttttttttttctctctcttcccctgcttgatcgcttgttcatcggcaagatgcatgggttgctggggttatctggaacatgagaagccgctctggcttcctatctaatctccccagcaattctcatcgcgtcctaagtcttaggccagtcgccatctacgtacttcagtcttcgttctctgttttcataggtatggaaacgtagcagtatagcactgtagtagttaattaggaaagcaaaaaaaatgacgaagaaaaatatgctagcaatatgtaccgtactggtgtgatatacatggggcatgtacagccaccttgatcagagggtcagtgtgaatgaaacactgaatcagaatgtatatattctatgtttgtatatttataactagccacgtttctttctcagttt

SEQ ID NO: 143643 - DNA, 1716 bp, Zea Mays
tatatagcccacagaaccgagcgcaaatctgcattgcccgccgccgccgccgctagctggacggtatcaccggcccccaaatctttctgactctctcctccttcaatggcgttcgtgacgctcatggcgttggcgtcccctgtcctgctactgctcctgagggcggcatgggtcgccctgtcctgctacatcctgacgccgctgagaatccgccggatcatggcccggcagggcgtgcacgggcccccgccgcgcccgctcatcggcaacctccgcgacgtgtcggcgctcatggcgcaggccaccgccgacgacatgccggccctgagccacgacatcgtcggccgcctcatgccgcactacgtgctctggtccaggacgtacgggaagctgttcgtgtactggtacgggagcgagccgcgcctgtgcctgacggacgcggcgcagatcaaggagttcctctcgtccaagtacgcggcgaacgccacgggcaagtcgtggctgcagcgccagggcaccaggcacttcatcggccggggagtcctcatggccaacggcgcgcactggtcgcaccagcgccacgtcgtcgcgccggcgttcatgcccgacaagctgaagggacgcgtgggtcacatggtggagtgcacgaagcagacgatccgggcgcttcaggatgcagcgtcggcgccgtcgtctggcggcgggcggcgtcgcgaggtggagatctgcgggtacatgactcggctcacgggcgacatcatctcgcgcaccgagttcgacacgagctatgataccggaaagctcatcttccatctcctcgaggacctgcagcgcctcaccgcgagctccagccgccacctctggatccccggcagccagtacttcccgagcaagtacagaagagagatcaggcggctgaacggtgagctggaggccgtgctgacggagtccatcgggcggcgccgggagatcgccgacgagggccgcacgacgtcggcctacggccggggcctgctggccatgctgctggccgagatggaaaagaagaaggacgtggcggcggcggagcggttcagctacgacctgcagctggttatcgacgagtgcaagacgttcttcttcgcggggcacgacacgtcggcgctgctgctcacctgggcgctgatgctgctcgccacgcacccggagtggcaggacagggcccgggccgaggtcgcccgagtctgcggcgaagacccgccgtcgtacgacgacctctccaagctcaccgtgctgcagatgatcatccacgagacgctgcggctgtacccgccggcgacgctgctgccccggatggtgttcgaggacatccacctaaccggcggcctccacctgccgcgcgggctgtcggtgtggatcccggtgctggccatccaccacgacgtgtccatctggggccccgacgcgcacgagttcaagccggagcggttcgctgcgggccggcgcccggcgttccttccgttcgcggcgggcccgcgcaactgtgtcgggcaggcgtacgcgctcgtcgaggctaaggtcgtgctcgccatgctgctgtcccacttccgcatcgccatctccgatgactaccgccacgcgccggtgaacgtgctcaccctccgccccaagcacggcgtgcccgtccacctccggccgctgcggccgtgagcgacaaggctgaagactcccctcctc

SEQ ID NO: 143644 - DNA, 2607 bp, Zea Mays
atgagatgtgaggcgaggaggggagaggcttctccggtcggtggcgcgggtgcgtgggttcgagggaggggggcagtgccggagcgccggttgatcggcctgcttggcggtggtgccatggctatggaggatgcggtggcggaggcggaccttgcggacccgaacccggacgtgggggacctgttccaccactacgacagcctctacttccagggcgcgctggctgccgccggcttcaccgtccagtggacctcctcgttgccgtttgccagaaggtcttttggatcttgctccttttcaaaacaacaaaataccattatactctcggagtcatttctgaagtatcgctcatgtactgaccggaagaatgcattgcttcattatatgatccacgcaatcatatacgtgaagcatcacaagaaggacagcaatcatggccctgcttttcgtgcttggatggatgccattaactcatgctgtgtagaagatcaccagggaagaaggtcgcggccgcaggggaggggtgccaccggtggacagcgcgactgggccatgtgcgtcatgagggaaagtgacggcagaggtagccctgggcgcatagggggtgatggcagaccgcacaggggagagggaccgtcgagggagttgtcgtcgtcgcggaagtggagtgacccgctggcacgtagagggaggctgtcgcggctagggatgcacgagggcggcacaggaaggcagcagggcacccccacagagccaccgggaggggggttggggctaggagtggcgagcaggtggggggcgctgacggtggacagcgcggctgtgccacgcgcgttgtgtgcgaaggcgtcgacgagaccaaatggtgggtacaatatcaccacccgccatgatttcatcccagaagagccccgtagcttgaagggtattgtatggaagtgtaggtcttgtggtgatacacttctgaggttcacaaaccagggtcctccatctgatgcctgctgcattgagaacgatgacatcaatgcatcctgtgggaacatgctttgttattggcacaaccacaagaatgactgttctggtacatatgaaaaaacgatgaagttagaagcaccatctcaaaagaaagttgcaggaggtgctcagttgcttctgactttgccatcagaaatgtccaacattcaagaatccagttcatctatattgcagttagagtggagtactaaatccacagaaccaaatgctgaagacaagcatctttgtctagggagtggcagcaatgggaaacctcagggaagtagctcctcgaagaaagcaggtaagaggaacagtcctgaaatggttggggaaacaagtgttctgcctgctgcggcccaaggaaaacccaatcaaaaccatggattggttgcgatggcgaagcaagcgcctgcgtctgtggaaggctacagtgatgcagaatcaccggggagacatacatcaaagaaagctggcaagcgacataagcctgatgatcttcagaaaagcagtgttctcccttctgtaccccagggaacaacaaaaccaaagcatgcgttggttgcgacagagaataaccctctctcctcagcagagcgccgcaacgatgcaaaatcgccaaaaaccaatacctcgaagaaaccaggagactggcatgagctccagattgctcagaaagcctgttctcagccagctgaccctcacaaaaaactgaagcaagacctgggtgcaccggaaaagaaagaagttttctctttgatgggccccagcaatgagaagttactgggcaggagctcctcaaagaaggcaagcaggcagcatgaccgcgaagacattcaggaaaaaaacaccatcctgccaactgcccctggaatcagacccaaagcatcagcctttgctgcaccagagaagcggcgaaagggaaaatgcaaaaggaagcctgtggaggaaaaggagtacgctgtgatgagtgcgtggctgaactactacgaatcagacaggtcaagtggatcgcccgagccccttgtaaacaaaagaacagagcgaaggagaagagaaagggcaagaattctgacttattcacgatcaaagaagaacaaaactgagccattggccagctccgggacacatgcctctgtcagtagccacaaaatcgagatggcaccgcaagaccatgcagttgttactactggtaaccaggtggcggtggctccagcaactgtacatcaggcgcagccatctgctgattctgctccatgcctggatcttgttccatttcttcagccagcagatccattgacttctccagatcaaagcactgcccgagacatgatagtgatttctgatgacgactgacccttttcgatgatgatatcctctatcacattttggatggttgccgggctaattcagtggatgtggcgagtatgccatactatattagaagtgacatgctgtgcttgttcttactatagagtagtgtctgagggccccaccgaagtcccttaaactctttcgcgaacatgacgcgagaatgcaggtgctgcagcttgaacttgatttcttgaacaaaattcttggagttcagtactc

SEQ ID NO: 143645 - DNA, 1763 bp, Zea Mays
ggccgccttcacggcttcacctaacgatctggttcgtctcccacctcgcgccgctcgccggattccgccgccctgcccgcgttctcctagacccaacccaaccgagtcctgaaaggggggtcatttgttcagtgatcatcaaccagtgcaccatggcgtctctgattcctccctgcctctccgtccccaccgccccgggacgcgcgcgccttgctgctccgggggcgccgcggcggaggaggatggcggtggtgagggcgaagattcgggagatattcatgccggcgctgagctcaacgatgatggagggcaagatcgtctcctggacggccgccgagggggaccgcgtgggcaagggcgacccagtggtggtcgtggagtccgacaaggccgatatggatgtggagacgttccacgatggcatagtcgcagtcgtcctcgtcccggccggtgggaccgcccccgtaggcgcccctatcgccctcctcgctgaatcagaggaggaggtcgcgctggcgcgggcgcgcgctcaggccctctcgcagggacaaagccaggcaccctctcctccccatgccgccgccgccctggggccacctcctccagcgcctgtggcgcctccagcgacaaagggcatcgcgacaccttacgccaagaaactcgcgaagcagcacagggtggacatcgccggggttgtcggcaccgggccacacggccgcgtcacggcggctgacgtcgaggcagctgctggcatcaagcacaagcgaccccctccacctccaccccctgcttctgttgacgctgcgccactagtgcccgcaagtgcggtgctgccaccagtacccggtggcacggtggtgccgttcacgacaatgcaggcggcggtgagcaagaacatggtggagagcttgagggtaccgacattccgggttagctactccatgatcactgacaagcttgacgcactctatgagaaggttaagtcaaagggggttacaaagacagtgctgctggtgaaggcggcagctgtggcgctcacccaacaccctgtagtaaatgctagctgcagagatggaaagagcttctcctacaacaatgatgtcaacattggagtggctgttgcactcgagggtggccttcttactccagtattagaggatgctgataagatggatatatatctgcttgcacgaaagtggagagtgctgctcaagaaggcacgcatgaagcagctgcaaccaaatgaatacaactctgggacgtttacactatccaatttgggtatgtttggggtggataaattcgacgcaatccttcctgctggtcagggggctatcatggctgttggagcgtcaagacctactgtagtggctgataaggatggtttctttagtatcaagagtgaaatgctggtgaatgttactgctgatcacaggattatctatggtgctgatttggcagcattcctgcaaacatttgcaaagattgttgaggatcctgaatgcctcacattgtaagggaagcttcatacaagttctcaatttttttttattcacaattggaagacaatgccaatatagataataaaaagacacttttcaatgttatatctccacatacagatttttgtgtacagtttatacactgatcgttttcgctccgtgtgtttatctattcttggagggagaccctgattcaagaaaccatgaattgtgtaaacactttggggcattaataatgatagaggctgcttcctggttcct

SEQ ID NO: 143646 - DNA, 2140 bp, Zea Mays
cgacccaccgtcagatcacacgcactgctcacgctcgcacatcgcacgttcatggcacggggagtaactggcgacgccgcgggaagtagcgccgccgacgagcgggggaggggggaggccgcgccgccgcagtctgcaacgtggcagcgggtgcggagggccgggcagggggtggcggcgcacgcgctgttgctctgcttcaccgcgctcctcgcgctcaagctcgacggcgtcctctcactctcctggtgggcgcttttcatccctgtatggttgttccatgctgttgcggctcgatgtctattctcattaccggctccatcacctgaaagttgtcaacgggttccattccattccattgtcgcaacaccgttactagttgcctttgagctgcttctctgtgtttatctagaaggcctcaaccacaatggtcatgtggagcctttcatcatagatttaaagcttgtgttccttccactcttggctttggaaatcattacactggttgacaacttcaggatgtgtggtgctttaatgcctggacatggagaaactataaccgaagaagcaatttgggagaggcttccttacttctgggttgcaatttccatggtatttctactagcggctacttcactcatgcttctcaagttatgtggtgatgcagttactctggggtggtgggatttatttattaattttgggatttcccagtgctttgcttttctagtatgcataagatggtcaaatccaatggtcattggaggtcctgtattgataattcctatagtagtttttcaagttctactttgtatgcgcttagagggtactccatctaatgcacgttttatcccaattcgagctatttttctacccataattttgctgcaagtggctgctgtatcttttgctgtttggagattgttcagcaggcttcttactaaacttaaagatggaactattagtcaagcacatatttctgtgtcttccaaagtcgatgagctatttatgatgatacagtgtggttcaaggctccttcactggtggtctattgatgaagatagcaaagaggaacaggctcacttatgctatgcaaataatattggctatagtaccttttgcagttatccaccagaggtggtaaaagagatgccaaaggaagttcttgtcaaagaggtacagagacttcaactggccttggaagagcaaactgaaatggcaaatcatagccaacagcagtgtgataggctaagaaatgaacggatcttgtgtcgaatttgctttgaaagagacatatgcattgttatgcttccctgccgccatcatgttctctgcgagccatgctctaacaagtgtcagtcatgcccaatttgccgattgaccgttgagggcaggctatttgtttatgatgcagtgatgtcatccaatccatcatgttacgcagtttaaaagtgcacatgttgacagtatttgtagggtacctacttctggtgttgacaaagatggcccacacctgtttcctggcagtgaatgacaggttgtgaaattcttggtatgaaattaggaagaaagctaagaaagtcttctattatcagattgcagcacaaacaaaacaaaagccacgatgcacatccgtctccaatgatatgacacagaggaagacgaagtatatggactcttgctcatatatatgcaagcgtgaataaccacttaaataactgagtttgttctctagccatatatgacatctggccagtttcgattagtttgcaaacgagttctggttaacagttggatggataaccttgcaaacatgtggagcttcaggttgtttagaagttatttggagttcagcaaattggcaatatcccactgttcaactttgatgattccatgaattcacacaactgaggtaccaccttttccagtgatgttcacctgtaacggcttataaatacatctgtacagatgcgataataatgtctatcaattttatctccaaggcataagagcattgagctttctcctagtcatgtgaaacactgagatagcttgagcatatctattgtatgcagtggcggaggatgggcaaaaaataaggtgttgctaatgcaaccacacatgaaaattcacaacataa

SEQ ID NO: 143647 - DNA, 584 bp, Zea Mays
ttctggatacattcttgtcatctatatatgcatgagaattcaaagttctccatctgtttccctggcaggccatgctctaacaagtgtcagtcatgcccaatttgccgattgaccgttgagggcaggctatttgtttatgatgcagtgatgtcatccaatccatcatgttacgcagtttaaaagtgcacatgttgacagtatttgtagggtacctacttctggtgttgacaaagatggcccacacctgtttcctggcagtgaatgacaggttgtgaaattcttggtatgaaattaggaagaaagctaagaaagtcttctattatcagattgcagcacaaacaaaacaaaagccacgatgcacatccgtctccaatgatatgacacagaggaagacgaagtatatggactcttgctcatatatatgcaagcgtgaataaccacttaaataactgagtttgttctctagccatatatgacatctggccagtttcgattagtttgcaaacgagttctggttaacagttggatggataaccttgcaaacatgtggagcttcaggttgtttagaagttatttggagttca

SEQ ID NO: 143648 - DNA, 1265 bp, Zea Mays
gcttaactctaggtcagagtacactggtatgttttgacttcttaagtgacagttaaactttatgcaccaggtgatgcagttactctggggtggtgggatttatttattaattttgggatttcccagtgctttgcttttctagtatgcataagatggtcaaatccaatggtcattggaggtcctgtattgataattcctatagtagtttttcaagttctactttgtatgcgcttagagggtactccatctaatgcacgttttatcccaattcgagctatttttctacccataattttgctgcaagtggctgctgtatcttttgctgtttggagattgttcagcaggcttcttactaaacttaaagatggaactattagtcaagcacatatttctgtgtcttccaaagtcgatgagctatttatgatgatacagtgtggttcaaggctccttcactggtggtctattgatgaagatagcaaagaggaacaggctcacttatgctatgcaaataatattggctatagtaccttttgcagttatccaccagaggtggtaaaagagatgccaaaggaagttcttgtcaaagaggtacagagacttcaactggccttggaagagcaaactgaaatggcaaatcatagccaacagcagtgtgataggctaagaaatgaacggatcttgtgtcgaatttgctttgaaagagacatatgcattgttatgcttccctgccgccatcatgttctctgcgagccatgctctaacaagtgtcagtcatgcccaatttgccgattgaccgttgagggcaggctatttgtttatgatgcagtgatgtcatccaatccatcatgttacgcagtttaaaagtgcacatgttgacagtatttgtagggtacctacttctggtgttgacaaagatggcccacacctgtttcctggcagtgaatgacaggttgtgaaattcttggtatgaaattaggaagaaagctaagaaagtcttctattatcagattgcagcacaaacaaaacaaaagccacgatgcacatccgtctccaatgatatgacacagaggaagacgaagtatatggactcttgctcatatatatgcaagcgtgaataaccacttaaataactgagtttgttctctagccatatatgacatctggccagtttcgattagtttgcaaacgagttctggttaacagttggatggataaccttgcaaacatgtggagcttcaggttgtttagaagttatttggagttca

SEQ ID NO: 143649 - DNA, 960 bp, Zea Mays
cccgaaaagccagaaacgagcggggagaaacgagggaacgacccaccgtcagatcacacgcactgctcacgctcgcacatcgcacgttcatggcacggggagtaactggcgacgccgcgggaagtagcgccgccgacgagcgggggaggggggaggccgcgccgccgcagtctgcaacgtggcagcgggtgcggagggccgggcagggggtggcggcgcacgcgctgttgctctgcttcaccgcgctcctcgcgctcaagctcgacggcgtcctctcactctcctggtgggcgcttttcatccctgtatggttgttccatgctgttgcggctcgatgtctattctcattaccggctccatcacctgaaagttgtcaacgggttccattccattccattgtcgcaacaccgttactagttgcctttgagctgcttctctgtgtttatctagaaggcctcaaccacaatggtcatgtggagcctttcatcatagatttaaagcttgtgttccttccactcttggctttggaaatcattacactggttgacaacttcaggatgtgtggtgctttaatgcctggacatggagaaactataaccgaagaagcaatttgggagaggcttccttacttctgggttgcaatttccatggtatttctactagcggctacttcactcatgcttctcaagttatgtggtgatgcagttactctggggtggtgggatttatttattaattttgggatttcccagtgctttgcttttctagtatgcataagatggtcaaatccaatggtcattggaggtcctgtattgataattcctatagtagtttttcaagttctactttgtatgcgcttagaggtctgttcagatccatttctagatgctttgttttcttttaacaaatacaggctgtctatttttctctgctgttatttggacattgataacttgcacc

SEQ ID NO: 143650 - DNA, 1366 bp, Zea Mays
gttccccatcgcgacccttgcaccgggtccacgctgaccctcttcacgggggcggcgaaagatctcagccgcgacgggttcgagcgccggcgagcgctcgcccacctgggcctataaactggccccggctcctcttctcgcgtcgcagagcccagcctcgggatgacgtggcgtatcgcgacaccgccacagctcactcaaccgcgcgggtctccaacgaaccccttgtagaagcttccaaaccctagcgcaggaggaagaggagcgtggaggagctccaggaatggcgaaggcgaggaagcagaagggtgacggtagcggtacgggcggaggcgccaccgttctccaccagaaactctgcctctccatcgacatggagaaccagctgatctacgggtacactgagataaaagctcttctagctgaaaacgacacatttgctctacatgctgacaatatgacgatcaggagcattctggtggatggtgaaactgttgagttcgactattcccctcattggaaaaatgaaactgatcaacctaattggtcttcaatatcatgtttgaacactgttgctgatgctgcatgttcaacatatacttcgtctctaaatcgagaagctacaccaaatcttattgtgtcatctgagagatcaatcaagtcaatgattgagcagcagttagatgaaaacagtgaaaaatatgaagaaaatagtggaaggcttgaaaaacatggtggaaagaccatccaaacttcctatgatcaaattgttaatggctgcaatggttctgcagtggaagagggaatagaaaattctgcagtggaagaagggaaaaaaaaggaaaaggaaaaagagaaggaagagaaaaatggaaatgagaagagcaaggaaaatggaaatgagactgaaaatgaaaaggtgaagaacataaaactggttcacatagattatattttggagaaggctgaaactggcattcactttgttggcaatgtcatgcatagcagtaatcagataaggcgggcacactgttggtttccttgtgttgatactgccacacaacgctgtccatttgacttagaatttacagtcagcacagatttcatcgctgtcagcaacggtgacttgctttaccaggtcttaagtaaggaagatccttcaaaaaaaacctatgtgtataaattgaacactccagttagtgcacagtggatatccttggttgttggtccacttgaaattctccttgacagaaatgacataaatgtgtcacacatctgtttatctcctgccttgtcaaagcttcagaacactattgcatttttccacgatgcatacagctgttatgaagactatcttgctgcaccg

SEQ ID NO: 143651 - DNA, 889 bp, Zea Mays
acggctgccgtggagtaaaccacaacgcaggacaagccatcgccccgatggacaccgccgcctcatgccgcctcctctcgccggcctcctcctctccgcccccctgtccgaagcagctacccaagcggcgaccgaccttcgcggcctcgcagcagcagtcgcccagctccagcgccaagttcaggctcctctgcctcctccatgacaagtccgcgtcgccaacgacgtcggtgcagatgcagagctcacagtcacagttgcagaggctggcgacggtgttgcagtgcggagccgtctgggcagctgttgaggcgccggcggcgctggcggtgaccggcgaggaggacatcgacctgctagggatcctgccgccgctcgcggtgttcgccttcttctacttcctcgtcgctcctccggtgatcatgaactggatgaggctgaggtggtacaagcgcgaattcgtggagacgtacctgcagttcatgttcacctacctcttctacccagcgatgatgttctgggcgccattcgtcaacttcaggaagttcccgagggatcccaccatgaagtacccttggtccaagccgaaggagggcacgccgctgttcaaagacagatacccgcctatagactcctagatacagccttgatgcttgtactcggctcgtcgcgcgccacgggcatgcaggcagcagcgaaaaggccggtttcttcacctaaaaatctgtgtaaaacattactatatatcacacagtctaataatacccgtgctagtacatgggaaaggttactatcactaagattttaccatgatctatagttctatacctcacaacattcatgtaatcatgtccgttaaaaactatgttcaccagtacaaagaagctct

SEQ ID NO: 143652 - DNA, 1992 bp, Zea Mays
gccgggccagaagccagccggcgaaagatgccgagcaatcgcactcgccaccgggctcttgttccgcccaacctgccccggtacatcccatactcccgcgcgctgcagcagcgcctcttcctcgtcgcgcagcacctcagccgctcctcatccccctctgccatccgccgcggcctcgaccaactccacgcacagctcctcctcaacggcttcacccataagcgcttcctcctcgccaagctcctctccctcaccgtcgctgccgccgacctcccccgcgcagagtcactcttcatcctctctgtgcccccttccccagcgtcccccaccctcgccaacctcctccttcgcaccgccgccacgtcaggctccacgcccagcgccctgctcgcgtttctatcccgcctcgtgggctgccacgggctgcgccccaacgcattcaccttctcaaccctcctcgccgcattcgcccccgcgggcgttggggcgctcccccatggccgcgccctccacgcgctcgcgcttgcgagcggagtactcgcccagacaggcgatagtgggcacgtgatgaccagccttgttagtgtgtacgcgtcggcccagcagctcggggacgcccgtaaggcgttcgacgaaatgtcaaccagggcggtggccgcgtggaactgcatgctcgccgcgtacgtgcgatgccgtgaggtggacgccgcactgcggttctttagcgagatgcccaatagcaggagggacgtggtgtcgtggacgacgatgatcggtgggtgcgcgaatgctggtaggccagcagaggcggtggagctgttctggaggatgagaaaggcgagggttaaggatgacgcagtgactatggttgccctgctataaaagcctgtgcggagctgggtgacctagaacttgggcggtgggtgcatgcacgagtggacttggaagggtggcagcggaggactgtgttgctggacaatgctctcatccatatgtatgtgaagtgtggtgctgtggaagatgcacatcgcttgtttgggatgatgccaaggcggagctccgtttcttggactactatgatctcgggtcttgcaatgcatggtcacccccaggaggcgctggacttgttccagagaatgcaggatcggcctgatggtgccacgctgctggcagttctgcgggcatgcagtctggcagggaggattgatgatgcacggtggtactttgaaagtatggaaagagtttacgggataaatccagagatacaacactatggatgcatggttgacatgctctgttgctggagacggttgaatgaagcacttgagcttgtggagaaaatgccattccagccaaacgagggtgcgtggggtgcaatcctgagtggatgtagaagggagggcaaccttgagcttgcagctaaagtgactaatagattagttgaactgcagccagcgcgagcagccgggcacctagtgctgctgtccaacatgtatgcttgcgtaggacagtgggagcaggctcagatggtgagggaaagagtggctgcactgaatgctgagaaacctgctggcagaagctgggtgaatcagaatgagtccagcatggtggtagcacatgctcaactggttgattcgtgactcaaaagcaaaaggctttcacaagactatgtatagtgtatattgccaaacttaagagtagaactgcaattatttgttgtcaggtgttaagccttgacattttcctcagagcactggcatagatgcaattggatcagtcttcaacaaatcttcaccaccttcagattgcctgttatactgatgccctcttgttccttcgcaggttaacaacacgtatccgttgtttttcattcttctgtagaacttacagggtagaattggtagaaacagttatactcccaatgtcccaatttataatttgtttgactggctcgtcttatttaattttttgcataaaaatgaaaaattcaaa

SEQ ID NO: 143653 - DNA, 1521 bp, Zea Mays
atgccgagcaatcgcactcgccaccgggctcttgttccgcccaacctgccccggtacatcccatactcccgcgcgctgcagcagcgcctcttcctcgtcgcgcagcacctcagccgctcctcatccccctctgccatccgccgcggcctcgaccaactccacgcacagctcctcctcaacggcttcacccataagcgcttcctcctcgccaagctcctctccctcaccgtcgctgccgccgacctcccccgcgcagagtcactcttcatcctctctgtgcccccttccccagcgtcccccaccctcgccaacctcctccttcgcaccgccgccacgtcaggctccacgcccagcgccctgctcgcgtttctatcccgcctcgtgggctgccacgggctgcgccccaacgcattcaccttctcaaccctcctcgccgcattcgcccccgcgggcgttggggcgctcccccatggccgcgccctccacgcgctcgcgcttgcgagcggagtactcgcccagacaggcgatagtgggcacgtgatgaccagccttgttagtgtgtacgcgtcggcccagcagctcggggacgcccgtaaggcgttcgacgaaatgtcaaccagggcggtggccgcgtggaactgcatgctcgccgcgtacgtgcgatgccgtgaggtggacgccgcactgcggttctttagcgagatgcccaatagcaggagggacgtggtgtcgtggacgacgatgatcggtgggtgcgcgaatgctgcctgtgcggagctgggtgacctagaacttgggcggtgggtgcatgcacgagtggacttggaagggtggcagcggaggactgtgttgctggacaatgctctcatccatatgtatgtgaagtgtggtgctgtggaagatgcacatcgcttgtttgggatgatgccaaggcggagctccgtttcttggactactatgatctcgggtcttgcaatgcatggtcacccccaggaggcgctggacttgttccagagaatgcaggatcggcctgatggtgccacgctgctggcagttctgcgggcatgcagtctggcagggaggattgatgatgcacggtggtactttgaaagtatggaaagagtttacgggataaatccagagatacaacactatggatgcatggttgacatgctctgttgctggagacggttgaatgaagcacttgagcttgtggagaaaatgccattccagccaaacgagggtgcgtggggtgcaatcctgagtggatgtagaagggagggcaaccttgagcttgcagctaaagtgactaatagattagttgaactgcagccagcgcgagcagccgggcacctagtgctgctgtccaacatgtatgcttgcgtaggacagtgggagcaggctcagatggtgagggaaagagtggctgcactgaatgctgagaaacctgctggcagaagctgggtgaatcagaatgagtccagcatggtggtagcacatgctcaactggttgattcgtga

SEQ ID NO: 143654 - DNA, 4172 bp, Zea Mays
gtcgtccaaaccactacctccgtcgcaggcgcaggccgcgcagtgcagggaatcatggccacgctctaccagcaccacctcctccccctgcagcgtctccccaactccccccgccgaccgcctcctcgcctccgcctccccacgaagccatcgaggcaccacaatcggcagctacgaccccgcgcggcagccagcacaacggccacagtgtctgcgatggaggacttccgccggtggctcgcctctcatggcgcgggcgatggaggaaaagccattccagccgccgtgccggagggtctcggcctcgtggcggcgcgcgatctgccccgcggggaggtggtcgcggaggtgcctaagaagctctggatggacgccgacgccgtcgcggcctccgacatcggccgcgcctgcggcggcggagggggcctccggccctgggtcgccgtcgcgctgctgctcctcagtgaggtcgcgcgcggggcggactcgccgtgggcgccctacctggccatcctcccgcgccagaccgactccaccatcttctggtctgaagaagagctcctagagatacaaggaacacagttgctaagcaccacagtgggcgtgaaagagtatgtgcaaagcgaatttgatagtgttcaagcagagatcataagcacaaataaggacctgttcccaggtagcataacatttgatgatttcctatgggcatttggaatgctcagatcaagggtgtttccagagctccgcggagataagcttgctctcataccatttgctgatttggttaatcacagtcctaatatcacctcagaagggtcaagttgggagatcaaaggaaagggtctttttggtagggaactcatgttctccttgcgaacaccagtgaatgttaaatctggacagcagatatatatccagtacgatctggacaagagtaatgctgaactggcactagactatgggtttgtggaatcaaatccatcaagggattcgtttactgtgaccctggaaatctctgaatctgatccattttatggagacaagcttgacattgcagaggcaaacggactgggggaaaccgcatactttgatgtaatcctcaacgaaccccttccccctcaaatgctcccttacctgcgattactttgcattggtggaacagatgcatttctcttggaagcactctttaggaattcagtttggggccaccttgaactgccattgagtcctgacaatgaggaatcaatatgtcaggccatgcgagatgcctgcaaatcagcccttgctgactatcataccacaatagaagaggatgaagaactatcgggaagagagaatttgcagccaagacttgcaattgcaattggagtaagggccggtgaaaagaaagtactccagcacattgatggtatttttaaacagagggaggaggaattagatggccttgagtactaccaggaaagaagactcaaagatcttggtttagtcagtgacaatggtgaaattattttttgggagtagtagatatttgtttctagtatagtagtgctatttgtccataatgctaatgaaaggaatgcattctggcactgttaacaagaaatgcatggtaaatgtcatgcacacttctgtgacataatcacatagcaggtaaaaatgggcaaaataaatcatcacccacatttaaaagaatacatgatcatcactgatagtcgtatcaggtgaacagttaaattgacattcacctaactatagattggacgtcctctctagtgcatatgccaattgccaacagacttaaacctgtaaaatatctataaggccttttttattgcgcatgggttggctagggatatttttagttcaattctctggcaatccctctcaatccacatcagaaccagaaaggccacagtaaatctctgcaagtgcagcatatgttgcatacttgcttccacatgtacattcttccaggtgcgtttgcagatgggcttgtgcacatgtcatttgcaatggtttacattcaaccctcatcacagccatctatctgctccagttcctgttaatcagcgttgttgctgatcatattacagtactcgttttgttcagagcccgtaccacaaaatggcggcaattaaaaatcaaatccaatggcttcaaattttcatttgccttgagaacaaggtcaataagcagagggctttccaaataacgatcttacaatggtcgcacagatgtaacagattggtctaccatattgatgactgagtttgactaaaacgttccacaacctgtgaactggcttttgctctagaaatctgaagtatgtagtcaaaatccatttcttaacttacaacagtttggaggtcattcagtggtgcccatgaccagatctcagggcattctatcttgtaccttgttggtttaacaccaatcttcatcatatcagcatagagcatcatggcattcaagacatagccaagcatgcactgccctcgtatcagtagtgtataggtaaagctatcagggatcatacctgattttctcatgtaggagaaaagcttgccagcttcgcagtgttgaccatctaagtacaggccatatatcaaggtcatatatatcacactgtttggaattaaacattcttcctcaattgtaaagtttgagaagacagaatgaatgtcactgcacttcaaccctgagtactccatcacaaacctgaccgcttcctgaaccctattctctctgcacagaccatcgacaagaactgacactgtgatagcgttaggtgaaataccattctctatcatttccttgtgtaaacgaaaagcagcatctatgccaccattcttggcatggccatgaataagagcagtgtatgttaccacattaggctcaatccctttagccaccatctcagtgtatatagccattgctatttgcatcttccctcgttttgaatgcccatctatcaaggaggagtatgacaccacattgggctcaattccgacctcagtcattctagtgcatgttgctagcgcttcctccaaattcccaatcctgcagtactcatcaatcagtgcattgtaagcagctgcattcagattaacaccatcttcctgcacaccttgaagaaacctgtccgctacatgcatttgccctccatcacaaaggcctctcacaacaatgctgcaggtgaactcgtctgggcacaaacctaagcgagtcatctcctgataaagtgccaatgcttcttgtgcatttccagaccgaaaagctccatccatcaaactgttgtacacaggaacggtaggagcaaccccaaacctgggcatctcaagaaacataccttttgcttcactgaacctcttcgctttacagaaaccgtcaatcagggttgtaaagataacagcatttggattcaggccactcttcagcaattcctggtacaacacaactgcactgttgacatcatctctctgacagtgaccgctcatcagcacattgtatgtatactgattaggctgcatccccgcttccttcatagcgtcaaacaaccgctcagcatcgccaatgcatccctcttcacaaagtgcacatatcatcgtcgtatatgtgaccacatttgggtcaatctgctgtgccaccatctgatcccacacctcctgagccttggccacagtaccctggaaccggcatgcattgataagagtattgtacgtgaccacactgggcaccaacccccgtctaagcatttcgtcgaacagctcccaggcgcacccaggcctgcgtgctttcacgagcccatccaggaccgcgttgcacgccggaagcgccggtagcgtccttaagcgccggaacacgtacaaagcctcgtcgagcagccccatctgagagagggcgatgacgagcacgccgagggcgggggcaggggtggtggaggtggaggagagagcagtgaatgcggcgccggcgccggcggctgtggcagcagagctccggccggggaaggaacgggagacctggacgagggatttcgtcaaacggatggcttgcgcgaagttcttggccgcgaccgtgccgtgaacggcggcggcgaggcccgcggcgcggttgcgggacgaaggtgcaatggcagcggcagcggcggggccggaggcggagagact

SEQ ID NO: 143655 - DNA, 1634 bp, Zea Mays
gtcgtccaaaccactacctccgtcgcaggcgcaggccgcgcagtgcagggaatcatggccacgctctaccagcaccacctcctccccctgcagcgtctccccaactccccccgccgaccgcctcctcgcctccgcctccccacgaagccatcgaggcaccacaatcggcagctacgaccccgcgcggcagccagcacaacggccacagtgtctgcgatggaggacttccgccggtggctcgcctctcatggcgcgggcgatggaggaaaagccattccagccgccgtgccggagggtctcggcctcgtggcggcgcgcgatctgccccgcggggaggtggtcgcggaggtgcctaagaagctctggatggacgccgacgccgtcgcggcctccgacatcggccgcgcctgcggcggcggagggggcctccggccctgggtcgccgtcgcgctgctgctcctcagtgaggtcgcgcgcggggcggactcgccgtgggcgccctacctggccatcctcccgcgccagaccgactccaccatcttctgtgcaggtctgaagaagagctcctagagatacaaggaacacagttgctaagcaccacagtgggcgtgaaagagtatgtgcaaagcgaatttgatagtgttcaagcagagatcataagcacaaataaggacctgttcccaggtagcataacatttgatgatttcctatgggcatttggaatgctcagatcaagggtgtttccagagctccgcggagataagcttgctctcataccatttgctgatttggttaatcacagtcctaatatcacctcagaagggtcaagttgggagatcaaaggaaagggtctttttggtagggaactcatgttctccttgcgaacaccagtgaatgttaaatctggacagcagatatatatccagtacgatctggacaagagtaatgctgaactggcactagactatgggtttgtggaatcaaatccatcaagggattcgtttactgtgaccctggaaatctctgaatctgatccattttatggagacaagcttgacattgcagaggcaaacggactgggggaaaccgcatactttgatgtaatcctcaacgaaccccttccccctcaaatgctcccttacctgcgattactttgcattggtggaacagatgcatttctcttggaagcactctttaggaattcagtttggggccaccttgaactgccattgagtcctgacaatgaggaatcaatatgtcaggccatgcgagatgcctgcaaatcagcccttgctgactatcataccacaatagaagaggatgaagaactatcgggaagagagaatttgcagccaagacttgcaattgcaattggagtaagggccggtgaaaagaaagtactccagcacattgatggtatttttaaacagagggaggaggaattagatggccttgagtactaccaggaaagaagactcaaagatcttggtttagtcagtgacaatggtgaaattattttttgggagtagtagatatttgtttctagtatagtagtgctatttgtccataatgctaatgaaaggaatgcattctggcactgttaacaagaaatgcatggtaaatgtcatgcacac

SEQ ID NO: 143656 - DNA, 854 bp, Zea Mays
atctatctttgtggtcgtggtcctcccgtcgtcgtcgactcgtcgtcgtcggtggtagtatctgagccaaatcttacttggaagtagggttttggcctgtgtaatccgatcgaccttgcgcagttgctccgatgggcaaggactcgaagccgaaggacgccaaggggaagggcaagcaggcggccggctcctctggcggcgacgacggcggcggcaagggaggcaagggcaagggcaagggcaagggcggcaagtccgctgacggactcggcacttgcacctacgtcaaagctaggcacgtattgtgtgagaagcaggggaagatcaatgaagcttataagaagttgcaggatggatggctgaataatggggacaaagttcctcctgctgagtttgctaaggtagcacaagagtattctgaatgcccatcagggaagaaaggtggagatcttggttggttcccgcgtggcaagatggctggtcctttccaggaggttgctttcaacacacctgagggaactgttagcgcaccattcaagtccacgcacgggtatcactttatcctctgcgaaggaaggaagaactgatctggaaatgtcggttggggagactgcatcatcaggttgtatgagacgcaatgcaaactactcaccttctctaataagcgctggacatgtgtactttgtgttgggctattcgcattctgttccaaacaagttgccaaaacaaaagaatgtgtgattcgctgtaattaacatattgtactgataatctgatatggcatacctatctgggtcagttaacaggtgggttttagcataccaaaatgacagtacatcatacaaaaaaatctt

SEQ ID NO: 143657 - DNA, 1879 bp, Zea Mays
atctatctttgtggtcgtggtcctcccgtcgtcgtcgactcgtcgtcgtcggtgttgctccgatgggcaaggactcgaagccgaaggacgccaaggggaagggcaagcaggcggccggctcctctggcggcgacgacggcggcggcaagggaggcaagggcaagggcaagggcaagggcggcaagtccgctgacggactcggcacttgcacctacgtcaaagctaggcacgtattgtgtgagaagcaggggaagatcaatgaagcttataagaagttgcaggatggatggctgaataatggggacaaagttcctcctgctgagtttgctaaggtaaggacccgaatgacgggcagtcctccactcttctaggctcaaggatagttaggtttgcttagacgaaaagggtagtgatgcactatgcgcattgatactgacgagacttcatcgttttgcgactttgaaagttttatttacattttagtgacatttccccatcttctatttggccttgtagagaatgaataaaggctatataggttaagttactgatcttgtacttattcatgaggtacagtttgtggtctgcatcacgatcttcttgtactgatagtatcctttgattttgaatgagcttgatctttggttgcactttgatgatatcctgactgccattaatccatttgtttcatggcaagtgcagagaatggatgctgtgtatgggcagttactagttaaagacggttgctttagctggcatatgaataatgcatctatgtgtattgactatcgagaaaaaggttttgtatgattttgttgcagctggcaaggcttctggtagcttagtcttagaaattagtacttggctgtttgcttttggtttagcctttttctgacagggaactggtctgggtactactcgccaaaggaccatatatcataattggaaaggagcaaggcaagctgtagggaagatcactgcacaattatttttatattatcgttcctataaggttttgagaatctgtggttaagttgtattgtaaagctagttagtagcaaaattgtttataaggctatttgagctcttatatcttcatacacatttaatttttcgcagcttgtgaacattgggaagcccaattaaatatttgaatctgcatagagtattggaaatagtcaatagtggtgaacttttgaatgattcagttttgagactctggttggagcatgtgtagctactatttagtggggtgcatgtgacatcaaatttcgattgttgacctcatatatgttactggacttcaaaatttgttcttccattttcaatctgactaactacttcgtcgaagtttttctcatattttttgtgccattattagataccatgatgataatagatcctgactttattttttgtactacaggtagcacaagagtattctgaatgcccatcagggaagaaaggtggagatcttggttggttcccgcgtggcaagatggctggtcctttccaggaggttgctttcaacacacctgagggaactgttagcgcaccattcaagtccacgcacgggtatcactttatcctctgcgaaggaaggaagaactgatctggaaatgtcggttggggagactgcatcatcaggttgtatgagacgcaatgcaaactactcaccttctctaataagcgctggacatgtgtactttgtgttgggctattcgcattctgttccaaacaagttgccaaaacaaaagaatgtgtgattcgctgtaattaacatattgtactgataatctgatatggcatacctatctgggtcagttaacaggtgggttttagcataccaaaatgacagtacatcatacaaaaaaatctt

SEQ ID NO: 143658 - DNA, 837 bp, Zea Mays
atcggccgtatatggccttctacatcaaggccctcgtgcgtcgcgtccagatatctatctttgtggtcgtggtcctcccgtcgtcgtcgactcgtcgtcgtcggtgttgctccgatgggcaaggactcgaagccgaaggacgccaaggggaagggcaagcaggcggccggctcctctggcggcgacgacggcggcggcaagggaggcaagggcaagggcaagggcaagggcggcaagtccgctgacggactcggcacttgcacctacgtcaaagctaggcacgtattgtgtgagaagcaggggaagatcaatgaagcttataagaagttgcaggatggatggctgaataatggggacaaagttcctcctgctgagtttgctaaggtagcacaagagtattctgaatgcccatcagggaagaaaggtggagatcttggttggttcccgcgtggcaagatggctggtcctttccaggaggttgctttcaacacacctgagggaactgttagcgcaccattcaagtccacgcacgggtatcactttatcctctgcgaaggaaggaagaactgatctggaaatgtcggttggggagactgcatcatcaggttgtatgagacgcaatgcaaactactcaccttctctaataagcgctggacatgtgtactttgtgttgggctattcgcattctgttccaaacaagttgccaaaacaaaagaatgtgtgattcgctgtaattaacatattgtactgataatctgatatggcatacctatctgggtcagttaacaggtgggttttagcataccaaaatgacagtacatcatacaaaaaaatctt

SEQ ID NO: 143659 - DNA, 834 bp, Zea Mays
atcggccgtatatggccttctacatcaaggccctcgtgcgtcgcgtccagatatctatctttgtggtcgtggtcctcccgtcgtcgtcgactcgtcgtcgtcgttgctccgatgggcaaggactcgaagccgaaggacgccaaggggaagggcaagcaggcggccggctcctctggcggcgacgacggcggcggcaagggaggcaagggcaagggcaagggcaagggcggcaagtccgctgacggactcggcacttgcacctacgtcaaagctaggcacgtattgtgtgagaagcaggggaagatcaatgaagcttataagaagttgcaggatggatggctgaataatggggacaaagttcctcctgctgagtttgctaaggtagcacaagagtattctgaatgcccatcagggaagaaaggtggagatcttggttggttcccgcgtggcaagatggctggtcctttccaggaggttgctttcaacacacctgagggaactgttagcgcaccattcaagtccacgcacgggtatcactttatcctctgcgaaggaaggaagaactgatctggaaatgtcggttggggagactgcatcatcaggttgtatgagacgcaatgcaaactactcaccttctctaataagcgctggacatgtgtactttgtgttgggctattcgcattctgttccaaacaagttgccaaaacaaaagaatgtgtgattcgctgtaattaacatattgtactgataatctgatatggcatacctatctgggtcagttaacaggtgggttttagcataccaaaatgacagtacatcatacaaaaaaatctt

SEQ ID NO: 143660 - DNA, 2130 bp, Zea Mays
ccgtggaaccgtgaaaactagtactttatagtagtgatgatgaaatgatattgttttcatcggtttttatttcatcaattaaaatggtgacatgagtatatttttgaaaaaacgaattaaaaataaaatttaatccgtcaagggaagatggactcacgctcaatgggctgaatttgggctttcccgtagaaaactcagtccacgcttttgggctttccctttgcccctactcgtcttccccaccgaagcagggtgatgcggagggcgtcgccttcgctgtctccggcgaggggcccggcggtcttcgccgccgcggtcgtggtgtttctgccggtcttattccccgggttgttctcccctcttggccacgctttcccttctgtcttctcggagtggaatgcccctaagccaatgcatccttctcttttgaatgaggccttgcgatggacagctacagacggacaaaagaaagatctatggtcacccttgccatatcaggggtggaaaccatgcttaacgccatcagtttctcacaaattacctctggaaccaagtggatacatccaagtatttcttgatggtggattgaaccaacaaagaatggggatatgtgatgccattgcagttgcaaagattcttaatgctactcttgtgatcccacatcttgaagtaaaccctgtttggaaggattcaagctcatttgaagaaatttttgatgtggatcactttatcaactccctaaaagatgaagtttccattatcaaagtgcttccaaaagaattttcttggagcacaagagagtactatggcacaggcatccgtgctacaagaataaaaactgcacctcttcatgcctcagcaaattggtatttggagaatgtcagtcctatcctgcaaagctatgggattgttgcgatcgctcccttttctcaccgccttgcatttgatgatttgcctgtggatcttcaacgcttgcgttgtaaagttaacttccaagctctggtcttccgttctcacattatctcacttggagaaacacttgtgaagcgcttgaggtctccggtccgggttcattccagtaaatctatccatcaagttgtaggagacacaaatcaagctgaaaaatatgcagttttgcatctccgttttgataaggatatggctgcacattctgcatgtgactttggaggtggcagagctgaacagctagctcttgctaagtacaggcaagttatatggcaaggaagggtattaaattcacagctaactgatgaggagcttcggaacacaggacgctgcccattgaccccagaagagattgggctgttactggtagcccttggctttgacaacagaactcgactctatcttgcatctcacaaggtatatggtggagaagccaggatctctagcttgcgcaaactatttccgttgatggaggacaagaggagccttgcatctgaagatgaacttgctaatgttgaagggaaggcttctgttctagcagctcttgactattatatcagcatgcatagcgacattttcatatctgcatctcctggaaacatgcacaatgctttggtggctcaccgaagctatgagaacttgaagaccataaggccaaacatggcactgcttgggcgcacctttgcgaataagagcatggagtggccagagtttcagcaggttgtacaggcaggacacaaaggaagatacgggcaaatccggttgagaaaggcaacgcaatccatctacacttatcctgcacctgactgtatgtgccaaggataggctactggtttcaaaatttcagaaaaccaatcggttctgcagcaaatgaaggtcgaggatcgccgtctcaaatgttgcattgcggttagtacattccagctgccactagatatgcaagtttgatttttttgggacagctgctatgtactggatctcctctctctctctctctctctctctctctctctcttcacaatacagtttggtgcagatgcagtttatagatattctcatattcgtggttgtgacgggtgttaagatatcacacttgccattaacactttgcgctcttcagcttctacatctattttaatgcatcatgtattcttcagtgccgaa

SEQ ID NO: 143661 - DNA, 962 bp, Zea Mays
aagagacctttgctccagcaaattaccaaaactcatcctgatttaggagagggagaggtctcccctttatttaggagagttggtggtggatttaggagatctcctaaaatatagggataggatatgtgataagagatctactgcagctgttgccttcctatttgatggatagggagagtataggagatctggtggagatgctctaacacgcctcacatatccaggtatatggtggagaagccaggatctctagcttgcgcaaactatttccgttgatggaggacaagaggagccttgcatctgaagatgaacttgctaatgttgaagggaaggcttctgttctagcagctcttgactattatatcagcatgcatagcgacattttcatatctgcatctcctggaaacatgcacaatgctttggtggctcaccgaagctatgagaacttgaagaccataaggccaaacatggcactgcttgggcgcacctttgcgaataagagcatggagtggccagagtttcagcaggttgtacaggcaggacacaaaggaagatacgggcaaatccggttgagaaaggcaacgcaatccatctacacttatcctgcacctgactgtatgtgccaaggataggctactggtttcaaaatttcagaaaaccaatcggttctgcagcaaatgaaggtcgaggatcgccgtctcaaatgttgcattgcggttagtacattccagctgccactagatatgcaagtttgatttttttgggacagctgctatgtactggatctcctctctctctctctctctctctctctctctctcttcacaatacagtttggtgcagatgcagtttatagatattctcatattcgtggttgtgacgggtgttaagatatcacacttgccattaacactttgcgctcttcagcttctacatctattttaatgcatcatgtattcttc

SEQ ID NO: 143662 - DNA, 714 bp, Zea Mays
gtacgcaagcgacccggcagtttcgaaacctccgaaagcgtcatttaaagcccacgggtaccaccactctactcttcgtcctcctcgatcgtcccaacaaccgcaatggcgcagcagaggcttctcgctctcctcctggtggcggccctcctcgtgctctcctgctcgcaagggctggtggaagcgcggaaggtgcaggtgcggcgcgcgcccctcggcggcggccgcctgcttccggaggcgatgatggcgtacacgacgacggactacgggccccccactgccaacaccaacacccacggcggcatggtcccgtcgccggacgacccctcctcgccgccgacgcactgaccggccagtcgatctcaccggcaacaactgtcttgttctttgggattggagctttggaagagaaaattggaggataggatcggaagaagctggtggtcgtgttcttctccctttttgggcgcgcgtgttgtgtgctgctgtgtctgtgtactccagctgtagctgctgctgtgcttagctgattgaagtttgaactgtagtgggtccacagtattatgcatgttttgtttggtgagacgtcagaacccatcattgaatcttgtctgaatctagtcagctctatgtaaagtggaagcgatacatgaatgtacgtagtaaaatggaacagaattcgtcgccagtccaggctgcagtgctcccctc

SEQ ID NO: 143663 - DNA, 315 bp, Zea Mays
atgggagccgctcggccatgggcgcagcaagccagggatgagcagccggcgcgcataaaaaggagtcaggggcggtccggcggtggaaggaaaagattcaagaaaaatcaaagcatccacgacgtgagatatttcaaagagaagagatgcataggagaaggcttccgggagctaagcggcatgggccaacatgagggagcagggaaggatgaagacatatggctcctggagactgtcagagaagaatcgagcaggaaaatgtgtgggcgtttatgtggatggagcatgagacgagagcgcttagaaaccgcataa

SEQ ID NO: 143664 - DNA, 2127 bp, Zea Mays
atgacgccctcctaccctctgagccagccctccccaccccgttctgacgccccctaccaccttagcccctcgccggccttctccctgaactcggcgaccacacccacatttagccaggcgtcagaacccaggcactgtggtgcatcttctcaggtaggacggtccaaattccagaggtggaacgacggaggtggtggtccaatttccggtgagccctgttcctataaagatgctacactcatccaattgagtgcagcaccatcccctccttctcggggatcacagttgaggtctgcaaaggaggtggtggtccggggtcacatcgaggacctccggcaggcgacccacgtcgaggacctccggcaggcggcctctgggcgacgtcaagaaggtgtggtgcgtcatacccagcccccgtctcctcggcggcaggaagtcgatgggtggcaaaccgttgaaaggcggcgtgttgagtttgtgatccaaattctgaagaaggcggccaagttggcgagcgaagcggaggcccacaccctactcgctgtttccactgtcgtcttcttggtcaccaagcaagaaggtgtccctctcttctcccggatgtctgtgtggcagagaattggtccacagctgccgccgtcgaagatttctcattctccagcagcagaggcaagcttggtggagagcaatgtctcgagtcattctggtaagaagaagaggaggcgggctaaacgtcatagggaggtttcttggcagtccacagttcctgagggtgccgctacgaccttggagccctcgccaggcgtagggacacagtcgagaatgaagacctgcgtgatcgagttttccactgctatggctcgggaggaggcggctcttcgccgggctttgttcgtctctattgttggcagcaggccggagatcagtggagctgaagtgcgggatgaagtggctcgggcttttggaattgacggccctcttttcaaccttcaattcaggcggtggtcgaggttggctcatgcagaggcggctaggttgccagctctggtggacgtcaaggttcacggcatccctgcccacgcatgggatcgttctacggtggagtatatgctctgtgactcttgcattatcacaaacattcatccgtgcacgtcattgaagaatgacctatcttccttcaggcttcgtgcatggtgttcgaacactgttttgttccctcggtcgatgaagctcctcatcgttgagccggggacggatgtgcaggagaaaagatgtctttcctttgatattgaagtggctgttactgctgtggtggtcccgacgaagttcgacccccctccagctcagtcccctccggctgatggatgggatcggcacgaggatggcgacgggaggcattcggacgaccccaattctccacgtccgggcggcgggcggcatcagcgcccaattttccagcgtctgggcccgagggcgataggcacaggagccgaggcgcacattgggagcaatgtggccattcctgccagggataagttggctgttcatatggaactcgcggcagcagacgtggacacaggtcctgggatagactgctcgaacgttggtcctgtgggttgtgctgttgatgttgcagttgtgcaacagttgcagatggatgggcatggggggcccatgtggacaaggttggctgggtcgctgaaatcgcttgggccgggctctcctcgacagagggttgttgggttgcagaggctgaccaagaccgtttcgccccgcaacagtttcaatgtcgggatcgacttggtcccccggctgacctcaactcaatcttttgttgggtcgttggaggcggacaggaactctcccgctgaaatttcacttgatgctcaggtccttgagagctccagattgaaggtgtactcaagattgaaaaagggcaggcaagaggtacctacatcggtttcatctcagatggaggtgacgacaccagttttggatctaggacctgttgttgtttcttctcagttggaggaggcgacccccgttatgaagctggtggctaatatcaccaggaacattgactgcttgcttccgcaacctccaattcaaaaaagaagaattaaatag

SEQ ID NO: 143665 - DNA, 2514 bp, Zea Mays
gggcaatgacgagattccaaatttctcacaaaatctccgccccggcccgacccgaccccggccgcctctatgcgtcctccgccgccgcttcgcgcgcccacctcccgctcgacgtaatgcggcaccgccccgccgcgggctgcatcgtgcaccttcccgcggctctcgcaggcttcgtccgtgcgcgcgccgctgggactgcatccgcgtcgtgtcggttctcttacggcaaagcgctggccgcctgtgccaccgcctccgcgccgttcgccttcgcggagcagctctactgcgcagcctggaaggatggactctcgcgggacgcgtacatctgcagcaccatggtggacctgctcgccaagcacggccgcctgggcgacgcgctgcgggcgtttgaggacggggaatatcgcggaagcgtggtctgctggaatacggctatctccggggcggtgcgcaacggtgaacacgctctcggagtcgagatgttcctcgacatggtgaggggttctacctgcgagcccaattcgttcacgtattctggggtgctcagcgcgtgcgcggctggtgaagagttgggggttggaagggcggtgcatgggatggtgctccggcgtgattccgaatacgatgtcttcgttggaacatccatcgttaacatgtatgtgaaatgtggtcagatgggcgctgccatgaatgagttctggaggatgccaatccggaatgtggtttcttggacaactgcgattgctggttttgtgcaacaggaggacccagtaaatgcaatgctgctgcttacagaaatgttgcggagtggtgtggcaattaacaagtacacggctacgagcatattgctcgcctgctctcaaacgtccatgatacgggaggctaatcaggtgcacggcatgattataaagagcgagctgtacttggatcatgttgtcaaggaggctttgatttccacatatgcaaatgctggggctgttcagctctgtgagaaggtgtttcaagaagtagatacagttagcaatagaagcatctggtcggctttcatatctggggttagtaggcatagcgtacaaagatcaattcagctgttaaggaggatgttatttcagtgcctaagaccgaatgacaaatgctatgcttctgttttcagttctgttgactcatctgagcttggcagacagctgcatccattggtcataaaagatgggtttattcatgttgttcttgtggcaagtgcactctccaccatgtactccagatgtaatgatttgaaggatagctacaaggtttttgaagagatgcaggaacaggatgaagtgtcatggacatcaatgattgctggttttgcaacacatggccattcagttgaggcattccaggtgttaaggaatatgattgctgaaggttttacaccaaatgatgtgtcgttaagcgccattctttcagcctgcaatataccggagtgtttgcttaaagggaaggaagttcatggacatgtccttcgtgcctacggaagaaccacatccattaaccattgccttgtttccatgtattccaaatgtaaagatttacaaacagctcgaaaactttttgatgcaactccatgcaaagaccagatcatgttatcttcaatgatatctggatatgctacaaatggttatagtgaggaggcactctcattgtttcagcttatgttggcagctggttttcatatagataggtttttatgctcatcaattattagcatatgtgctaacatggcaagaccattctgtggtaaattgttacatgggtatgcatccaaagtaggcatactgtctgatctatctgtgagcagttcacttgtgaagttatattccaaaagtggcaacctggatgattctcgtaaagtttttgatgaactagatgttccggatttagttacatggacagcgataattgatggatatgctcaacatggaagcagtcaggatgctttggcgttgttcgatttgatgattagatgtggggtaaaaccagacactgtcatacttgtgagtgttttgtctgcttgtggccgaaatggtttagttgaagaaggcttcaaacattttaattcaatgagaaccgtgtatggggttgagccagtgttgcaccactactgctgtatggttgatttacttggtagatctgggaggcttgtagaggcaaaaagttttattgagagtatgcctgtgaaacctaattcaatggtgtggagcacactgcttgctgcttgcagagttcatgatgatgttgtacttggacgttttgtagaaaataagatccatgaagaaaattgtgattcggggtgttttgctactatgtcaaacattcgagcaaattctggagactgggaaggtgtaatggaaataagaaaatcagtcaaggatgtggagaaagaacctggatggagttttctggaagaataaatatgcttcaatagatatgtaaaaagagggtgaatactatacataacttcgaaac

SEQ ID NO: 143666 - DNA, 1497 bp, Zea Mays
gtcaccaggtgcgcgcgccctgctccgcgcgctgagctcctcgcgcgggccgtgagttccccggctcccatgggcgcccgagctccttccctgctcgcctggccgcgcctttgctccactccatggccggcgctccttcctctgccctctcccatggcgcgcccccttgctcctccaagccggtcattcccgctgtgagctccttcttggtcgctctctgttttccctatccgaccgtcgttcttcagcccaggtcatcacggcgccctcagtccaacgcgtcgttgtccactgcaagctcgccggctcgacttcctgctggccgcccccagcgccaacgcccctgccttttccccatctccctcgccgtgctccttctactggtttcccatggtcgtcacgcgcctagctctgccatggtcgcgccctccctttttcttccagcccgcgcaagtttttctgctcatctcccttggtggccgagctccagtgccacgcccatgctcagctccctgctcgttgccgcgttccctgccgcgcgttgagcatcccgccagcgctcagctccgtcctttcttcttctgttcgctcacgcgcaggcgcgcttcgccgagctcgcccctgcacgtcctgctcgcccctgcttttctttgttggccgctgcgcagctctagcttggatttcgctgcgcgctccttagttcgacacccggtgctgctccatggatggccgatgttgctccatcggttcgcgctcgccgcgcacatggccggagcttttccctgcgtcgcgcgcgttccgtcatcttttgctgtgacttcgtgtcgtgaagtttccctgcacgcgtcgagcttccatgccgaatcctttttccagtttgtcgtgctgcgtcgtcatcgcttcctgtcgcgagctcgatccccgttgtcatcgggcttcacacgtgctcgcgtttgtcatcaagcttcgccttgccggtcgtcattcttcgctctgcaagattttgttctaaactaagccgtccttcaagttcgcgtccttggtggactcgcacgtccttggtggactcgcaccctccgtgttgtgtctgccatcgtcgtcaagttccctttgtggttgcctcgcctgcgtgtgtgtggaagtgagaatagagctttggttgaagataaaaatgaagtccgaaagcgacgctcgtctgggaccccgtcgtcgacaacttggttctacgttgctggtccgtgtttcggatagcagcaactttgttgtcgtcgagttcgctccgactctgcctctacgtactcacattcgatcaccgctgcaattttagaagtttgagcgaagaagtggaactcgcggggcgcttgccaggaactcgatagaaaggccagaacaagaatcattgtcgttccgcacgtcatcaagaaatcccaaaaatcgggtgaagacgaagctagcagggtgatatttttcaagtgctcgacaaaagctcgaacatcc

SEQ ID NO: 143667 - DNA, 450 bp, Zea Mays
ttatttggaggcgagcatcttcatgtccgatgttgtgcacatatcttgaatctcctagttcaagatggaatggcaatttctcatggagcaatcgataagattcgtgatctggtcagacatatcatatcctcaccctctcacatacaagcttttaatgagattgctgagaggtctggattgccttcaaaggccagattaattcttgatgttccaaatcgttggaattcgacacacaacatgattatggaggccattcagtacaaagttgtcttgaagagatatgctaaggaataacttgcgccttcaccagatgatgaagagtggacaaattctaaggcgattggagagtttcttggggcatttgaggaagctacaaaagcattctcagcacatagaagtccaacatctcatttgtttttgcataatgtgctatgtatccatcaagctcta

SEQ ID NO: 143668 - DNA, 1200 bp, Zea Mays
gctggccggcagtgaggtgcgcctggagaaggtggcccccgtagagcctggttacttcggcccggcccattatgtcatcaaacagatccgagccgtccgattcaggttattcctcgcgacacatccatttatacccctgccgccgccactcccattcttctctttctcttagactatctgccgctccagcctttcgctagggtttatccaccggcggcgcgcgcgacggcggcaagatggtgcagcgtctgacctaccgcaagcggcacagctatgccacgaagtccaaccagacgcgggtcgtcaagacccctggtggcaagctcgtgtaccagtacaccaagaagagagccagcgggcccaagtgtcccgtgaccgggaagaagatccagggcattccccatctgaggccagctgagtacaaaaggtccaggttgtctaggaaccgcagaactgtgaaccgtccctatgggggagtactatctggaactgcagttagagaaaggatcatccgtgctttcctggttgaagagcagaagattgtcaagaaggtgttgaaattacagaagaccaaagacaagacttcctcaaaaaagtaactctgaaacagaagtgagccactcttctgcagcaagggaagacatttttgtcgacagttattatcaatggcttagtctcttctagctgttctattgttcttgtatcttgagcggacaactggtttctagggcaccttgaaatctgtctacgagatctctaagattatgagatgacatatgaccccctattgcttttgttcactttgctaaaactgaaagtccgagttcacatgagttgggcatcagttggtgtttatttcctgcttgttgggtcttgcgtctgaattgggaatcagtttgtgtttatttcctacttgttgcatttagttcttattccaatttgtctggctgtgggttaagtttggaatatgtttcatcgttactagaggtgtcagtgggattttctctattaggcctcctttggtagccatggatcctggaaggattctggcctgttccctagccttgaaatccacgggtccaatttccttggggcaaatacaaaatgtatttggtgtcacacgcctcccggcccaatccgtgggggaagagtgggcttttgcccccggcctcataacgtcgggtaggttttccccgactt

SEQ ID NO: 143669 - DNA, 1086 bp, Zea Mays
gctggccggcagtgaggtgcgcctggagaaggtggcccccgtagagcctggttacttcggcccggcccattatgtcatcaaacagatccgagccgtccgattcaggttattcctcgcgacacatccatttatacccctgccgccgccactcccattcttctctttctcttagactatctgccgctccagcctttcgctagggtttatccaccggcggcgcgcgcgacggcggcaagatggtgcagcgtctgacctaccgcaagcggcacagctatgccacgaagtccaaccagacgcgggtcgtcaagacccctggtggcaagctcgtgtaccagtacaccaagaagagagccagcgggcccaagtgtcccgtgaccgggaagaagatccagggcgtgagtgaccactttctcatcataacataccttatacttgtggcacgtagctcacgattgttcggttagtcttgcggccttggtagggcgatttgttttgggaaattgggagtaggtacggtggtgggaaatggcggtattgaagttggtggtaatctttccgtaaaatgtagtgaagttagttgtccatatcgatatttatgtcattttataatgattagaattcttcttagtgtggaaacgggtgaaattcgggctgcaacatgcaatccttttttgcacaggcataaaattcatgggatggaatttgattcccgagctgtgcattttgttgtgtaatggaggctatggagcctttcagtcggaatggattggtggctcactataaccggtcgaaatttactgaaagctagggggtgttcatggcagctaaagcagtgtctgcaaagtgggacactagcagtagcagattgctgctacagccaaacaagccctaattctgttattgtcagatgtccaacaacaatttcgcactgctttgataatattatttattttctcattatgacaatacattcatactagtttgtttgtacagtgctgattcttatacagcaagccttctaggtaaggatttcatatgcacacttcgtagtttgtacagtggtaatttgatgttggtttctttatt

SEQ ID NO: 143670 - DNA, 3835 bp, Zea Mays
gcgttgttttcttcgccctcttctcccgcggtgcggtgtggaaagcgagcgagcgagcgggagactagtaggatctatcggtcgcgttggcccgccgatacgtacgccgcgggtaccttccttccgtccatggcgtgttgggctcggacggtgggttagccgccgggcgtgtcgcgcggggcgtatggccgccggtccagccatggacgccggagcgggcgtgagcgcccccaccgccgcggcggacggggcgtacggactcgcccgcatcgtggcctggtgttcgtcctcgcccctcttcttctggctcctcaccgtcgtgctcgtcgccgccatccacatcgcctccgggtccaggccctccggctccaggacccatgggaaggagagggagaaggaggaggaggaggaggaggaggagaaggcacgccgcgataggttcgcggctgccgaggagagggaggtgtcgggcaggcgagacgaccgggttctggagatgatgcgcagtttcagcttcatgaaggccaccgaggaggatttcatggagggcatgacggcgtacgagtgcaacggccgcggcgtcgacgccggcttcgcgcacgggcttgttgcgcccgagccgtttgcgccgccgccggcgttgatggcgacgagcctcagcttcaagtttcaccaccagatacctgaaattccaacggagacgacggtggtttcgagggaattcacagcagcaagagaagaggacggacaagaacgagtggaagagaaggaaccacaaattcccttggaatcattggttccgttgcaatctgcagacaagcaagaacaccgacgagaagcagaggaaacagagttcttggtcgatgagcaggtagaagagcagagcagggaggcagcgccaccgaagatcgtcgcgaccacgcacaactatcagttcttgacggagcgcgacttccgggggttcgtcagggggccggaggccatgacggtgcgcgtccaggagtctttcgtgccgccatcgccgcctgcggcgcaccagcccgaggagcgacgggtggtcgacgtatcttcccgcaccggccggttcctcacggagagggacttccggccggcgaacgaccccgacgtgtgcgagagcgtggcgtcttccgggaagcggacgccgtcgctgcagtcgaagccagcgagctctccgtccgtcgcgtacatgggcggcgccgccgtcggcgggaggacgagcttcgcgtcggagttctccggtttcggcgactccgactccgagtccagcgccagcgacggctactcggtgaaggatctcgccgtcgactccgacagcgactggttcctctcggagaaggacttcccggcgtccgcgcgcgactccggcaacctcaagagttacaaagccaaggtgctcaaggcgatcgaggccctggagaccgcggcggcggccaagcgcgagccaccttaccaggactcagcgacaacattgtcgccgggctcggtccgacaggactcaccagacaccattcccgatggttcaccgaagttccctgaggacatgtggtctcgcagcccttcgccggatgtcgagtacaaagaggacgaggagaaggtaacacgagaagctgaagcacagtacgacggggacatcgaacagagaagcacggcggaggatgaggggggcgtcgacatgagcgacgacgagcactcgtcgggcggcgagaagggagaatctgcgccagtctatgatctagctcctgttgctgacaactgtatggatcattcggagaaggagatcatcgctctaaatgatcactcgggaggtgaagctgcttctgatgcgcaaagaagtccagaggcagtctctgcgagacaattagcagctgtaccatcggatcaagctgctggcccagccaagagaagtccggagccatcggagcaggaatttgttggtattgttgatcattcacttgagcacagttctgacgaccggaaagaaactgccagcgaaagcgatcagtcatatgaaatagtatttgatgacaaaagaaaacccgaacctccggagacaggattcctggatacagcagaggaagaatatggtggcacaaatgatcgttcaaaccatctcatttcttatgagaagaagaaggtgagtttcagtactacagatgatcggccatacgctgcagttgctgacgagaagagcgtcccagagactccagagcaaggattcagtctaactgaccatcgagatggagtagctcctgacgccacgaacatttcagagaccagagaagacgaggaacaagacagtgcagctcgacaggcctacgtttcagtcgccgggaaggcaaaggtgtacgacgaagatggggaggatccagaagtgaggtggaaggatctttcagccgaggaggaggacgagctggagtcgctgtgggagcaccaagacctgatagagcagctgaagctcgagctgaaaaaggttcggtccatcgggctgcccacgatcctcgaggagtcggagacgccaaaggctccgatggaggacctcaagccatggcggatcgatgccaagttcctgcgcgaagaccccatggacgagctgaacaagttctacaagagttacagggagaggatgcggaagtttgacattttgtgctaccagaagatgtatgcgatagacttcctacagctcagaggcccccagcaatccagcaactctctaaagtccctgtcgcccacggtggcatccatcctgtcgcacaatttccggtcatcgcgtcgcagatctccggaggacccgtcggagcggttcttgagggagctccgctacgatctggagacggtgtacgttgggcagacgtgcctgtcgtgggagttcctccggtggcagtacgagcaggcccgcgacctcccggagtccgacccttaccacagccaccagtacaaccaggtggccggcgagttccagcagttccaggtcgtggtgcagaggttcgtggaggacgagtcgttcaagggccctaggctgccgaactacatcaacaaccggtgcgtccttcgcagcctcctgcaggtgcccgtgatcaaagaggacagcttgaaggacaggatggaggaccagcgcaaggggaactacgtgataacgagcgaggagctggaggacgtcatggaagaggcgatgcacatcctgtgggagttcatcaaggccgacagggtcgagacgacgacgacggcggcgtccgtgctcaagggcctgtcgagcgctcacgtcgagctccaggacccttcggaccatgatctcatggcgcacatccactccacgctacagaagaaggagaagaggctcaaggacctcctcaggaccggcaactgcatcgtgaagaagttcaagaagcccaaggaggacaggtcgaaccagaacctcttcttctcgcaggtggacatgaagctggtggcgagggtgctgaggatgccgaggatcaccagcgagcagcttcagtggtgcaaggccaagctcgacaagatcgtcctggtagataggaagatccacagggaggcttcatttttgttgttcccctgttgagagagtacgtatatatacttatttttcttttcgatcgcgtttgctcgataaaaaagggaatacattcacccatgtaatcagtccacagggtgtaggattttttttagtgttttcgtaattcagtccttcacgcaggttcgtaattgtaattgtaacttgataaacaggccacagtttacggagctcatggcgcttccatgataccaacattacctagaaattacaatcacgcccattttc

SEQ ID NO: 143671 - DNA, 312 bp, Zea Mays
cgcaattgttatcctaactcagataatggcatctaacaccacgaccgatggtccctaaatcagacccaagaagaaggttaacctcgacaatgaaggagataagtagaaacagatcttcagatgaatcaagatccaccacccggaataaaagtctcccttacctaactctcccttacccccaaaggaagctcgattatgccatagtacactcattctatgtcaacactcacctaatagttaaaacctgatgtacccttgttttcaatgccacacctgctaatggcatgaaaattttgggtgtataaaaatact

SEQ ID NO: 143672 - DNA, 458 bp, Zea Mays
accaagaaggctactacctcttttttggttggggatgggatgagataatctaatcctaaatcagcatcagcatcatcatcggatcccaagagcatacagtactagtacaggggaggaagaagcttggatttctaggcatggcgcacagcggcatgctttttcttggggttaatttcttagtagatggcaagaagtctaaagaaaaaaaaaacgagtgatcactgaaattaagctacatgtttctctctctccgctctcccttcccttcccccctcctctcttctcccttctctagttcaagcggagtgcggcgacgaagctccgttggcgttgtccgtggtgtagtcggtggcgacggtgaggacgggagggggaggggtgatcctggacgggtggaatgacggtgctgcagcagcgccggcgccggcggctggggtttggagcgacgcggcggcggg

SEQ ID NO: 143673 - DNA, 572 bp, Zea Mays
gtgcgcaagtttgtttttttttatcttggagccgtaaggagcccttttcttcaggatcattcgggagtacacaaatagacctggggttgtccaaagaaaacatgtatttctcgcttacataaagctagtctacttaatacgttacacccgaatctgtacgaggaccgtaaagaaatttccaaagatacaagctttttgaaaagagtacacgaccaaagaagattatgtggttgcagtgatcaccagcgagcacggtatcctggctgcttcagtgctaccccctacgggcatattcggttacaccaatccataaggggattggtgaggtttaaatcctcttctagtcatttttaactagaaaaggatttaatcccctccaatccgcttctgaattgttgtaaccgaacaagccctacaagggttgatcatttaagctaatccttgtttgtcgggtaaggtttggttgcagaattcctcatgttagagcctcatgaaacgtgcttgcttcaagctacagccgtctgcttaccaccaacccagtattgcttcacggcatacaagatcttctcgcg

SEQ ID NO: 143674 - DNA, 1234 bp, Zea Mays
aaccatgcatgcttcactccagtcatcccttgtgattgttgctggcaggtgccgcatgaccctcagccgcgccccagccatcctcgagcggcatgtccggcatgaccttcttccagaaccagtgcttccgccatagcagcaccatctcttcgatgggcacgcccttggtctccggcaggaagacgtagacgaacacggtcatgacggtgatccaccccgcgaaaaagaggaagatgccgaacttgaaggcgcacagcagcgacaggaacgcctgcgcgatggcgaaggtgaagagcaggttcacggccaccgtgatgctctgccccgccgaccgcgtctccagcgggaagatctcgctcggcaccgtccatcccagcgggccccacgaccacccgaacgccagaacgaacaggcagatcaccaccaccaccgcgaccgagtagctccgcgccagttgcttctccgccccgaacttcacgcccaggatcaccgccacgatcacctgcacgcacgagtccatgcaagcagagtacgttagtttgcaagagcttgacagcgaactgcactgcggcgccactgtggttctagtgtcacctggcagacgatcatctggatcccgccgctgatgaggagcttccggcggccgaggcggtcgacgatgccgatggagatgagcgtcgaggagaagagcacggcgccggtgagcacggaggagtagagggacgcgttcccgccgaaacccatgctctggaacaggaccggcgcgtagaagaggatggagttgatgcccgtcaggatctggaacgccggcatgcacacggccatcaccagctgcggccggttgcgcggctgcaggatgttccggaacgggtgctcgacggtgttggccagctcgctcgcctccaccatgtccgtgaactcggcgtccacgtcggccgtgccccggatgcgctccagcacgcgccgaccctcctccacgcgcccgcgctcaatgaggctgttgggagtctccggaagaaagagcccgcccaacgtcatcagcagcgccggcaccgccgcgaggcccagcgacagccgccacccccacggcttgatgttctgcgtgccatagttgatcaggttcgccgtgaagatgcccagcgtcgtcgcgagctggaacatcatgttcaggccgccgcggaggtgcgccggcgccatctccgacaggtacagcggcacagcctggttgccaaaa

SEQ ID NO: 143675 - DNA, 109 bp, Zea Mays
ctctccgactttagaaacatttgtgtcgaattataatctaggaagattatattattatgaactaacatttagaagctatttgtttaagattataatttggtcagcttat

SEQ ID NO: 143676 - DNA, 342 bp, Zea Mays
cctggaataaacactatgttagtgttggttagacgacgtccgcttgacgatcatcttcaggtttgttcatcagcatcatcctgtggagtagcccgtgcttggggtcgacttgggtcgtcttctgcatcgcgcgattaattaacgtacctgaatggaatgcattatgcacatgaatgcatatcgatggaaatattacaaacctaaatagtgttacgtgatggcgaatttaaacacctagcggcgaggcgttgtacaatttcatacggaatccctagttattaatatacgactacacgcaataattacgcccctcgaacctaacgcaaacatcacgaacaacaa

SEQ ID NO: 143677 - DNA, 470 bp, Zea Mays
ccacgcttggggtcgacttggatcatcttccgcttcacgcgattatttatcgtacctcatgagatgcatgatgcacatgtatgagcacgaatataatatagataatctatactaagaaggatgaaacactaaaaaccaagcattaattattatggatatcacatcagggcatcgactacatctattaaccaaattgatataataacactcgaacatctatttttattcctagctttttattaactctttaaactgtgtatcttaattatttgatttaccgattaacctgtgtatcatatatatattaatataacttcccatttttaacacctacaatcccgcaaacactgagacctattgagatctttttcatcctacgacatcgaccaaattactaaaacgactcaggcaatctaataaatattaaaccaagtcagaccatccaccaacccactaacacgaataacaaa

SEQ ID NO: 143678 - DNA, 1257 bp, Zea Mays
gcgtccggtctcatccttatccccatcgcccttatcccctggtctgtgccgctcgtacttggagaaaaatctccagccgccttacctgctgccgccgcttcccatccgacagattatttgtttgcagccactgatcttctccctcgctcagccgagtggtcttccactcctcccagccgagctctccctctccacgcagctccctcgcggtgctccctccatagcgcctgagcgctctgtcctcggatcggagcttctctgcgtgtcgcagccaagcttccttccccatggcgcccggcgcccaagtccccagccgtgaccctgccgagctccgccccgactccacgtctcctggtcgggctctcgttctatgcctgatgccgctgttccctggtgctccctgctcggtccctgcccagcgcctgactacagctccagctcgcggcgtcccctctgcttagccaggattgtcgtgcctctgctccctggttttccctacgcgcgagctcgctggcgttgcccctgctccgcttggccgcgtccccctcagtccaccactctgctcggccatggaagacacgccgcaccctggttccagctcgcgatactccctgcacgccggagtcgcccagctcggccacctacctccctatgcgcgacctcctctagctccctgtttctccagagtgtcttcctctgttggctcgccggcttcctgctccctgctcacccagcgcacgcttctccttgtgtgccgtgcctgcgtgctgctcgccctagctcccagccatggcgtcggccaaagctcctgcgcgttatgtgcccagctcccttttccgcgtatgcgcgcttagctcgctttcctgcgcgcccagcgttctgctcccgctcgtccctgcgcgccaagctccttgcgcggtccttccttgagctcggtcctgcgcttttcctttctctgtgctcgtgctcgccgtgccgtgagtcactggccagcagtccagctcgcttcagaatcaatctcgtcgtcgttccgcgcgtcagcaagaaatctcaagagttgggtgaagtcggaggctaacagcatggtattcaccatgtgcgcgacaggaagctcgagccaagatttatccgcattcgtacgagtattgggtcgcgtttgatactggtgagccgatttataatttttgtaagtttatttaatgattggattaactagaattattaatcgtaataatcctcgtatttagcgcaggcgta

SEQ ID NO: 143679 - DNA, 765 bp, Zea Mays
tgcgctaattttattcatttttgaaagttggccaggtgctatggcacaaacttgagtatacatgcatcggtactctttggttcttccttgactagtatctagacttttttttccgtataagctattgttttactgaatatctagacttctttttttttccgtataagctattgttttactgaaatccagtggttatataggtaacacatcagcaagttcgagactgccaaaaatatgcaaggcagctggctggaaagaaccatcatttgactttgaagaacaaggacctccgcataacagagtattcacatgcaaggtgaccgtccacctggatgaactggtcaacaccattatggagtgtttcagcgaccccaaacctaagaagaaagctgcacgggagaacgccgcacaaggggcattatggtgccttgagcgctctggttatgtcaagtcatcttcagatgttcctgacctgtgcggccatcagcccttctgctagccagatctacccttgtaggagtattaatgttggtagacgggtgcagcttgttgctgtggcacagtggttatccatgcactgatgccatgatactcttgagaagttgagtcccttatgaatcttgagccggctgtgttggctcgtgtacctagtctctagctcgtttggttacatgcccaacgcctgcacttgtactgtgtaaaatactgaactccggcgatcaatgcaatcaaactggaactcctagccgagctctgtcttgcaat

SEQ ID NO: 143680 - DNA, 323 bp, Zea Mays
cgggtgtgcgcgcacgccgtgatgggtggtggggagaacctcggttagcactgtcgggcggacccaaatcctcccagaatcttcgtcgtggctcatgcagggtgctcctggcctcgtcgcgcaggatttgcgactggagaatggtaagttcgtcgttggagttcaagaacgcatcaggaccgcatggtgccgtggacaggcatcttcgcggcattatctccgcgaggttacgagtcacttgaagaccaagttggtacttgggaatctcgagtctcaggcaagttgtgcccttgatcacttttctctacctaataatgtttctg

SEQ ID NO: 143681 - DNA, 122 bp, Zea Mays
tttctttttttttcaatttcctttctatgtattcaaattctactatttgaatttcaaacttgagttgtggatccatcataaaggttgagtgcccaaaataaacaatgtatcagtaaataata

SEQ ID NO: 143682 - DNA, 1089 bp, Zea Mays
agctccctggtatggcccatgtgaactcgttccaattatgcggaatgggcaatgctgatgcaaatcaattatgaggctatggagatttgggaggtgattgagccggggaccagtgctaaacggtctcaggacagacaaacaatgggtgccttgatgaggtctgtgcctaaagagatgtgggggacacttggtgcgaggaaaacaattaaggaggcatgggatgcagtgatgataatgagggttggtgctgatcgggttaaggaggtaaatgtgcaaaaattactgaaagagtttgagaacatagagttcaaagaactagagacagttgtccctgaaatggctgtagttggaactttgctggccagttgtccctgtatttggttattctccttctttaaatatattcggcaatcctcttgccgtcctttcgaaaaaaaagaactagagacagttgaggattttggtatgagaattacaaaccttgttgccaatatcaagtctctaggtgagtccatagatgatgctggtgttgtgaagaaatttttgcatgttgtaccaccccgatttaatcaagtggtagtgtccattgaaatgttctgtcacatgaagacactatctgtcaaagatttggtgggtcgacttcgtgctgctgaggatcgacttgaagacaaggtggaaaatgtcactgacaaggcagggcgtctgttacttgctgaggatgagtggatggaaaaacataaacaccggtttcaagaaaattcgcagaaggatgctagtagcagtgggaactatcactggaaggctaaagcacctcaccggtcagaaggaggatcttcagggaatactggtaaggtaaaacttacctctcagggaactccaaggagaaaaggcaggtgtcgaaactgtggaattcatggacgctgggctcaatattgcaaacggccaaaaagaggggataaaaaggagcaaaaacaaccaaaggcaaatgttgctgttgctgggattgagaatgaagcattattgctagctgaagtgtgtgacgtagtacacagaccatcacagattgttcatctatctgaaaaaaggtaa

SEQ ID NO: 143683 - DNA, 1722 bp, Zea Mays
acagagatgagacctagcagcgcatcttctcctcgacctgtatcgacacgttcagtccaccaccatcatatccttaagggaagagatcatcatattctcaagggaagggaagagatggagcagctacctgacgatatgcttgtggaaatcctgagccgcctcccgcccagcagcctagcggcgtcacgctgcgtctccaagcacttgtgctccatcgtggacgcccgacgtctcctgcgcaccggccacctccttcctctccgcctcgacgccttctactgcatcagcctggcctcggtcgatcgggagacatatcttttcgcacggccatcggtagcgcgtcggatccccggcgcctgccttgacttcagggtagatcttgaggttgtggatcactgcaacggtctactgttgctgtgtgacatggttttcaggttgctgaaccctgccacacggcaatcggcagccctgcctaaagccccggatccatccattgagaacatgcttggggtcgccacagtttgggccgggacagcgccgcaccgccccccattttacttgtttacagactttaatcttgtgtacgaccccatggccgagtcgccggagcatttcgaggtatttctgatccccgtgttattgtgcggccatagtggtttgatgtccgacaatatcaccatcaaccttgaggagcaagaatggccgccatcgacatacagaacccacgtcttctcgtcgaggagctggaggtgggaggagaggtcctgggtccgccaaggggagcctacggggaccatggccgatatgctgcgatctgagcatggttggaatcacaaggctgtttattttcgaggagcactctatgtgcattattcaaatgaatctgtcatgaggatatccatatccaaggacaggaatacgtatcaaatgatgagacttccagcaatacggagcaaacagatagttaagcgtgctaccttttacttgggaaaatctgagaaaggagtatattgtgcgttgttttattgggcccaggatgacagcgacccccagtttcgagtctggtctcttatggaggaagagatgaatggacgtgatggacaaattcatatgaagtggttgataaagactagcatcagccttaaacccctgctggcacaacttcatcattgtggtcacgacttgactccagatgaatggaggatcatctataaccgccatgaccgtgaccttgttggttcgtctgcacaagatgatattgatgatgaatgggactttgaaaatgctcatgagattgtccttgaagcacctaacaatgttaatgactggtaccctatagattttctcgtatttcatccttacaaggagattgtcttcttttccttatcatggaagacaatatcttataatttgaataccacaaaggttcgacagctgggctgcgcagctcatataccggtgggcataaaaacttgttttccatacacaccctgctacctgacgatggagaaattaactaacagttgatcgtcctccgcccaccacttttgatgatgattagtgcttataatgacttacttaactagagagtgcacatctttcttccactttacattatatttgtcagattatctttaattttggcaatacatattttacttccgttttttttaaaaagagatgatattatactagtcaaattgaatggacattgttttaatt

SEQ ID NO: 143684 - DNA, 612 bp, Zea Mays
atgggaaggaggttggacacggtctggcaaagtgacggcaagcaccatggcgcgcacgactcagggagattgggcacgcgtagggagagcaggcggccaccaggggcagcgcccaagcgtgcgatggtggagcaagtcccgggcgcaggaacgctcggaccaggggcgcgcgagctgagggagcagctggggcgagcagggcgctggggaggagcggctgagctggaagcaggcgagcgtgcccaacgagctgcaggaggggcaaccacaaccggctgcaggaaggaggccgagctgggactccaaggcaccatgggagatggacgtagggaggagcagccgacgcggtggagaagctcgggacgcgcggaactcgacggtgcgacacgcacagatgagccggaccaggggagacacggccatggctggagaggggcacagtgcttggatccagactggggcagggaggaagacgcggcgccatgggagcaggggcgccgagggagcaaggacgcacagcgtggggaggaagaagtgtgtcaccaggagaagataaggaagagtgtgtggcagaaaaaaaataatctgaggggaggggcggcgcggagataa

SEQ ID NO: 143685 - DNA, 470 bp, Zea Mays
ccacgcttggggtcgacttggatcatcttccgcttcacgcgattatttatcgtacctcatgagatgcatgatgcacatgtatgagcacgaatataatatagataatctacactaagaaggatgaaacactaaaaaccaagcattaattattatggatatcacagcagggcatcgactacatctattaaccaaattgacataataacactcgaacatctatttttattcctagctttttattaactctttaaactgtgtattttaattactttatttactgattaacctgtgtatcatacatatattaatataacttcccatttttaacacctacaatcccgcaaacactgagacctattgagatctttttcatcctacgacatcgaccaaattactaaaacgactcaggcaatctaataaatattaaaccaagtcagaccatccaccaacccactaacacgaataacaaa

SEQ ID NO: 143686 - DNA, 243 bp, Zea Mays
cttaaggttttgctgtctccagaacttattgtttgccctgtgttcttgaggaatacggccgatacagaggttcgcagggaggtcggatggcgtgcccaggtagccggatgggttcacttgcgtgcacagacagccggcggtgggctcagggcatctggcttctggcgttgggcgcgcaagctagcagggttaggcggaggcgcgggcgcacgcaagccagtcggcggcggccacacgcagggt

SEQ ID NO: 143687 - DNA, 498 bp, Zea Mays
ggtacaacgtacaacctctgcagagtgtataaaccattcgaatggtccgtgtcctcggtataggacaggttatggtgtggacacttcaactagttgagctacctgctggctatggagggtggttatgggttttacctttagtttacactcgttaatcacttctatatttaacatttgtcaatgattcatgcatgatgtaactccctcaccgtaagggcgaggtgggacttgctgagtacctttgtgctcacccgttgatgatttgttgcagaggaccctgactttgtgcccgacgagtagcgcgttcctacacccaagtcccctgtggtgccattgtgttgtagcagacgccatgtccaacgaggagctcgcagtcgcgttcttcaccaccactattctatttctagtttctattatcgtattattagaatgtactaaataaaagccttgtatgttatggcaccacttgagcatggtactagaattctgtattctagt

SEQ ID NO: 143688 - DNA, 1574 bp, Zea Mays
ctactaaacaaacgaccgtgtggaaccggctggggaaaactatttcgtggcggctagggtttaacaaatgccaaccacgctgctttgctagaccgccgccgatatctacggtcggattaggttcggtgccctcttcgcctctgtctcccgaggtctccctgcggcggcggtcaccgtagtggactccggccacccccacgacaaccggcaaaagggtaagggagtgcaagaactagggtacaccggcctcatgaacagctccattaacaatctctttgatctcatcacgaaccaaggtacgggagtgtgaactatgccgtgcaaagacctgcgcttcactgcctttgcccacacctcaggctagaaaatggttcctgattccgtcaataaccaagaattgttctacgcatctctatgtatgctccaagcactatctctttaatctacgacaagaatttcatagcagctttgactactattgaagttgatctttttactagtgtggtctgcttagcagtaggtagcactacaactagcaatgtatggatgaattaaaggaagtgaagaaggcagacaatcttacataaactctacatcttaaaactgccatgattggcaaagaagctggatgcatcctttgcattggtgtattcttatcaccaagcagtaacgtgaagcaagtcctgaccagattgaagctctgtatcagtacgccaaatttcagtttgagtgtggtaactactcaggggctgctgattacctttaccagtatcgtgctttgtgcacaaacagtgagcgaaatgtgagtgccgtctggggaaagctggcagcagaaatcctaatgcagaactgggacgtagctttggaggaactcaaccgcttgaaggaaataattgattcaaagaacttctcatcacctctgaatcagctctagaacaggatatggctgatgcattgggctctgttcatcttctttaaccatgaaaatggtagaaatgggatcattgatctgttcttccaggacaggtacttgaatgctatacagacaaatgcacaccatcttattaggtatctagctactgcagttgttgtcaacaaaaggagaaggaatatgcttgaagagttgattaaggtcattcaacaggagcaccatagctacaaggatcccgtaactgaatttctggaatgcttatatgtaaactatgattttgatggtgctcaacagaaactcatagagtgtgagcagggttctggacaaagaaagcttgtaccttaaaacaggaggatacaagaagctggagtggttgtctgaaggcttttgaactgcttgaagcattagtgtagctttggtgcttttgtgactgatcaactctggagcagctagagtgatgtagttgtgggcttttgaacaatagctggagtgatatgaaacattagtgatgtagttgtgggcttttgaactgcttcaagctggagtgatgtcgttgtggtgcttttgtgactgatctagtcgtgaatgatattataattgtgatgcttttgtgtttatgtgatggatctatgattgtggtata

SEQ ID NO: 143689 - DNA, 1558 bp, Zea Mays
ctactaaacaaacgaccgtgtggaaccggctggggaaaactatttcgtggcggctagggtttaacaaatgccaaccacgctgctttgctagaccgccgccgatatctacggtcggattaggttcggtgccctcttcgcctctgtctcccgaggtctccctgcggcggcggtcaccgtagtggactccggccacccccacgacaaccggcaaaagggtacgggagtgtgaactatgccgtgcaaagacctgcgcttcactgcctttgcccacacctcaggctagaaaatggttcctgattccgtcaataaccaagaattcctatgaagctacactcattcatttcacaattgctcatacgactgttctgctcctctttagaattgttctacgcatctctatgtatgctccaagcactatctctttaatctacgacaagaatttcatagcagctttgactactattgaagttgatctttttactagtgtggtctgcttagcagtaggtagcactacaactagcaatgtatggatgaattaaaggaagtgaagaaggcagacaatcttacataaactctacatcttaaaactgccatgattggcaaagaagctggatgcatcctttgcattggtgtattcttatcaccaagcagtaacgtgaagcaagtcctgaccagattgaagctctgtatcagtacgccaaatttcagtttgagtgtggtaactactcaggggctgctgattacctttaccagtatcgtgctttgtgcacaaacagtgagcgaaatgtgagtgccgtctggggaaagctggcagcagaaatcctaatgcagaactgggacgtagctttggaggaactcaaccgcttgaaggaaataattgattcaaagaacttctcatcacctctgaatcagctctagaacaggatatggctgatgcattgggctctgttcatcttctttaaccatgaaaatggtagaaatgggatcattgatctgttcttccaggacaggtacttgaatgctatacagacaaatgcacaccatcttattaggtatctagctactgcagttgttgtcaacaaaaggagaaggaatatgcttgaagagttgattaaggtcattcaacaggagcaccatagctacaaggatcccgtaactgaatttctggaatgcttatatgtaaactatgattttgatggtgctcaacagaaactcatagagtgtgagcagggttctggacaaagaaagcttgtaccttaaaacaggaggatacaagaagctggagtggttgtctgaaggcttttgaactgcttgaagcattagtgtagctttggtgcttttgtgactgatcaactctggagcagctagagtgatgtagttgtgggcttttgaacaatagctggagtgatatgaaacattagtgatgtagttgtgggcttttgaactgcttcaagctggagtgatgtcgttgtggtgcttttgtgactgatctagtcgtgaatgatattataattgtgatgcttttgtgtttatgtgatggatctatgattgtggtata

SEQ ID NO: 143690 - DNA, 565 bp, Zea Mays
ggcgactgttggagctcgacctcttacgctgacggtgtttgttcctaggtgaggaaaaacataaaatttgctagacttaggagtgacatgaaatgatacacctaatactgagggaatgagagaaacctttggctgatgccttgatgcatgttaattgcataaatatttgataccttgacacttggatgaaactggacgggaatgaaaccagagcagtagggtaagtgttggtgcatgcgctaccatggtggtagacttgagaccgagttgtcatggtgacatctcgggtttactagttttggttggtggctgctctggtgaaccataaggactgtgtgttggggtgccatctcacctaacttatttccagtgcgaccacatgagcttgtatgggcaagccttagcctaatcccactggctggcctggtagtcgtccgaggtggatatgttttgggttggggacccgagcggtcagaacccagggtttgtgggcggctaggcgaggttgagccatgactgggtgttggctatgatagagtcgtcttgggacggtgatgtgcgtgtg

SEQ ID NO: 143691 - DNA, 625 bp, Zea Mays
gccatattgagccacggacaaacgccgatgtgatgtgtcgccgcgattctctcccgcatcacaccgctcgcgtcgcgacagtcaaactcgaccacctagattgctgtgccacgccctcgacgtcatctcagcaccagcccgaagcgcccaggaatgcaaagccaactccaccgcgccgcgcgtgcttgcacagtcgtcgcacgccatgtgcaccattgagccgcgaccgcctgtaagaaggggctcgagctacccctcgacgccgtgcatcttcccgagctgagccaccaccagtcctccgtcgtgagctggttcgccgcggccgtccgtcgtcttgccgttgcagcaccccggaaggccagccgagccataggtaagcgcctcctccacctccggagtatcctccaccagcccatcatcgtttcccttgctgtttgagccgtcgtcgagcccagtccgccatggccgcacctcccacacagcagctcgcccgtcgacccgttcctcaaaacctcgccccaaccagacctgctacaggttggaggcacttctcccctctccccagcaacccccctcacctcccttgtggctggattttgaactcccgatggtcgccgtgagggaa

SEQ ID NO: 143692 - DNA, 1014 bp, Zea Mays
tattaatgtctagtatgttttcttattatgatatatgtttatactttgttgcttccacgtttatgcaaattttcaaaggagatgctgtcaaaattttatatatgaatgttagttgtgtagtttagtagcatttcggggtgtttgtggatcccggggtgttacagtgtcggtcagaggtattcaacatggaattggaattttatcttacagtccactaggaagagggtttttgtgcagtggagcaaaactagctgtcagagcaggacttccgcatgatgaactcaaactattacctatatgtgcataatacatggttcagctatgcttgcttttaaacatctccttgatctttgatacattatttggattcttctcaagtacttgatatatacaaggatcgcatccacgatgcttggagcaaaatgcttgatatatgcaaaatggaactatccatacatgagcaaaatagaactatgcatagttccagttttctctatctaaataaccattaactgtagttgattaatgggcttgttcaagtatagtgatgagataattatttccctgtctaatcacagttgttgaatcaataagaaaaaaagcaatagatcatgataataatgaggcattattcctttaaacctttaccagtaaatgttgtgcgtgcctgaaatattgatctggcattggtcattgaagcataatgtattcttattttctatcttttcaaatttccagttactagatttaatcacccctgtgtcgtatactcgtatagcaggggctgcctcatgggaaacttggttgggccattgatgaggattttggttcgtttgaggcacttgtgtaaagaagatgaatgcagaaggcgcttctattcaattttgactagaaagagatttcatcccctccaatcccctttgatctagacgcaaccgaacaaaccctcatgtgcaaacttctggaactgggtttgcccctttaaggcaattagtagtttagttcatatattaa

SEQ ID NO: 143693 - DNA, 177 bp, Zea Mays
gtctcaaaataatgtatctgatatccagtccatttctgtgttgcccgaaacagtcacaaaaactatccgaacgagatttagtcagaatcgtatacctcggattttccgtttcttgattcggaaaataaagtgtgtagccagttgtcgtctagtgcgttgatccttttgttcatcgct

SEQ ID NO: 143694 - DNA, 106 bp, Zea Mays
tttcagtgaaccatgattttacaggattggaatttgaactcttccctagctacttgttgtactgacttggcctatcgtcactgctttgatttctcaagggaatgcc

SEQ ID NO: 143695 - DNA, 1236 bp, Zea Mays
cttggagatatggagtaaaccttgttactaaggcttgttcatgtggacagtgggatgtaaccggaaaaccatgcactcatgccatagcattcataacttctcaacgaaatttgagaatcgaggactatgttggagaatgttattcggttcaaaggtttaaagatgcataccaatttgaggtgtatccaatgggagacaggttacagtggccgaaattggacccaggattcgaaatgaggccaccaaaacttgagggcaggcctgctggcagaccaagaaagaaaagaatcaagagtgctggagagccaggtaagagagggccatatcaatgcaagaggtgcttccagtatggccacattgaaaaaggatgcaaaaatccagtggtggagccacatgaagaccttccagacaaccatttgcagagaaagacaaaaaaaggcaccaaaaaaaaggaagaaaagtgagccagaacaggcttcaacttcacttgttcaaatatcgccatctagttctggaccaatgacaaggagaagggtggcgatgtccccaacctgcagctcaccttcagccagcaagcaaggagaagcaccgacttcaagcaaaaggagattaattatctagctgactgtgatggattgtatgtcatttgcatgtgtttgctacttatgcgatggacgtgtaagccatatattgtattttattgttagaatcaggcacccctgaattatattgttgcaaagtatcgattgggagagaggagggcaagagtgtcttttcccatgggctgctgggtaaaaaaaaagaaaacaattcaaaacagcctccgaactggttttgtggtagatttctaaagaatcgattctttgcatggtattaaagtgcaccaggaaagttcgatggtagatttctaaagccggaatctttcggtgccaagaaaccaattttcccaaacaggaactaccgaagtagaaacgagcaggaagcgccgaagctgagcagcacggagacaagcggaacagcgctgcgtccagtggcagatctgaattttgcttcatcctggtctccaggaagccaagcaccagccaccaggccagggttttggatctggccgaccgacagactcaagctgttcctgttcgttctataaaggtaggaatatgttatatttcactcgagattggtcactgtaataatacaattcactagctaaaaatatgtttgtagatatttaaaatg

SEQ ID NO: 143696 - DNA, 1114 bp, Zea Mays
ttcgccaaacacatcggcgcatcaaccaccccttccgctcatcctcttccctcccaccgattcgcccgctggctcgccgcccgcccgtagcctgcgcccgctcgagatctagaccagacgccgcagccgcggccgcgggctgacaggatctctgtcctccctacgcggcgaaccgctaggacggcgccgaagacgacgagggagacggggtcatggaggcgtcttcctgggacgcccttcgcaagcaggcacggaggttggaagctcagttagatgaccaaatgatcgcataccgtaaattggtttctatgaaatcagatggttcagagaatgatattgagtctgatatagaaagatcactgaagcagttgcagcaagtaaattcgcaaatgcaaacttgggtatcatcaggaggttctgaagttctttctcatactctgactcgtcatatggagattttgcaagaccttactcaggaattctatcggcttcgatcaagtctcagggtgaaacaacagcatgcttctctccttgacctgagagattttgacagagcaaagtttgatgttgaagagccatcagactcagctgatcaagctcttctcagggaacaagctgcgattggcaggagtactggacagatggataacgtgatatcacaagctcaggcaacactaggttctctcatgactcaacggtcaacattcggcggcatcactacaaagataagcaacgtcagcagccgacttccaacaattaaccatgtcctcgcgtctatcagaaggaagaaatccatggacactatcatcctttcccttgtcgcatcagtctgcgcgttcctcatcttcatctactggctgtcgaagtaggtttaccaaagcaaatgtattacggtgttgtaagcttgggatcacactaccggtacagatgatcgtgattggtgtttgtacaatattggttgattgaatgctattacgattcgggagtgctgtagccaccgtgtctccaagctgtgattgattgggcgcatggattgagttggcctatcagcaacttatattataatggagggaaaaaatcatttggtgttattgcacgaagaacatgaaagtgg

SEQ ID NO: 143697 - DNA, 939 bp, Zea Mays
gtagcattgcaccactgggctcggcagcggcacagcactgcggaggaggagcacggtcggtcgcacccggtcggcacggaggttggaagctcagttagatgaccaaatgatcgcataccgtaaattggtttctatgaaatcagatggttcagagaatgatattgagtctgatatagaaagatcactgaagcagttgcagcaagtaaattcgcaaatgcaaacttgggtatcatcaggaggttctgaagttctttctcatactctgactcgtcatatggagattttgcaagaccttactcaggaattctatcggcttcgatcaagtctcagggtgaaacaacagcatgcttctctccttgacctgagagattttgacagagcaaagtttgatgttgaagagccatcagactcagctgatcaagctcttctcagggaacaagctgcgattggcaggagtactggacagatggataacgtgatatcacaagctcaggcaacactaggttctctcatgactcaacggtcaacattcggcggcatcactacaaagataagcaacgtcagcagccgacttccaacaattaaccatgtcctcgcgtctatcagaaggaagaaatccatggacactatcatcctttcccttgtcgcatcagtctgcgcgttcctcatcttcatctactggctgtcgaagtaggtttaccaaagcaaatgtattacggtgttgtaagcttgggatcacactaccggtacagatgatcgtgattggtgtttgtacaatattggttgattgaatgctattacgattcgggagtgctgtagccaccgtgtctccaagctgtgattgattgggcgcatggattgagttggcctatcagcaacttatattataatggagggaaaaaatcatttggtgttattgcacgaagaacatgaaagtgg

SEQ ID NO: 143698 - DNA, 1598 bp, Zea Mays
atccgttcggatccgagagtcctgcagagcccatcctgttcctgtccccctcgagcaatcgagctctacagctgcacgctcgcttacgcggagacacagacgctgagacacacgcaggtcatgatgctgctcatggactcggggagccgcggtgactgctccccggtctgcttggacctcagcgtcggcctttcgccgccgtcgccggggagcggcccggaaacgacagctgacgctgagagactcgaccgtcccgccactggctgctgggggccacggacatcgtccctcgctgacgggaaggacgaggccaagaccctggaggccaggctcacccaggtcagcgaggagaaccggcgtctcaccgagatcatcgcctacatgtacgccagccaggtcgccgcgcggcggagtcccgacggcaggaagaggagcagggacagcctggagccgtcgaattcgggcgacgccaacgctgccgtcgagagcgccgccctcagcgacgagggcacgtgcaggcggatcaagctcaccagggtctgcaccaagatcgacccctccgacaccacgctcaccgtcaaagacggctaccagtggcgcaagtacggccagaaggtgacgcgcgacaacccgtccccgagagcctacttccgctgcgcatacgcaccatcctgccccgtcaagaagaaggtgcagaggagcgcggaggacagcgccatgctggtggccacgtacgagggcgagcacaaccacccgagcccgacgcgcgccggcgagctccccagctccacctccatcaactcctccggcccggccatcacgctggacctcaccaggaacggagccggcgccgtgcgggggctcgatgccgccgccgaggtgcccggcctcaagaggctgtgccaggagatcgcgtcaccggatttccgcacggcgctcgtggagcagatggcgcgctcgctcaccaaggatcccaagttcaccgacgcgctggctgccgcgatcctgcagcagctgccggagtactagtgtctagcgccccacctgctttcagtgcttattacagatatcagagcgcccgtcttcaaagagcagcagttctttcatcgtcaggaaacaaaaaaccgctttacgtttaggggtagctcgaaaactctatttttaagggatttttattatctcaaagaaaaataaataaatttttttaagaaaatagaaattcctttgaaaaatagagtttctaaactaagacttagggttagtttaggaatcacatttttccatgtgatttctatttttctaaagaaatttagtttatgttctttttagaaaacagaaatcccttagaaaaataaagcttctaaactagctcttacttagattagattagagccaatctccctcaaatttattataggtgtacctgtaagtttctttcttctgttcttctggctaggatctgaactgcactagtactactgtacatttcacatgtgcatagagccatagaaggccgttgtcaagtaccgcgactgcgtcctacctgaatgtgatctgcctagttatcaatagggaattttatactataaaatttaagt

SEQ ID NO: 143699 - DNA, 1644 bp, Zea Mays
atccgttcggatccgagagtcctgcagagcccatcctgttcctgtccccctcgagcaatcgagctctacagctgcacgctcgcttacgcggagacacagacgctgagacacacgcaggtcatgatgctgctcatggactcggggagccgcggtgactgctccccggtctgcttggacctcagcgtcggcctttcgccgccgtcgccggggagcggcccggaaacgacagctgacgctgagagactcgaccgtcccgccactggctgctgggggccacggacatcgtccctcgctgacgggaaggacgaggtaactgaccgacgaccatttcctcgccgctcggtttccacaatctatcggcgtcgtcgtcgtccctgaaatcctgaaaatctatcggcatcggtggccacaatgctgtgtgatgacaggccaagaccctggaggccaggctcacccaggtcagcgaggagaaccggcgtctcaccgagatcatcgcctacatgtacgccagccaggtcgccgcgcggcggagtcccgacggcaggaagaggagcagggacagcctggagccgtcgaattcgggcgacgccaacgctgccgtcgagagcgccgccctcagcgacgagggcacgtgcaggcggatcaagctcaccagggtctgcaccaagatcgacccctccgacaccacgctcaccgtcaaagacggctaccagtggcgcaagtacggccagaaggtgacgcgcgacaacccgtccccgagagcctacttccgctgcgcatacgcaccatcctgccccgtcaagaagaaggtgcagaggagcgcggaggacagcgccatgctggtggccacgtacgagggcgagcacaaccacccgagcccgacgcgcgccggcgagctccccagctccacctccatcaactcctccggcccggccatcacgctggacctcaccaggaacggagccggcgccgtgcgggggctcgatgccgccgccgaggtgcccggcctcaagaggctgtgccaggagatcgcgtcaccggatttccgcacggcgctcgtggagcagatggcgcgctcgctcaccaaggatcccaagttcaccgacgcgctggctgccgcgatcctgcagcagctgccggagtactagtgtctagcgccccacctgctttcagtgcttattacagatatcagagcgcccgtcttcaaagagcagcagttctttcatcgtcaggaaacaaaaaaccgctttacgtttaggggtagctcgaaaactctatttttaagggatttttattatctcaaagaaaaataaataaatttttttaagaaaatagaaattcctttgaaaaatagagtttctaaactaagacttagggttagtttaggaatcacatttttccatgtgatttctatttttctaaagaaatttagtttatgttctttttagaaaacagaaatcccttagaaaaataaagcttctaaactagctcttacttagattagattagagccaatctccctcaaatttattataggtgtacctgtaagtttctttcttctgttcttctggctaggatctgaactgcactagtactactgtacatttcacatgtgcatagagccatagaaggccgttgtcaagt

SEQ ID NO: 143700 - DNA, 1010 bp, Zea Mays
gttacgtagtagtagtacttaacaacaacacgtggcgccgccgtggcgctgatagatgcggccatggacagtaacggcgagtgctcgtcgccccccaccctcagcgccgcgcttctgcccctcttcggcccaccgccggagccgctgccggagagtctcgaggacaagctgaggcgggtgagcgaggagaaccggaggctggccgccgcgctggacgccatactcgccgaccgctccaccccgcgagcgctcgccacgtcgtcgccgtcccggggcaatgcggtggccgccgcggagccgccgcggcccaaggtccggacggtgtgcgcgcgcgccgagccgtcggacgccgacgccaaccacctcagggactgctaccagtggcgcaagtacggccagaaggtgacgcgggacaacccgtatccgagatcctacttccgctgcgcgtacgcgccctcctgccccgtcaagaagaaggtgcagagaagcgcagacgacaatctgatgcttgtggcgacgtacgagggcgagcacaaccatgagcaacgtgcccagagcgaatatgtcgtcactgacgcgtcgacgagcctgcaccaggccgggtcgtcactgccgcgctcgatcatctccatcgattcgtcgggccggaaaaagatcaccattggcctggccgcggaccaacggccgccggcggattcgaatgccggggcggccgtcggggagattattgtgacgcctgagtttcggaaggctctggtggacgagctcgtgaatttgctcacgaatgattccgagttcgtcgagaagctggcgagcgccgtggctgatagggtgatggagagaataccagggcacatattctgatgcatggcgctcgtggatgcaaaataaatgtgaatatacacatgtttttttttgcggttgaagaacattaatatgtctatgtaataaacttaggtcttgtctattttcatagtgctaaagtttagcacaacattttttttactaaa

SEQ ID NO: 143701 - DNA, 1939 bp, Zea Mays
ccaacgactttgcaaatcccgtgtgccgcactggccgagcccacattcgaaccaaagtccccccgggcccccccaaggaaaaccatgtgccgcgcccgccacgttcccacgcgccactaaatcagcagcgcccggccgcccggagctgccagtagcggcaacagcaaaacaagaagcagccagctaccggagcactagtaaacagtaagcagcagagagcatggcgagatcagggcgggaagcggagcccggagaggaggaacggaagctggtgctgggcaagtacgagctgggccgcctgctggggcagggcaccttcgccaaggtttactacgcgagggacctgagcgccggcgccggcacgggccacagctgcagcgtagccatcaaggtgatcgacaaggcgcggctgcggcgcacggaggggatggtggagcagctgcgccgggagatctccatcatgcggatggtgcggcaccccaacgtggtgggcatccgggaggtgctcgccagccgctcccgcgtcttcgtcgtcatggagtacgcgcgcggcggggagctcttcgccaaggtggcccggggccgcctcgacgaggaccacgcgcgccgctacttccagcagctggtcgccgccgtcggcttctgccaccgccgcggcgtcgcgcaccgggacctcaagcccgagaacctgctgctggacgaggcggggcggctcaaggtcaccgacttcgggctggccgcgctgcccgagcagctgcgccacgacggcctgctccacacgcagtgcggcacccccgcgtacgtcgcgcccgaggtgctcaggaagcgcggctacgacggcgcccgcgccgacctctggtcctgcggcgtcgtgctctacgtcctcctctgcggcttcctcccgttccagcacgacaactacgtcaagttgtaccagaagatcttcaaggccgactaccaggtgccgccctgggtctccggcgacgcgcgccgcctcatcgcgcgcctgctcgtcgtcgaccccgccaagcgcgcctccatcgccgagatcatgtgcacgccgtggttcaggaagggcttcgtgccgcccgtcctttcgcccccggtgacgcccaagaaacagcagctggacgaaggcgctgccctcttcgacaacgacgacgacgacaacagcaacagcaaccactctggcgccacctcccctcggtcgtgcaacgcgttccagctcatctcgtccatgtcctccgggttcgacctgtcggggctgttcgagagcgagcagaagaccgcgaccgtgttcacggcccgcgcgccggcggccaccgtggtggagaagctggagtccgtggcgcgcgccctaggattcgaggtcaccagggggaaaggctggaaggtgaggatggaggccaaggccgagggcacgaacggacggctcgcggccaccgccgaggtgctcgaggtggccgtggacgtgaccgtggtcgagttcgtgcacgacgccggggacgcgctggactttaacaagttctgcgccgtcgacgtccgcccggggctcacggagatcgtctgggcgtggcagggcgacagccccgccgccgccgtcggcaccgcgtgaacaagcgtccccgtctgtcacgtggaagttgtagcaactttgcgtaggagttaaacacggctgcactggcaccagctttttatagcatgtaaagtttcaagttctcgtcgttgcttcgagactgccatggtggctagttcgttgtgtgccatatgctgtacaggaaggaaagagtcgaatcgagccggggagttttcgatcgacttgccaagttttgtacgatcataacctgtattttctggagatgtgtgcatacaaaattttgcccgtgatcaaatttagttttggtccccatatattttttcccatcaggatgattctacc

SEQ ID NO: 143702 - DNA, 1550 bp, Zea Mays
tcccgacgcgtcatgggcccttcctcgctcccgcctccactccgtagctcccacctcacccccgctcctcgcaggctcgaccccacccgttcggtccgcgtgcccgcctcacgttggtccgccgctaagcagcagagagcatggcgagatcagggcgggaagcggagcccggagaggaggaacggaagctggtgctgggcaagtacgagctgggccgcctgctggggcagggcaccttcgccaaggtttactacgcgagggacctgagcgccggcgccggcacgggccacagctgcagcgtagccatcaaggtgatcgacaaggcgcggctgcggcgcacggaggggatggtggagcagctgcgccgggagatctccatcatgcggatggtgcggcaccccaacgtggtgggcatccgggaggtgctcgccagccgctcccgcgtcttcgtcgtcatggagtacgcgcgcggcggggagctcttcgccaaggtggcccggggccgcctcgacgaggaccacgcgcgccgctacttccagcagctggtcgccgccgtcggcttctgccaccgccgcggcgtcgcgcaccgggacctcaagcccgagaacctgctgctggacgaggcggggcggctcaaggtcaccgacttcgggctggccgcgctgcccgagcagctgcgccacgacggcctgctccacacgcagtgcggcacccccgcgtacgtcgcgcccgaggtgctcaggaagcgcggctacgacggcgcccgcgccgacctctggtcctgcggcgtcgtgctctacgtcctcctctgcggcttcctcccgttccagcacgacaactacgtcaagttgtaccagaagatcttcaaggccgactaccaggtgccgccctgggtctccggcgacgcgcgccgcctcatcgcgcgcctgctcgtcgtcgaccccgccaagcgcgcctccatcgccgagatcatgtgcacgccgtggttcaggaagggcttcgtgccgcccgtcctttcgcccccggtgacgcccaagaaacagcagctggacgaaggcgctgccctcttcgacaacgacgacgacgacaacagcaacagcaaccactctggcgccacctcccctcggtcgtgcaacgcgttccagctcatctcgtccatgtcctccgggttcgacctgtcggggctgttcgagagcgagcagaagaccgcgaccgtgttcacggcccgcgcgccggcggccaccgtggtggagaagctggagtccgtggcgcgcgccctaggattcgaggtcaccagggggaaaggctggaaggtgaggatggaggccaaggccgagggcacgaacggacggctcgcggccaccgccgaggtgctcgaggtggccgtggacgtgaccgtggtcgagttcgtgcacgacgccggggacgcgctggactttaacaagttctgcgccgtcgacgtccgcccggggctcacggagatcgtctgggcgtggcagggcgacagccccgccgccgccgtcggcaccgcgtgaacaagcgtccccgtc

SEQ ID NO: 143703 - DNA, 1130 bp, Zea Mays
attccaatccaaatctctaatgggaagcgaaggtcagagccacctattcaggctgcaaagtttgcatcggagggtgggatcatactgaggcaacaccttccaatatttccacactggaaggagtacaagaagcaagagaacgagggtaaaattacagactacattgggaagcttgctggtcaattcaccatggatgttgagagtaatgcagtaaaagatgcatgtgttgatatgctaaagggtggacagcgccaaatgaggtataggctggaaaaaagtacttcactggagttcctgcaaatcaagtgaggactacatcacctaacaattgtgtgaagaacaaacttaatcgtgagaaggtgcaatttccacagtgcacaggatctcaatcatatgttgcaaaagcttatgtagtgagacaagaaaaatataaagatgtcgaacctagtgcaattgatcttttcaaggagatgcattgcagcaagaaaaaaggatttaattaagttgttcagaaagccataggtgatatggaagcaatggtggcaacaccagctgaagatggacagcttgcaaagtctgcaacagaagttgtttccaatgtgctaccgggttcaagtaaatttcttcacaatgctggccttttgccctcctccaagagaagcaacacagggactgtttcagcaagaatgcaagagcttcagtctcaattggacaatgagaggcgagaaaaagatggacttcgagaagataaggataccttaaaagtcaagtcacaagcatctcaggcaaccattgctaatcaatcaactgagattgcagatttaaagaagtccttagcagaaaatagcatcctacttcgacagatattaagtattagtcatgatcaggtgaatccttaagcatgcttgctaagatgatggtgtcaaccatcctgaagacacatctcacaaaactgtggacctctttttatcctcatgtttgctatatggaactgcaacttacagtctattatatgtgttctcttgttatagagttttagtacttgtctggttaaagaattatgaaccatgttcttttgtgtgttggacatattatgcttgaaatatatggatgttggaaaaagttgtaac

SEQ ID NO: 143704 - DNA, 609 bp, Zea Mays
atgcctccagggaggaagggaatacgaagcacaagggaacccccaccagaaatcacttctactgagtatgagaaacaaagggcagcaaatgtgatgaggaacaatcagatgttccaacggcttgggattaatcagttacgcacaatgatgactgctacaagagtaaagagcaaatatgatggtccagaggaatcagggtctttgtttgacggcgaggatagtgaaggctctgagccagaggaggattcccatgttgcacaaggtgtacgtagccacaacccaactcatgttgctgacaaacctacacaacaaacacgaggttctaaaagggttgtggcccctgatgttcatggacaacagattagattcactaggcaaaggagtgctgccataaatcaacaatcctccctaagcctaactactactacacaagctggttcaagagccaccacaaaccaagaatccacccaaaacttggctgctgcaacacaatttacttcaagtgttgccactgagcaagatcacactgtaggcctgactactgctgcacaacctagttctcccacacaagctgaggtcaatgaccacaatagagatgaaggcaagtga

SEQ ID NO: 143705 - DNA, 1389 bp, Zea Mays
aaaattgtgagctggaatgtccgaggtttaaattccaaagctcgtcaggatactgttcacaatctgataaactccttcaaagctaatgtggtttgtatccaggaaactaaaatggctaaaatttcattgcatacaattttggctgtccttgggagtaattttgtgcacaggctagcccttccctcagttgggtctagcggggggattctcgtggcctggagtaatgagattggtccggccagcgcttctagggtggatcaccatagtgtgacaattcagttcagtccacgtgaccagcagccttggtggttaacatgtgtttatgggcctcaaggaaacagcgacaaaattcagtttatgcaagagcttcgcaacgtgagatctgcttgtcctgggccctggattttaatgggcgacttcaacctcatctacaaggatgatgataagagctctggcaattttaataggcaccttatggacagattcagaaggctcattaatgatctgggggtgaaagaattggccttacatgggaggaaattcacttggtctaatcgtcaagatccacccactcttgtcaagcttgatagaatgttctgctcgccggattgggaacaactctttcctaattgccttctgcagagtgctagcactaacgggtctgaccattgccctctgctccttgggcttcatgatctatctcctgggcgcaggaggttccattttgaatctcattggacaaaggcacctgattttctatcgacggtggaggccgcttggaactctgtttcctcctccccttgtccttttgtcaccctctccaaaaaattcagagccacggtcaaacatcttcagagctggtctcaaaaaaggacgggacatattacctctcaacttgggatggcaagggagattatgcataagttgcagtctgctcaagatttcagatccttgtcggtgttagaaaattggttggtggaccagcttgatggtcgcattgtggccctctcatcactgcagcgttctatggctcggagtcgctccaggatctcttggttggctgaaggggatgccaacactacctttttccacctccatgctaaataccggaaaggcaagaattttgttggcaatctgatttctgatgatggatcggtgaagacctctcatggggataagttggaggttatcagtgattttttccacaacttgctggggtgttcacctgaccgggcgcacaccattgacctggctcagcttgacatccctacccatgatctgacatcgctggacagcccgttcactgaagatgaagtctggaaaacagtcctatctcttcctttaaacaaggcgcccgacccggatggttttactgggaaattctataag

SEQ ID NO: 143706 - DNA, 1434 bp, Zea Mays
aatcctcagtaaaggtattcaaccttcccgaatgagaggctgctttcagctgactgtaaggagttcattgatttgaccttgcaacagatccctgctactagggatggcaatgggtacccgaaacccgatgggtaaaaaccctattagggcacgggtatggcggattttgatacccatgagtattttattgggtcatttgttgtgcccatcgggtatggtgggcgtgggtatgttttctattgccccatacccgctacccgatggggaacccgctaatatatggcatgtgggtccggatttatgtctcatataaaatgaatttgctcccgatgggtaaaaaccctattagggcacgggtagaatcaatgctacgttttgtgtgatttgaaggcatgatattgccatttaatgttgaatattgttgaacctgtgataaaattatgttgggttcgatacatttattatgctagtacttatttttgtgatttaaatgatcctgtctatcgtaatgttaatgggtatgggtacccgatgggtacccgctacccatgtgggtatgggtatggcttcatgtgcccactgggtaccttacccactgccatccctacctgctacgctgccttccatgaccaagagtggggagctccagtacacgacgacaagaaactgttcgaaatgctgactctgtctggtgcactggccgagatggcatggcctgcgatcctgagcaagagggacaccttccgggaagtgttcatgaactttgaccctctgctggtggcggagctgaacgagaagaaattcttggcgccgagcagccctgctagctccctgctgtcgcaacacaggctgcgcgtagtcattgaaaacgcacgtgagttgctgaaggtcatcgacgagtttggatcgttcgacagatactgctggagcttcatgagcggaaacaagccaacggtcggcagataccggcacacgcgggaggtgccgctgcggacggccaaggccgacgccatcagtcaggacctgatgcggcgggggttcctcggcgttgggccgacggtggtctacgccttcatgcaggccgtcggtatggccaacgaccacctcgttacctgctaccgcttcgaggagtgctgcgccgttgaatctttcgctgcgtctgatgagggctacgccggtgacaacggcaagaagccgccgccggcggtggcgagcgaccaggaggcaggaggtgagtatgctgtgtgggctggtgcagtgcgtcgccttggagccgtcgacgtcgagagccgccgccacctccactgtgatcagcagcgtctcgtagcaggaaactccggttttacctgcatgctgttgactctaacgcatgagtagggagtaggagagttgatttattgtttgctgctgactgctgtgatgcatgctgcatgc

SEQ ID NO: 143707 - DNA, 1266 bp, Zea Mays
agcaagttttgcggctggatgcattttagcgaagtcaggtgtcggcgtatgccaaatgtctcgttgagacaccgctgcagtgcagactcgccgaaaacgactcctcacgaactagtccgtttccgtgcgccgctgctgacgagggagtgggagggatcatggtggcgccggatgtgaaggcggagacgatgaagctgatggatcagcggggtgccctagaggcggagatggacgccatcatcgcccgcctcactgcggcaggcggaccgggcatcaccggcggcctcgtcgacgccgagggtttcccaaggtccgacatcgacataccgaacgtcctcgcccagcgccggaggcttgctgaattgcgaaatgaccacaaggatattacaaacaaaattggtaaaaatcttgaggttttacactcagcaaagttatcaaggaatgaacaatcaacctcaaggagatctgatacaacagatccttcacactttggatcatctcaaagtgaacctatggaagaggaccatgtgactggacttccttttgccatgattgatgaaatcgctgatggttctcctgcttctgtggatggtttgcaacttggagatgagattgtaaagtttgggaatgtggaagctggtgatcagttgcaggaaaggctcatgtctgaagctctttccaatgaggacagtcaagtatctttagtcatcattcgccagggatcagcggtgaatttaacaattacaccaaggaagtggcatggaagaggacttctggggtgccatttcagaatgctatgaagagtccgtcgttcttcagcaggatgcgttggtctatcatgcttgcactcgtggagagtggagacggctctagcgatgccatttcagccgcaaagtgaactgatttaaccgaatgtgtgacatcttccaaaatactggttgcgtgtacttaacttgtggagcgcttgaaacatactagtgtaccaggctgcctgtgttgagacattttacttgtacacatggtcggttttcgttcttcctcgcttgcgtatcggtatcgcacaccaacttgaaattgaaagtcgtcaacgttcttctagttcatacggtcaggaccctgagtttgcatcaatcaacagctaaaaaagggccatatgctagcgatgcaagtttgaatccatgagcagattagggaacctttggtatcagctctacaccttctgtagggatgtttctgtcacgcttgagaataatatatgaggctaac

SEQ ID NO: 143708 - DNA, 3663 bp, Zea Mays
gaggcgcgcagcacagggcgaaaaagagagagacgatgccgtattgacattgcaacaagcaacgagaagggcggctttgtcaggcgcggaggccagagagcagcagacagagagaaagagagagagagagagagagttgggtgcagtgcagcagtgcagagagcagagacggagcggagcgaccgagagagagagagaggggaagtttaataatatatcccatcactcacacgccacggcatcattcgccgcctccttcctcctcccgctcgtcgccgttcctcctccgagcaccagcagcgcgccccctccgctctcccttagctcaccagccgcctcttcgtcggagcagcaacagcagctgtgcatgggagtgggagcacggctctgagaggaaaaagggaagaagaaaggtgaccaaagggaaacaaagggaaccaaaggactaggaggatgaagttcatgaagctgggctccaagcccgacgccttccagtccgacggcgccgacgtccgatatgtggtctctgaccttgcaacagatgttgtggtgcatgttggtgaagtaaaattttacttgcacaagtttcccctcctttccaagagcggcaagcttcaaagattagttctgaaggccgctgaggacgagactgatgaggttcgcatagatgaccttcctgggggagcaaaatcattcgaaatatgtgccaagttctgctatggaatggtggtcaccctcagtccacacaacgttgtagctgcaagatgtgcgtcacagtatcttgaaatgaccgaagatatggaaaaggggaacttgatatttaaaatcgaggtcttcataaattctagcatacttcgtagctggaaggactctatcattgttctccagagcacaaaggctctatcaccatggtctgaagagctgaaggttgtgggtagatgtatcgatgccatcgcttcgaagacgtctgcggatcctgccaatgtaacctggtcatacagtcatagtagcaagaaaggaggagcttgtgctgaaatagtcgagccagcaggaaagccatcaatagctccaaaagattggtgggttgaggacttgtgtgaactggatgttgacctgtacaagagagtcatggttgctatcaaatccaaggggagaatgtcacctgaactgataggagaggcacttaaagcctatgcagttagatggctgccagactcctacgatgcattagttgccgaggattacatgaggaggaatcaatgtctggttgagacaataatatggttgctgccttctgacaagagctcgggatgttcttgcagatttctcctgaaactgttgaaagtggccatactagtcggaggcggggagcacgtgaaggaagagcttatcaggaggatcagcttccagttgcacaaagctactgttaaggatctcttattacctgccacttcgcctaatgatggtacctatgatgttcggctggtgcataatcttgtccagagatttgttgcaagaacagcgctgtctcataatggcggtttcattgagaagtccgacgaaaagatgattgagctcaacttcgagcaagaatccattttgtcggtaggagagcttgttgatggctacctgtctgaagtagcttcggatcaagacctttcgttgtctatgtttgttgaactggcgactgccgtgccagaggtggctaggcctgttcatgacaacctgtactatgcagtcgatgcatatctcaaggaacacccagacataaacaagtccgagaagaagaagatttgcagtctggtggatgtcaagaagctcagcgcagatgcatccgtgcacgccacacaaaacgaccgcctgcctctccggttggtggttcaggtcctcttcttccagcagctgagggccggcccaagcaaagaactcgccctgattgacaatggagaacacgcttgcacacggcctacgcaggatcaatgtgaccgtggtgaaaggcggataccgaagcatccaaactcactgaataagcaggtgacaagcctgagcgcgagagagagccagcagcaccggatcagcgagcacaggggcggcaggaacagctttaaagaccagcttgggggcctcctgctgcagtcgcgatccaggaggatctttgacaagctgtggagcagcaaagggcagggcgagcatggcgggaaaggctcggagacgtctggtagctcgcagagcccaccgttgtcagcaaagcctgcagaagtgaagccctcccctcttccccctcttaggggcaggaggtactctgtttcttagttttttttgggggtgggggctctcctagtttagggctctgggataggttgttgtacagaaggtatcatctgctgccaatccctttttgttttgtacgcagatcaatctgctgttctatgtgatgatccatgccgtagcttttactgtagcgtaatttcaactgggagcaaatatttaccagggcctgagttgttaaaaatgtttcaatggcaaaaggtgaaaagaaaaatcaacaaaaactcgtaccttgaagaacatgaatttcatgcgctacatcacgcaggactgccataaggaaccaatcttacaaaaaaaacgagagtatttcagtgcaaaagcaagtcaatttggaacaatgccgtcaaaaccaaactacagtataaaaaagaagacgcaaccacaccataagtatgaaaactgactaacatagcaaggttcaaatcaaataataataatgggtaaacgccgagacatgataatctggaacaattccatatcagacaataacttggaagacagccccttccactgggcaaaggcgcaaagctgataatttgttactatctccttgcaagttcaacatcaggcctgcacatttcgcagccaacacaacagtttatctgactgctagttcatcaggtttagactagtaaccacccctcagagcaaggacaagatggaggacagatccaccctcgatgttgtagtcctttgcggtcttgtcatcagcaagctgcttaccagcatagatgagcctgcaaaggcgaccaaagtagcttcatcagcaccagacgccaggaaagcataactggtttcaagtagaatgagcattccgaagaacaaatagtaacagttgcagatataacaaaaaaaatcagcatggtacctttgctgcacgggaggaatgccttctttctcttcaacacgctccttgatcctgtcaatcgagtcagtgggttcaatgtcgatctcgatctctttcccagtgagagttttgaccttgatcatggttccacccctaagcctgaggaccaaatgaagagttgactccttttggatgttgtagtcagccagcgtgcgtccatcctccagctgcttgccagcgaatatcagtcgctgttgatctgggggaatcccttccttgtcctggattttggctttgacgttgtcgacggtgtcgctgctctccacctcgagggtgatggtcttccccgtcagggtcttcacgaagatctgcatcttctcctcgcctcttcctccctcgcacagtcgtactagacggtgacgaactcgaaccttgtgacaacgaagccgaagaacgcccaagaaaatttcctttttctttaattt

SEQ ID NO: 143709 - DNA, 2571 bp, Zea Mays
gaggcgcgcagcacagggcgaaaaagagagagacgatgccgtattgacattgcaacaagcaacgagaagggcggctttgtcaggcgcggaggccagagagcagcagacagagagaaagagagagagagagagagagttgggtgcagtgcagcagtgcagagagcagagacggagcggagcgaccgagagagagagagaggggaagtttaataatatatcccatcactcacacgccacggcatcattcgccgcctccttcctcctcccgctcgtcgccgttcctcctccgagcaccagcagcgcgccccctccgctctcccttagctcaccagccgcctcttcgtcggagcagcaacagcagctgtgcatgggagtgggagcacggctctgagaggaaaaagggaagaagaaaggtgaccaaagggaaacaaagggaaccaaaggactaggaggatgaagttcatgaagctgggctccaagcccgacgccttccagtccgacggcgccgacgtccgatatgtggtctctgaccttgcaacagatgttgtggtgcatgttggtgaagtaaaattttacttgcacaagtttcccctcctttccaagagcggcaagcttcaaagattagttctgaaggccgctgaggacgagactgatgaggttcgcatagatgaccttcctgggggagcaaaatcattcgaaatatgtgccaagttctgctatggaatggtggtcaccctcagtccacacaacgttgtagctgcaagatgtgcgtcacagtatcttgaaatgaccgaagatatggaaaaggggaacttgatatttaaaatcgaggtcttcataaattctagcatacttcgtagctggaaggactctatcattgttctccagagcacaaaggctctatcaccatggtctgaagagctgaaggttgtgggtagatgtatcgatgccatcgcttcgaagacgtctgcggatcctgccaatgtaacctggtcatacagtcatagtagcaagaaaggaggagcttgtgctgaaatagtcgagccagcaggaaagccatcaatagctccaaaagattggtgggttgaggacttgtgtgaactggatgttgacctgtacaagagagtcatggttgctatcaaatccaaggggagaatgtcacctgaactgataggagaggcacttaaagcctatgcagttagatggctgccagactcctacgatgcattagttgccgaggattacatgaggaggaatcaatgtctggttgagacaataatatggttgctgccttctgacaagagctcgggatgttcttgcagatttctcctgaaactgttgaaagtggccatactagtcggaggcggggagcacgtgaaggaagagcttatcaggaggatcagcttccagttgcacaaagctactgttaaggatctcttattacctgccacttcgcctaatgatggtacctatgatgttcggctggtgcataatcttgtccagagatttgttgcaagaacagcgctgtctcataatggcggtttcattgagaagtccgacgaaaagatgattgagctcaacttcgagcaagaatccattttgtcggtaggagagcttgttgatggctacctgtctgaagtagcttcggatcaagacctttcgttgtctatgtttgttgaactggcgactgccgtgccagaggtggctaggcctgttcatgacaacctgtactatgcagtcgatgcatatctcaaggtatgttcaaacgtagaaggcaaacacttcgtgcgcctagcttgatgttcagttattgctgttgtattgtagtacattgtttggatgtttatactatgaatggcaaatctgttctttctaatcaggaacacccagacataaacaagtccgagaagaagaagatttgcagtctggtggatgtcaagaagctcagcgcagatgcatccgtgcacgccacacaaaacgaccgcctgcctctccggttggtggttcaggtcctcttcttccagcagctgagggccggcccaagcaaagaactcgccctgattgacaatggagaacacgcttgcacacggcctacgcaggatcaatgtgaccgtggtgaaaggcggataccgaagcatccaaactcactgaataagcaggtgacaagcctgagcgcgagagagagccagcagcaccggatcagcgagcacaggggcggcaggaacagctttaaagaccagcttgggggcctcctgctgcagtcgcgatccaggaggatctttgacaagctgtggagcagcaaagggcagggcgagcatggcgggaaaggctcggagacgtctggtagctcgcagagcccaccgttgtcagcaaagcctgcagaagtgaagccctcccctcttccccctcttaggggcaggaggtactctgtttcttagttttttttgggggtgggggctctcctagtttagggctctgggataggttgttgtacagaaggtatcatctgctgccaatccctttttgttttgtacgcagatcaatctgctgttctatgtgatgatccatgcc

SEQ ID NO: 143710 - DNA, 836 bp, Zea Mays
cagcgaggcttgtaaagcatccgaccaaattgtggagaatggaggaaccattcctggtgctgcgtgtgaaaatgagctcgacaaacaactattgttgattactgaagagcgcaattgtttactctctgagacacaacagatgagatccatggtcgctgaagcagaggttttgaaagagaattgtaacagaaagttaatacatgccaaagatacaatagatgagttgagctctaggatatctgtcatggaagccaatctgaaaaatgatactgcgtctaataacaaagagaagacaaagcttcgcatggagattcgatggctgcgtccacaacttgacgcccatcgtggtcggctcaaagaagcgatgaatgagatgaagaccatggatgccaaataccaagaagcatgcaccacgctgaagaaggacctttctcagcatggtcgcgagatcctgaggttgagagagatgcttaaagaatcacagagcgcatcaaactgaggctataagtttctcatatctaatagctcacgtagcaaaatgcagatatgtcgtcagccctatggaagcactcgttgttgcgtttgttcgcttcggaccttcctggtaccgtggttcactgactttctttgaggtgtggtgcgattccatgcgtcagctacttctaatccaatgcgcttgcgctaccgtaaagaatcctgatgtatgggggcattttgctgttcaaactgtaccttttctttctatttagtctatagtgtaacaactacgataagtagcaggaagattgagcgaagcttgagttatctatgaaacgatgaaaatgtctaacgcactg

SEQ ID NO: 143711 - DNA, 770 bp, Zea Mays
cagcgaggcttgtaaagcatccgaccaaattgtggagaatggaggaaccattcctggtgctgcgtgtgaaaatatgagatccatggtcgctgaagcagaggttttgaaagagaattgtaacagaaagttaatacatgccaaagatacaatagatgagttgagctctaggatatctgtcatggaagccaatctgaaaaatgatactgcgtctaataacaaagagaagacaaagcttcgcatggagattcgatggctgcgtccacaacttgacgcccatcgtggtcggctcaaagaagcgatgaatgagatgaagaccatggatgccaaataccaagaagcatgcaccacgctgaagaaggacctttctcagcatggtcgcgagatcctgaggttgagagagatgcttaaagaatcacagagcgcatcaaactgaggctataagtttctcatatctaatagctcacgtagcaaaatgcagatatgtcgtcagccctatggaagcactcgttgttgcgtttgttcgcttcggaccttcctggtaccgtggttcactgactttctttgaggtgtggtgcgattccatgcgtcagctacttctaatccaatgcgcttgcgctaccgtaaagaatcctgatgtatgggggcattttgctgttcaaactgtaccttttctttctatttagtctatagtgtaacaactacgataagtagcaggaagattgagcgaagcttgagttatctatgaaacgatgaaaatgtctaacgcactg

SEQ ID NO: 143712 - DNA, 1329 bp, Zea Mays
atgtatatatcaatatataaagttgaaggactgcaatgcaacagtacaatagctatagcaggacaacagtacactgattcagtggcggacccaagatttcttgactggcttcagcagatcactctagctgcagaagaacaagcaaaggttgctaatgagaacctgtccacactatctgctactgtaaaatccaaacaggaactagcatatgaattcctcggtaatttattgatggagactcaaggaataaatgtggagatggatcagtggagaaactcggttgacagtgctctttcttttattgatgaactctttcagaatctctgcatcatggcacaaggcattcgtgtatgggactatgaaaaactatcaacctgtttgatggacaaagtttacaaacttgaattggagaagaaactattggaggaacagtcccaagaccaacaaaatgagatttataagctgaaggccaatctggaaagctgtgagaaggccatagatgactgtactcttcaacatgaattggagaaggatgccattcttttagagctcctaaacctccagaaggaagtatctatcttgtcatcatcttctttgatgaaagaaaaggaatctatccgaaaggaacttgatagaactaaatcaaagttaagagagacggaggacaaacttaagaattccattcaggagaaaacaaaacttcagagtgagaaagcagaggcccacaaagaaattaagaaattgcaaagccagagaactttgcttgaacgtgatttacggaaacgtgattcagctactgttgacaaaaggcatgaactgaattccatgccacaggaaagttctggtgcttttggtcacatgcaggagaactaccaaaatcttgagatgcatgcttttgatatggatgctgaaatttattctttacaagaagctcttgtcacttcaattgatgaaaaggatgaagcgttgtctaaagtagggcttataacatctgaactagaagatcttgcgaataaactgaacttagcagaatcagaaaggaactcctttagcaacgagatcacactcttgactgaaaagttaattgcatctgaatcttcccttaaaagtttggagacttctctcaattctgtatcaagggaaaaggaagatttgggaatgcaacttactgatgcccttttggacatggaatctgaaagatcaatttggacagcaaaggagaaagaatatgtagaagctaatcatagattgaacatctgccttgatgagaaccacaaactttcagaagatttgatgaagtgtataaatggattgcctaccttctcttaa

SEQ ID NO: 143713 - DNA, 91 bp, Zea Mays
aaaacatctcacacacaatcacataacaatatttaaatccatagtctcatcaattacatcacaaaagtctcatccatagtcataataagac

SEQ ID NO: 143714 - DNA, 1569 bp, Zea Mays
catcgcagcaaaaccatactccgtctcctcgctctatcgcgctccattgattgctctcgcaacaaggactccatcgtcttatcgatggagttgttcgccgccggagaccgccgcttccccgatcctcccaggcacgacgctggtgcagaggactcgtcgatgctggtgatcagggacgcactgctgtcacagctccagaaggaccgacttcgccaggagatcatcctggccgagctcgccaggatagagcgtgccatggccctgcgcgccgccgacgccgagcgtgccagcccgagggcgcccttctccgtcgtcaagctcgaggagatgccgcgcagcagagaagcgtttggtcctgcagaccttattgtcgccgcggatgtggacaaagatatggaggagaagaaagattccgcaacaagtcttcaggcatcgagtttgattcaccgcaagaagcctgccgccgaatatctcgtccgtgaatgcctgaagacttcttgcggtgctggtaacgctgcaggtcggcggcaaaatgcagcacttcatgagaccaaactacaagaatccactgagactaggttgcccaaggagacgatgcctcctttatcaaaatggaggtgtgacatctgccgtgtggaagcaccgaccgagggccacttgcaacagcattgtgcagggcacaaacaccagtctaaagtagcaaccttggtggtaccaagaaccaatgccaacagtcacaaagcgagggcggctgctgctgcgaatcccggagacgtgcgtcaatacgacgaaaagctacgtctaacctgggtctgcaggttctgccaatccaactgcacctgcagatcagacctggagagccacctgagaggcaaaaggcacaaagcaaagatccagtgcctgctggaagaatgcaagaacatggcagtggtctatagctataggtcgccgaattcacagccaaaccttgcgacacaggaagaggacaacggccctgcttcagcatggaattgcagcctgtgccaagccaagtgcacttgtccgtcagacttggcgaaccacctaagaggcaagagacaccagctgaattttctggttctacaggtggaaggcaagcagtatctgtcagagtggggttgcggtatctgtcaggccaaatgtaactctgtatctcagctggagagccactggagcagcagggaacaccagcagaaggtagaagctctgcggggaggaggccgaatcgcaagctctgaggacgaggagatacataggacgacgtatgtttgcaagctctgtaatttgcactgcaacagcaagactacgctagctgaacaccaaagtgggaagaaccacacgctgaaggcgaagaaacggttgtcgctgagtttttgcgaggtctgcgatctgcaatgcaatagcgaaaagatgctcgctcaccatcgtactgggaaggctcatttagcaaagcttagcaactgctgattggggaggctgtgatctgtggagcgaaatgccagcaacgtcagttcattttgaagagacttcagttggcttttcatttaccgt

SEQ ID NO: 143715 - DNA, 173 bp, Zea Mays
atgcatattacagtaaccacattcgatacacacacttcggagataaagagcggaagactttacaaacattctttaccttttcaaaactcaagttttacatgtttcgaaagagtagtatttattacaagtcctgatatactcaaagtgcataacttattacaaaagcaggaagg

SEQ ID NO: 143716 - DNA, 97 bp, Zea Mays
gtgttttagactatagttatttacaaccatctaataaatatcatatgtatatctatattatccttagttataacaatatatatacactgtgtattaa

SEQ ID NO: 143717 - DNA, 1322 bp, Zea Mays
catcgcagcaaaaccatactccgtctcctcgctctatcgcgctccattgattgctctcgcaacaaggactccatcgtcttatcgatggagttgttcgccgccggagaccgccgcttccccgatcctcccaggcacgacgctggtgcagaggactcgtcgatgctggtgatcagggacgcactgctgtcacagctccagaaggaccgacttcgccaggagatcatcctggccgagctcgccaggatagagcgtgccatggccctgcgcgccgccgacgccgagcgtgccagcccaggggcgcccttctccgtcgtcaagctcgaggagatgccgcgcagcagagaagcgtttggtcctgcagaccttattgtcgccgcggatgtggacaacgatatggaggagaagaaagattccgcaacaagccttcaggcatcgaatttgattcaccgcaagaagcctgccgaatatctcgtccgtgaatgcctgaagacttcttgcggtgctggtaacgctgcaggtcggcggcaaaatgcagcacttgatgagaccaaactacaagaacccactgagactaggttgcctaaggagacgacgcatcctttattaaagtggaggtgtgacatctgccgggtggaagcaccgaccgagggccacttgcaacagcattgtgcagggcacaaacaccagtctaaagtagcaaccttggtggtaccaagaaccaatgccaacagtcacaaagcgagggcggctgctgctgcgaatcccggagacgtgcgtcaatacgacgaaaagctacgtctaacctgggtctgcaggttctgccaatccaactgcacctgcagatcagacctggagagccacctgagaggcaaaaggcacaaagcatagatccagtgcctgctggaagaatgcaagaacatggcagtgatctatagctataggtcgccgaattcacagccaaatcatgcgacacaggaagaggagtagaggacaacggccctgcttcagcatggaattgcagcctgtgccaagccaacagcaggggacaccagcagaaggtacaagctttgcggggaggaggccaaaccgtaagttctgtggacgaggggatacataggacgacgtatgtttgcaagctctgcaatttgcactgcaacagcaagactacgctagctgaacaccgaagggggaagaaccacacgctgaaggcgaagaaacggttgtcgctgagtttttgcgaggtctgcgatctgcaatgcaatagcgaaaagatgctcgctcaccatcgtaatgggaaggctcatttggcaaagcttagcaac

SEQ ID NO: 143718 - DNA, 618 bp, Zea Mays
gtcgccaaattccatcccatctctcagcgtcgtggtctccccgatatggatgggggaagagacaagctcgaacaaggaggctacgggcattgctttatgtttgtgacgctaaaggatctctatccatcattgtttccatattatcatggtattattgccttcaatattattctctatatcaactacagctaccgtggaggagttgatagtgaagatgcccttaataaccatgcagttcctgagcctgctcagtcatccctgttctctcttgacatacatgaatatcctaatcttaccgttgttcttgttctgtcctggcaaaaatacttgatgcatttgtttatgttttgtaatgggacatcactgctcaagtatccaaaagcttgggaaattgcacatgcactgcacgcgtggcggagcctcttcgagtttccatgcagcacgattcgttttccaacgcgttgccgctgcatgaaacgcaatgaaggcaagccgtcgcctggctacctccacccgctgcaggctacaaacatccgtgacaccgaactcttcggcgtccacgtctatggcaccgacctcgacgtcgagatccttaacgccaagattgctgccacgtga

SEQ ID NO: 143719 - DNA, 2069 bp, Zea Mays
aaaaccgtttcgcgcaccataaaatcgctttgggtttccaacgcaaaaccgccccgcacttctccgcaccgttaccaaattgatccttcccgcaaagctgcaatggagttcgcctcccgcagtcgacccaccaccacagcagccgacgacgaagaaaacgactgtcttcgccgcttccccgaccatccgccgtcgcagccgcagggacacggcgagcccaatacatccggggtagacgctgcactactggcgaggaggcagaaactgctgttggagctgctcaagggatccatccaacagggcttgatcttgcgtgagctcgtggagactgagcacgccatgggctttattgccggcagccacaatcctgtgccagcactcccacaggatttcttgcgttgctggacgccgtcgatgtctactttggaagcgcatctccgccagccatgcccttgtggctgtggaaactccatggcggtcagggcacctccagtgaacccacacttggagcggtcatcgcatgcacccgagcaaacaaggccaggcaatgatgctgagcagcatcaagaggacaggtcatctggggtgaggacacatccatttaacggccattttaaactgtgtcattcaccgagcaagcagactccagtgccaggcaaagctggtgtcaatcagatgcggccatcgtccggacaccaacaggccattgtttgggaaaagattggtgtggaggttgttcataacatgcagccgttgaacgaaatcaagaaccacagcagtgaggggcagaaggccgtagactctgccattgaggtttgtgtaaagaaacccatacaacagcgtcttcagtacaaaccagtggatcaggagaatgcagcaaacaatgagcatgcacctgagcagacaaggcaaggcaatgatgctgagcatcatcaagagggcaggtcatctggagtgaggacacatccatttaacggctactttgaactgtgtcgttcaccgagcaagcagattccactggcaggcaaagctggtatcaatcaggtgcgtccattgtcaggacaccaacagggtgttgtttgggaaaagattggtgtggaggtagttcataacatgcagccattgcacgaaatcaagaatccgagcagtgaggggcggaaggccatagactctggcattgaggattgtgtaaagaaacccatgcatcatcgtcttcagtacaaaccagtggatcaggagaatgcagcaagtaatgaccagaagagtacagagttcaacgagccaacagctgagggaacttccgctggggtgaaaaggaagctgaccaccccaagctcacctgtcaagaagcagaagccactcgggcaatggagctgcactatctgccaggctaacccagctagccagcgccaacttgagcaacaccttgccggcaagcggcaccagtcaaatgtcgcagcactgcaaccatctcagagcaacagcagcagccctgagcctgacacaaaagcgacgcccgcgaggagcaggatcatcgcgacgaacgcgcagcaagacggcaagcaggatgtgccggagaacagatggacgtgtacactctgccgggccaagtgctacactgaattgaactactacagccatctcgggggcttgtggcaccgggagaaggcacaggccaggcgcgaggagcacttgaggttctactgctcggtgtgcgacctgcaatgcaacagcgagaaaatgctggagtcacacctcggcggtaggaggcatcgggagactctggaggcgcgcgactaggatgccgaggcacggctgcaggctgacccgtccttgttcacggggaagctgttgtggctgggttccggcgggtcgatctgccattttgaggggcactacggtggtgcacgaagctgctatcgctggtctgctgctggactctgcctagttcgttgatttctctcgtttcgagcttttagtttcacgttggtaggttttaatgttatgcgacttttgatcttcgggcccaagacaaaacagacttgaaatgcgtatgtttcgatgtagta

SEQ ID NO: 143720 - DNA, 627 bp, Zea Mays
gcggagtacgccagcgcgatcctccgcgtgaccggcgcgcaggccgccgccctgcgcgcccgcgccggcgcggtgtccacgttccgcgcgctggtggcgcacgtctggcggtgcgcgtgcgcggcacgcgcgctggctcacgacgccgagtcccgcctctacacgatggtggacatgcgcgcccgcctgtccccgccgctgccggacgccttcttcggcaacgcggtggtgcgcacctccgcgtcggcccgcgtcggcgacctcctggccaacccgctgggtttcggcgcacgtcggctccgcgcggcgacggggcacggggacgagtatgtgcgctcgctgctggattacctggagacggcggacctggcgacggtaccgcgccaggggctgcgcggcacggacctgcgggtgatcagctggctggggatgccgtcgtacgacgccgacttcgggtggggcgagccggcgctgctggcgccggcgctcatgtattacccggggttcgtgtacctgttgaactgccccggcaagggtggcgatgttgccgtggccgccgcgctggagcccgagcgcatgcagcggttcaaggagctcttctacgaggagctggctatgctggagtga

SEQ ID NO: 143721 - DNA, 853 bp, Zea Mays
acttcacgcaccaccctagtacaagagataccacgccaaacgtacgccagaacaagctaagcgcgcgcgagccgcagacatccgaacgatggccgtcgtcgaggtcgtcacctccgagctggtggcgccgagcgagcccacgccgcggcgcccgctctggctgtccaacctcgacctcgccgcgcggaacggctacaccccgacgatctacttcttccgccgtccccaggacagcagcgacggccggctgcgtgcggactcctgcttctcgacccacgcgctgcgtgcggcgctggccgccgcgctggtccggttctacccgtttgccggccggctccgcgccgccggccgcggcgggcgcgccgagatcgactgcaacgccgcgggcgcgctcttggtcgtcgcgcggtccgccgcggcgctcgaggacttcctccacgacttcgcgccgtccaaggccatgaacgacacgttcgtgcccacgtacgactccgctggccccgacgcaccgttgctactgcttcaggtacggtaggcacgtacgttgctgcatgcactgacggatgacttcccgttggttggttccaacttctaatcaatcatcagtttcctggatggatcagtttgtgagagcatgtggcctagttcgagtgaactggggacagattacgcaataacgtacgacacctttttgctgacataataatgaacggaacgatccaacgagagatcattaaggatggtggtcaaggttaattaaaccagcaagttggtttgggtcttgggtcaccaaccaagcaaccatggttatctgttatctcaggtgcctgtcgtctccactcgctgcaggtta

SEQ ID NO: 143722 - DNA, 1822 bp, Zea Mays
gtgccggtgcccgtgagggcgtagcggatgtggaattgtggatcagcagcacagacacgtcaattagcctaaaaaaaatcaaaatcaaaatccccttcccctcctccgctctttataaaccctcctcaccgtcactccactcccccacctagctcaccgctcactcaagcacgctgcgaaacacatacacacacagatcgaagcggaggatgaaggtggaggtggtggagacgacgctggtgccgccgagcgaggcgacgccgcggcacgcgctgtggctgtccaacctggacctggcggtgcccaagacccacacgccgctcgtctactactacccgaggcccgccggcgccggtgcccggggaggagggagagggagaaggaggagaagggtcgttcttcgacccggcgcggctgcgggaggcgctgtccagggcgctggtgcccttctacccgctggcggggcggctgggcggcccggcccgggcggccggatcgagatcgactgcaccggcgagggcgcgctgttctgcgtcgcgcgggccgacttcaccggcgacgagatgttcgccgacttcgagccctcccccgaggcgcgccgcctgctcgtgcccttcgccgcgtccggcgacccgccctgcgtgctcgccatggtccaggtgaccttcctcaagtgcggcggcgtggccgtgggcacgggcatgcaccacgtgacgatggacggcgccggcgcgatccagttcatccgggcgtggacggcgctggcgcgcggggaggcccccgcgtggacgccgtcgcacgaccggacgctcctgcgcgcgcgctccccgccgcacgtccccgcctgcgagcacccggtctactccccggcctacctcaacggggcgccgcggcccttcgtgacgcgcgtctacgccgtgccgcccaagctgctggcaggcatccggtcgcgctgcgcgccgggcgcgtccacgtactgcgcggtcacggcgcacctgtggcgcgccatgtgcgtcgcccggggcctcccggcggccagcgacacgcggctgcgcgtcccggccaacgtccggcagcgcctgcgcccgccgctcccggcgtcctacttcggcaacgccatcgtgcgggacctggtcaccgtgcgggtgggcgacgtgctgtcgcagccgctgggcttcgtggcggagcggatcaagcgcgcggtggcccgcgtcgacgacgcccgcgtgcgctccgtcgtcgactacctggagcttgagtcggacaagggcaaccaggcggcgcgcggccagttcatgcccgagtccgacctgtgggtcgtcagctggctcggcatgcccatccacgacgccgacttcggctggggccgccccgggttcgtggcccccgcgcagatgttcggcagcggcacggcgtacgtcacgcagggacgcgacaaggacgaccccatcaacgtgctcttcgcgctcgagccagagtacctgaacaccttcgagaaggccttctacggggagtgaccgtgacccgaccacgaccagccatggcgaggagtctgatgacgataggatgtgattgtgatgccatgccgttgtggcatctcccggggtgtgcacactgttataccatatcatattgcatgtttcggaatgcaactcaatgcttactgggtgtgtgataaggtgcttcattccagctttgtactagtgtcaccaagcacattctgtcctaacatctacgtaaataacggaatgacaaactggaacatgcacggctggaaaaaaagccatgtagatgtagctgcaaataactgtttattttattg

SEQ ID NO: 143723 - DNA, 953 bp, Zea Mays
ccctcctcaccgtcactccactcccccacctagctcaccgctcactcaagcacgctgcgaaacacatacacacacagatcgaagcggaggatgaaggtggaggtggtggagacgacgctggtgccgccgagcgaggcgacgccgcggcacgcgctgtggctgtccaacctggacctggcggtgcccaagacccacacgccgctcgtctactactacccgaggcccgccggcgccggtgcccggggaggagggagagggagaaggaggagaagggtcgttcttcgacccggcgcggctgcgggaggcgctgtccagggcgctggtgcccttctacccgctggcggggcggctgggcggcccggcccgggcggccggatcgagatcgactgcaccggcgagggcgcgctgttctgcgtcgcgcgggccgacttcaccggcgacgagatgttcgccgacttcgagccctcccccgaggcgcgccgcctgctcgtgcccttcgccgcgtccggcgacccgccctgcgtgctcgccatggtccaggtgcgccgtgcgcgcgcgcccgcccgcgccgcctcctccctttgcccccctcccccttttttcttcttctttcttttcggctgcttcgatcaaatcaaggtcgccacccccacgtggtggtgatggtgtgcggtgcgggtgggatcattattgtttttcaccgccgttgcgtggtcactcatccggcttttcccgctttgcaacaccgcggcagcggcagcggcagcgttaatgaaaagggtaatcggggtacaccctggcgagcgttaatgaaaagggtcgtggggcccaccctggcagaggtggtacagacggacacgctggtgattcagactgaagaattgtagcctattctgtagtatttacgtatcaaaaataatttagaactctaaagatgcgttacttattgatta

SEQ ID NO: 143724 - DNA, 2545 bp, Zea Mays
cggcaaccgtcctccctcctccacctccaccagctgcactccccacgccgcgcacccgcccctctgcccctcctccagctccaaaccggaaacgcggggataccgcgccgtccgcgtggcgtgtccgaagagatcccacgacccggcgggcggcgctgcgaggctgaaggcgcggcggcggcggatttaagggcctcaccggctcgggatctccgcgcgatcgccgctgggccgcgcgctcgaggtatacattggttgttgcagcaagctggtttcttgagatccatattgatgtggtttgttctggaaatttttattcttcatggatgctattaagagccatgcaaagaaggttgatcttgttgatgagactctaagaccaccactagttccatccgagaagcacaatgctttccgagtgaggaatgttgcatccaggtgcaaaactgatctggctgatgccactaagataagaagatgtacatcaccaagtcttggccagacctcagcaattgaaggcacaccagcacccaaaagagctcagtctgcagatagaagaaggccgacaccttcaacccctccctctaaggtgtcaacaccctcaacccctgtgtcaaggtccatcacaccagttcgtgataccactagagacttacacaagagttccaagcgtatagcaagcacaaaggctcctgatggcttgtggccagcaatgcgtaacttgtcttcatctttccagtcggaatctgtggctgcacctactactagaaatgataaggtagtcacggctttggattgtagcaaggggcaagtgagtgttctaacggagaggaagagaagtccttttagaaggaaaaacattggtgaacattgtgagaatgctcaaccttcagaggagccccctaagaggttaattgagcaacacagatggccagccatgatagctgggcaggcgccgaagaatctcatgtcaagaagcattgacctttcggacaaagctaatataccagtcgcatcatcaaatacatcaagaggtctttcaccaaggaagacgccttctgtcagacctgtgccatcatcaaatacatcaagaggcctttcaccaaggaagaccccttccgtcggaccagtcccatcatcaaatacatcaagatgcccttcaccaatgaagaccccttctgttgaagcttcagtgaaactgtcaaatcagtcattggatgaagtggcaaggagtttggctattcaatcaagcagaaaagatgataaggtagattcacagacaatagagagatccaaatctttgagccgaccaaacagaacagttacttttcctgttccaattctacaacgctcatcatcaccaagcagagcattgccagctacgtcctcaacttccagggcctttcagagcccatctcggacaaggccatcaacaccctgtcagtcccaaagtgttggagctatccaatcaagcgttccatcttctcttattaactacatggttgatgcgcggaaaggaaagaagaatgccagccaaatcgaaaatatccaccaagtgcgtttattgcacaatagacatttacagtggctctttataaatgcttatgcagaagatgctttatcttttcaaaaggctactgttgagaataccatgtataatgtttggaggaatactgtaaacctgcgggattctgttaatatgaaaagaataatggtgcaacacttccaacaagaactcaggctttacaacattctgaaagagcagattgcttaccttgaacaatggccaacgctagaaagggagaatagtatctctttactaggggcaactgaggctctgaaagcaagcaccctgcgcctgccagttacattgggagcaaaggctaacacaattgctctcaagaacgctgtaagctcagctgttgatgtcatgcaagttttgggctcatctgtttgctgcattcattcaaagatcacggacagcacatccttggtttcagaactctctgtcatagcaggacaagagaagatcatgcttgatgaatgccgagaactcttagctacagctgcaaaactgcaggtgcaggagtcgagcctacggacacatcttgtgcaacagagacaaaggcttcaggattgaaatggcaacctgaacaagatgcagaagccccaggccatgccattgaacaggtaaactgtgcaagttgaactgcaaacagaaaagtaatctgtagagtctaaacaataggaacaaaacaaatgttaaacatcccctggagattcatggtgtgatgccacaactaactacccgcagtgcatagatatgacaggtttactgaaaaaacctcatcatatgtaaatggttttcaccatataatgcactcccagccttttctagtattttttgtttctttgtatagagtggatccctccctctttgccattgtattttttgacattttgaaagaaatacatagataatggatgagctaagatggtgatatcattttttttttcagttttccttgttagaaacatatatatt

SEQ ID NO: 143725 - DNA, 1612 bp, Zea Mays
aatcccaatcccaatccgagtcaaagtcaaatataaccacacgtctcctgcgcgaaaccaacctgagacgccgaggtgtcgaagacgaccctcaggttcttctgctggtagttgccgatgatggaggtctcgtcctcggatttcagggaggccacggccaggcacacctgtgaggagtcgctgctgacgaagtagagcacgccgccggagtccacctccacctccgcgccgccgtcgaacacgagagtcaggctgggcacctggacttccttgagcccggtcatgttgaagcaggtgtcgaggatggagaaccctggcgcctgcgggtactccgcgagctggctcatgaactcggccctgacggcgttgtagaccgacggcacgaggctggtgatcacggtgcccgagtcgacgatcgccctggccgagaagcccgtggactccacctcctggccgccgaccgtgatcccggtcaggttcaccaggtagaagggcccctggagcagcgggtcggagttggacaccatcgaggtgtacacgaccggggtcgagttgcggtacgccgacgggtcgtcgcccagcaccagcgagcccgacgcgtcggactccctgctgagcgggaggcagtaggagaacacgccgccgaactggtccacggtctgcgacacgagcgagagctggctgcggccgagccccatgaggcccgacgtgccgccgaacggcgggccctggttgctggtgccgcacccgaacacgaagccgtcgatgacctccccggccaggctcagcctgtcgtgcgccagcacgccgcgggagtaggagccgtcgcggtagctgagcgcgtagctgcaggccgccggccgcccggcgtcgcacggcggcgcgcccgcgcccgcgcccgtggccagctgctgctgcagcgcgtcgcaggagggggagtcgcacggcaccgcggcgtaggacggcgacgaggacgggtcgaacagcgggccctgctggtcgtggcacgactcgcacggcgcgcactgcacccacgtcagctcgctggccgtgtccacgatcaccgtcgcctcgccgccgcccagccccacggtggccacgtagttcagcgtccggagcctcgcgcccgagctgacgggcacctgcgccttggacgccgtcaccgccacctcggccgacgagctggtcgtcgtcagccggtagtgctctatgcgcccttgcagcgacgagacgcgcgcggcgtcggtggacaggagagcgtccgcctcctcctccctgctgttggccggcgcagggctgaagctgtggtgcctcagctcgagcaccgtggcgccacccaccgcccctgaacatcgcaagcaaaccgggagtcagcggactggacacctcttctctttctccccctttctctcactctttctacgcttgagcaagcagctcaaaaatctgtgatggtgtcaccacccaccacatggaaatttagtaatttactattcttatagttgtttatgtaacccatccacattgaaaagtacttgggacgtgctacttctggcagtggcagagccctgaccccgaaaaactgaaaaaacaccatggaaatcgcatcgcc

SEQ ID NO: 143726 - DNA, 2186 bp, Zea Mays
gagatcctcaggttgatgcgacgggaagattggcgggcggacacggacccaaccccacgtccccacccaacgcatcgtcctcgcgaacaaaaccgacgcgcccaccccgtcccggctccggctgtgtggctcaccttccactttcccccacctccaccatcgtgcctcagcatcagcactcgaatgccacgagactgacctctccctcgtcgccgcagccgcgatgcccgcaccgaccgccgagccggcgctcccggcggccttcctctgcgtcccgtccccgctcctctccacgccgctccccggcgctgcactctccgcctcccccgcgccctcctcccaccatgcctccttcctcccgcgcccgcgcggcgggccccgagcgctctccgtcgccatctccgtcccgggccccactttctccgtggcgtcgcggctccatcagatgtggggcgagttcgcgcggttcgtgcggctgcacgggaaccaaatagcgccgctcgggttcgcgtccatgggcctgggtttcggcggcggtggcggggataacgtcggcggtgggggaggagggggtggaggggatgtggatggggtaggcgaggtagaggaggccgcggcgcgggccgaggcgccaaagaaggtgctgatcctcatgagcgacacgggcggcggtcaccgcgcgtctgccgaggccatcaaggctgccttcacccaggagttcggcgacgactaccaggtatttgtcactgatctgtggactgaccacactccatggccattcaatcaactgcctaggagctatagttttttggtgaaacatggacccttgtggaagatgacatactatggtactgcaccgcgtgtagtccatcagcctcattttgctgcaacatccacattcatagcaagagaagtggcaaaaggtctaatgaagtaccaaccagatgtaattatcagtgtacaccctttaatgcaacatgtccccctccgaattctaagatcgaaaggtctcttggataagatcccattcgcaactgttatcacggatctcagcacttgtcacccaacatggttccataagcttgtcactagatgttactgtccatcaactgaggtggaaaagagagcactgaaagctggactgaagcccgcacagattaaagtctatggcctccctgtccggccctcttttgtcaaacctgttcgaccgaaggatgagctgcgaagagagttaggcatggatgaagatctgcctgctgttctattaatgggtgggggtgaagggatgggtcctattgaggccactgctaaagcacttggtgattctctgtatgatgaaaacctaggggaacccactggtcaaatacttgtaatttgtgggcgtaataagaagctggtcaatcgattgcaatccataaattggaaagttccagttcaggtgaaaggctttgttacaaagatggaagaatgtatgggtgcttgtgattgtatcattacaaaggcaggacctggtacaattgcagaggcaatgatccgtggcttaccaattattctaaatgattatattgctggacaggaagctggcaatgtcccctacgttgttgaaaacggatgtgggaagttctcgaaatctccaaaacaaattgcgaagatagttgccgactggtttggcccaaggtcagacgaattcagggtaatgtcccagaatgccctcaagctagcacgacctgatgctgtgttcaaaatcgtccacgatctgcacgagctcgtcagggaaaaatgttttgtgccccaatatgcatgtgcaacataaaaggccgtatcctctattttgtgtttgcttaatttttttaaccccatgcggcactagctatagctgattgtgaggattgcgaatattgattgatttgaaacgtttccgtaagagaaatgaaaaatgtattgaatgctctagtttaattttccgaaatactttttcaggctagtactgttgtgggtgctgcatgcagattgggttacgaacccaacccgatgaaattttcaatggattacttggacgacatggattttcttgggacatgtaggtaaccggttcattttgaacgcataagcataaataatgtgaagcgaggttgagtctaattagacctgattatgggctgctcgacccgctcaaaaaaaaaaaa

SEQ ID NO: 143727 - DNA, 1947 bp, Zea Mays
gagatcctcaggttgatgcgacgggaagattggcgggcggacacggacccaaccccacgtccccacccaacgcatcgtcctcgcgaacaaaaccgacgcgcccaccccgtcccggctccggctgtgtggctcaccttccactttcccccacctccaccatcgtgcctcagcatcagcactcgaatgccacgagactgacctctccctcgtcgccgcagccgcgatgcccgcaccgaccgccgagccggcgctcccggcggccttcctctgcgtcccgtccccgctcctctccacgccgctccccggcgctgcactctccgcctcccccgcgccctcctcccaccatgcctccttcctcccgcgcccgcgcggcgggccccgagcgctctccgtcgccatctccgtcccgggccccactttctccgtggcgtcgcggctccatcagatgtggggcgagttcgcgcggttcgtgcggctgcacgggaaccaaatagcgccgctcgggttcgcgtccatgggcctgggtttcggcggcggtggcggggataacgtcggcggtgggggaggagggggtggaggggatgtggatggggtaggcgaggtagaggaggccgcggcgcgggccgaggcgccaaagaaggtgctgatcctcatgagcgacacgggcggcggtcaccgcgcgtctgccgaggccatcaaggctgccttcacccaggagttcggcgacgactaccaggtatttgtcactgatctgtggactgaccacactccatggccattcaatcaactgcctaggagctatagttttttggtgaaacatggacccttgtggaagatgacatactatggtactgcaccgcgtgtagtccatcagcctcattttgctgcaacatccacattcatagcaagagaagtggcaaaaggtctaatgaagtaccaaccagatgtaattatcagtgtacaccctttaatgcaacatgtccccctccgaattctaagatcgaaaggtctcttggataagatcccattcgcaactgttatcacggatctcagcacttgtcacccaacatggttccataagcttgtcactagatgttactgtccatcaactgaggtggaaaagagagcactgaaagctggactgaagcccgcacagattaaagtctatggcctccctgtccggccctcttttgtcaaacctgttcgaccgaaggatgagctgcgaagagagttaggcatggatgaagatctgcctgctgttctattaatgggtgggggtgaagggatgggtcctattgaggccactgctaaagcacttggtgattctctgtatgatgaaaacctaggggaacccactggtcaaatacttgtaatttgtgggcgtaataagaagctggtcaatcgattgcaatccataaattggaaagttccagttcaggtgaaaggctttgttacaaagatggaagaatgtatgggtgcttgtgattgtatcattacaaaggcaggacctggtacaattgcagaggcaatgatccgtggcttaccaattattctaaatgattatattgctggacaggtatttttatttagcaactcatcgtagatattgttttactccaatattagttctcatggtgctgcattttgctttcctcaaatatgagctgtctgaagaacattgaaattacccctggattattgactcattgaccatttcgaagcagttagtacttagtaaaagccaaacaaatagaagattgttgtactgtaatagatttccattaccatcagctcaagcttaggtccaaatcatggtaggattgtttggatgtttacttatccaaaatttacttgtacatgtaaaattagcatatcttgacttcatctttgtggttcactcagtataacgtatacaaaatgtataaacaaatattaattgcactggta

SEQ ID NO: 143728 - DNA, 109 bp, Zea Mays
ttttctcgaatgcgcaagagagttgtgcatcttttatattagagagagaaaagaaaggtcctacaagataaaactaagtaaacttggcattcatagctgttaaactatc

SEQ ID NO: 143729 - DNA, 400 bp, Zea Mays
catttcatgtagagctcccaaaataaagagtgaagatttaagatgaagtggttgctgaagaggagtctactccagtgcctgttcatcaagtggatggagtcatctaactgatcatcgtgttagaagtatctagaacctcttctctacaacaaaggagaagttttattcccttatcttttggttagttacttcatgtggaggccttgaagcttagaatgttatgtgtatctcttatggaaaggcttcacccttccaattgttataataagttatgcactttgggtactatcagaacttgtaataattaccattcttcttatgttgtaaaacttgagctttggaaatgtaaaatatgttttgtgaagtattccgctctatctccgaagtgtgtgtgtatcga

SEQ ID NO: 143730 - DNA, 2143 bp, Zea Mays
cctggccccgggcgccctcacgcccgctggccgctataaatagcgttcggcgttcctgtctccacccatcccaagaagagccgccctacctattccttctccccgccgtcgagctgcccaacccagagcaccagcagccctcacctccttcctctcggccggtccttccaacgagcccgctggtcttggagccgccaccgttctcgttctggacgaacgttcaaggagattgcatttgtggatgctctaatggagtcgaaaggtggcaagaagtctagtagtagtagtagtaatttcatgtacgaagctccccttggctacaagatcgaggacgttcgcccagccggaggaatcaagaagttccagactgctgcttattccaactgcgtccgccagccatcctgatatcgcctcacatgcaattcgcggtagagtaggattttaattcagttttcctcttgtgtcggtagttttccgttggctctggctgccttcctctgcttctgagattccaacttgtcttgcccatctctccttttcctctctcatcctctctttcttgcaacgtcatccagtggcgatgtcttcagcagattcttgtgtctcttctcctgcctcccctattggctttgagggctatgagaaacgcctcgagatcacgttctctgacgcgcctgtttttgaggacccttgtggtcgtggcctgcgcgccctctcccgtgagcagatcgactcgtttctggatctcgcacggtgcaccatagtgtcacagctctccaacgagagcttcgactcatatgttctgtccgagtccagcctctttgtgtatccccacaaggttgttctgaagacctgtgggacgacgaagctgctgctcgccattcctcgcatccttgagcttgctgcagggctgtcactgcctcttctttctgcgaagtactctcgtgggaccttcatcttccccggcgcgcagcccgcgccacaccgcagcttctcggaggaggtatctgtgctgaacgctttctttggtaacctcaagtccggtggcaatgcctacctgatcggtgaaccgttcaagcccaacaagaagtggcatgtctactacgccacagaggagcctgagcgtcctatggtgacgcttgagatgtgcatgacagagcttgacgttaagaaagctgctgtgttcttcaagaactccactggtggcagctgcacttcagctaaagagatgacgaagctctcggggattcatgagatcattcccgagatggagatctgtgacttcgagtttgacccctgtgggtactcgatgaatggcgtcttagggcctgcagcctccaccatccacgtgacacccgaggaaggtttcagctacgcaagctacgaagctatgaacttcgaccccagctcactggtctacagcgatgtgatcaggagggtcctggcaggcttctctccttcggacttctcggtcgcagttaccatctttggtggccgtgggttcgccaaatcatgggcgacgggtgcagacatcgattcctacatgtgcggtgatcctgtagagcaagagcttcctagtggcggtctgctgatgtaccagagctttactgatgttccctctggctctgtatcgccaaggtcgaccttgcagacggatggctggagcagcgatggaatggagatggcctcaaatgacgagatgtgtattggctgctggaatgcggtgaagaaggtggtgaagaaagatttggatgcttaaagatttggataacttaggtggttcttcacctaagttatgaagaagtctgagacctctgtctctctgttcttttggtttcagttaagcagttagctgggctaccggcaatttgtttgcttaatatttttcctgttcaataagtactctggatctgcgtctgccatagtgcttgatattatttttgttgttagtcagtgggtcttcaacgactgatgttattcttgttctcaacagaagccatcaacacgacatgagattattcttgttcatcaacgtaacactagcagtgttatttaattagttacatagtctcagtatgagcaccaagttttgtcaatgttttgattcacactcttgttggacaggtttataacacagcatata

SEQ ID NO: 143731 - DNA, 2337 bp, Zea Mays
cctggccccgggcgccctcacgcccgctggccgctataaatagcgttcggcgttcctgtctccacccatcccaagaagagccgccctacctattccttctccccgccgtcgagctgcccaacccagagcaccagcagccctcacctccttcctctcggccggtccttccaacgagcccgctggtcttggagccgccaccgttctcgttctggacgaacgtgagttttccttcctctcgtccttccttgcgctcggtttactcatcctgctgccgtgccctgcgttgtgtgcgccaggactctgttgggtcctgagaggagtggccggcggtttcgtctgtggtagatcgtagtacgttggcttagatcttggttaggttcttgagggcgcttttgattttcgtcgggagagtttgagatcgccttcctgcccccgtttgtcggaggtgtcaggaaaacttacattttgtctgtgctaccttagaatttggatcctgataactgctaatcgtttgtgctgttctgctgcccaagaaggagaacttactctctttcgatcgacaggttcaaggagattgcatttgtggatgctctaatggagtcgaaaggtggcaagaagtctagtagtagtagtagtaatttcatgtacgaagctccccttggctacaagatcgaggacgttcgcccagccggaggaatcaagaagttccagactgctgcttattccaactgcgtccgccagccatcctgatatcgcctcacatgcaattcgcggtagagtaggattttaattcagttttcctcttgtgtcggtagttttccgttggctctggctgccttcctctgcttctgagattccaacttgtcttgcccatctctccttttcctctctcatcctctctttcttgcaacgtcatccagtggcgatgtcttcagcagattcttgtgtctcttctcctgcctcccctattggctttgagggctatgagaaacgcctcgagatcacgttctctgacgcgcctgtttttgaggacccttgtggtcgtggcctgcgcgccctctcccgtgagcagatcgactcgtttctggatctcgcacggtgcaccatagtgtcacagctctccaacgagagcttcgactcatatgttctgtccgagtccagcctctttgtgtatccccacaaggttgttctgaagacctgtgggacgacgaagctgctgctcgccattcctcgcatccttgagcttgctgcagggctgtcactgcctcttctttctgcgaagtactctcgtgggaccttcatcttccccggcgcgcagcccgcgccacaccgcagcttctcggaggaggtatctgtgctgaacgctttctttggtaacctcaagtccggtggcaatgcctacctgatcggtgaaccgttcaagcccaacaagaagtggcatgtctactacgccacagaggagcctgagcgtcctatggtgacgcttgagatgtgcatgacagagcttgacgttaagaaagctgctgtgttcttcaagaactccactggtggcagctgcacttcagctaaagagatgacgaagctctcggggattcatgagatcattcccgagatggagatctgtgacttcgagtttgacccctgtgggtactcgatgaatggcgtcttagggcctgcagcctccaccatccacgtgacacccgaggaaggtttcagctacgcaagctacgaagctatgaacttcgaccccagctcactggtctacagcgatgtgatcaggagggtcctggcaggcttctctccttcggacttctcggtcgcagttaccatctttggtggccgtgggttcgccaaatcatgggcgacgggtgcagacatcgattcctacatgtgcggtgatcctgtagagcaagagcttcctagtggcggtctgctgatgtaccagagctttactgatgttccctctggctctgtatcgccaaggtcgaccttgcagacggatggctggagcagcgatggaatggagatggcctcaaatgacgagatgtgtattggctgctggaatgcggtgaagaaggtggtgaagaaagatttggatgcttaaagatttggataacttaggtggttcttcacctaagttatgaagaagtctgagacctctgtctctctgttcttttggtttcagttaagcagttagctgggctaccggcaatttgtttgcttaatatttttcctgttcaataagtactctggatctgcgtctgccatagtgcttgatattatttttgttgttagtcagtgggtcttcaacgactgatgttattcttgttctcaaca

SEQ ID NO: 143732 - DNA, 2264 bp, Zea Mays
tcaccccaaacggggcctaggttagcgtttgccgtttggcacagccagctcgttgacccgggccatttgggccagccagctcgttgccctgggccctggcccccgggcgccctcacgcccgctggccgctataaatagcgctcggcgttcctccgtcgagctgcccaacccagagcaccagcagccctcaccttcttcctctcggccggtccttcaaacgagcccgctcgtcttggagccgccgccggtctcgttctggacgaacgttcaaggagattgcatttgtggatgctctaatggagtcgaaaggtggcaagaagtctagtagtagtagtagtaatttcatgtacgaagctccccttggctacaagatcgaggacgttcgcccagccggaggaatcaagaagttccagactgctgcttattccaactgcgtccgccagccatcctgatatcgcctcacatgcaattcgcggtagagtaggattttaattcagttttcctcttgtgtcggtagttttccgttggctctggctgccttcctctgcttctgagattccaacttgtcttgcccatctctccttttcctctctcatcctctctttcttgcaacacgtcatccagtggcgatgtcttcagcagattcttgtgtctcttctcctgcctcccctattggctttgagggctatgagaagcgcctcgagatcacgttctctgacgcgcctgtctttgaggacccttgtggtcgtggcctgcgcgccctctcccgtgagcagatcgactcgtttctggatctcgcacggtgcaccatagtgtcacagctctccaacgagagcttcgactcatatgttctgtccgagtccagcctctttgtgtatccccacaaggttgttctgaagacctgtgggacgacgaagctgctgctcgccattcctcgcatccttgagcttgctgcagggctgtcactgcctcttctttcagcgaagtactctcgtgggaccttcatcttccccggcgcgcagcccgcgccacaccgcagcttctcggaggaggtatctgtgctgaacgctttctttggtaacctcaagtccggtggcaatgcctacctgatcggtgaaccgttcaagcccaacaagaagtggcatgtctactacgccacagaggagcctgagcgtcctatggtgacgcttgagatgtgcatgacagagcttgacgttaagaaagctgctgtgttcttcaagaactccactggtggcagctgcacttcagctaaagagatgacgaagctctcggggattcatgagatcattcccgagatggagatctgtgactttgagtttgacccctgtgggtactcgatgaatggcgtcttcgggcctgcagcctccaccatccacgtgacacccgaggaaggtttcagctacgcaagctacgaagctatgaacttcgaccccagctcactggtctacagcgatgtgatcaggagggtcctggcaggcttctctccttcggacttctcggtcgcagttaccatctttggtggccgtgggttcgccaaatcatgggcgacgggtgcagacatcgattcctacatgtgcggtgatcctgtagagcaagagcttcctggtggcggtctgctgatgtaccagagctttactgctgttccctctggctctgtatcgccgaggtcgaccttgcagacggatggctggagcagcgatggaatggagatggcctcaaatgacgagatgtgtattggctgctggaatgcggtgaagaaggtggtgaagaaagatttggatgcttaaagatttggataacttaggtggttcttcacctaagttatgaagaagtctgagacctctgtctctctgttcttttggtttcagttaagcagttagctgggctaccggcaatttgtttgcttaatatttttcctgttcaataagtactctggatggcttgctgcgtctgccatagtgagctgcatattgttgtttagtcatattgtttctgctgccgatgcccttgtggggagaatgatcttgtaacagacttgcctattcccgcaatatattggaaattttggttaataatctattggttgtcactcccgctgttgtgattagcacatgtagcacatttcatacttcttttttttttaaatatcttgatattatttttgttgttagtcagtgggtcttcaacgactgatgttattcttgttctcaacagaagccatcaacacgacatgatattattct

SEQ ID NO: 143733 - DNA, 1215 bp, Zea Mays
tcctataaacgccactgcgcttgctgcgctctggagcaccagcaggagagtcccggagctggaagaagaagatacagagcgcatgctcctgtgaacatacaccactgaacccatagaaagcagcacacagtctgcataggtgcattgttgttccggcctctcctagaggaaaggaaggtcaggactcaggaggatgcctcgagccccgaccatgaccgctttccttgtcgccgtgcttgccgccctcgttctcacgtccgagggccgcgtttctcggaaggacctgggcatcgacctcggcggtggcagcggggcaggcatcgggatcggtgctgggattagcattggcataggcggtggtggtggtgccggtggctctggctctggctcggcgtctggctccggctccggctccggctcggcctcaggttccgggtccagtgcgggctctggtgcaggatcgtatgctggatctggcgccggcgccggctctggctctggctctggtgcgggttcaggagctgggtccggagcgggttcgggttcagggtacgggcaagggcaagggtctggatatggcgaagggcatgggtcgggccagggacagggttctgggtctggctcgggatacggtcagggaagtggatccggtcgaggatctggctacggcgaaggctccggttccggctctggccaaggatcaggatccggctacggcgaaggctccggttccggctctggccaaggatcaggatccggctacggtgaaggttacggctccggtcatggccaaggatctggatacggtgagggttcaggaagaggatacggagaaggttcaggctcaggctacggcgagggacacggctacggctacggctctggttctgggcatgtggcaaataaacatgactgaacaatgttctctgagctctgatgttctcttctctttctgtgtatccatccatatacataaataagtacacgttaccaactgtggacaaagaactgtactctctctctctcctcaaagcatttcctatatagctgttcaagatactgtttttcattatagactacactttttatggaatgtggtttaaaataagagatatgaatggataagttgttggagatcgtataagtacgtcatctactatatacatcttcttccatgtagtcaatcacatgatgttagctggatctttttttctt

SEQ ID NO: 143734 - DNA, 90 bp, Zea Mays
gagcggggacgggccggggtggcggttgtttcaatgtttcgtgctcctccgtcattcgaaaccattcgatttcgctccatgcaaaccgtt

SEQ ID NO: 143735 - DNA, 933 bp, Zea Mays
cgtggaaaagcgtgaacgaaagcaactggtaaaacaagtgcatcgatatacgaaaatagcaggcagacgaatcaatgagcagcgtatacaaaacctaccgctgatcagatcataacaataatgtaagtatgtaaccaggaagacgataagaatccgcaacaacgatctccatcacctgtacagagctacaacgagcctactaaacatgtacgtacgacgacagcggcgggcagggagcagagcagagcaccgagcgcgcgtgcatggctccgctcctaaacgacgcgatggtggatcaagcgtacccgcccttccacccgccgcggtaggcgttgtctctgcggttgttcctgaaggcgcagcagccgacggagtagacgatgatgatgaagacgaggaagacgatgcagacgacggcgacgcgcttccagttccgctggaacgtggccaccacgccggccttgcacgactggcagttgtagcagagcgccgaggcgtcgttgctccaggtcttgcagtccgggtccgtcgagttggtggtcaccggcgtccagtccgtgccgccgacgtaggtgtagccgcagctggtggggggcttgcagcagccagactgcagggagaagacatgacagatgagtctttgaaacacgggcacatatagagcatatgggcgcttcgctaaccctaatacatattagccacggtcacattcacatcatgttgcttattagtgcgtagataataagcaggtaattcaatttaatttaatttgctgatgattattccaaatggagcagcatcgtgagatgtttgagttttgcaaccataaaaaagcccggtgaaagcgcaccagagcgttgaaatgtaggcatgtgtgctaggaacgaaaattcatgccccaataatgcaacggtcagagcattgggagcagtt

SEQ ID NO: 143736 - DNA, 1085 bp, Zea Mays
atggacatggtaacgctctccatagctcccaaacaatttcacacccatgtccacatgcgaagcgcaggggccaagggatggggtctcacctggatctggatgatgatggcgacgatacccgtacaccgtaatggcaggtaccgccagcgcgagctcacagttcccgtcggtttagggtcacagacgggatcccgccggtgtcaccattcccgggttcgctgccggcttcatcaaagggtcggattcgaccacctccatgagccgcgaccacatcctagtgccgccgaagaaccacgacccgtcgccgctggggtagggcaccaccgtcacggacgcggaccccagccgaccatggcgcacccagggcagcacgaggctgggcttcccgaacccgaggtccctgtcgatggcgaactgaagcaacccgaacatgaagagcgcggggctcccgagccccagattcaccgtctctgtccacttgtcgtcgtccctgaatgccgccttccgctcctccatccagtctaccagctcctggaaccgcgccgccgtcgtgacccccgcgatggccgcgcgcaccatgcccgccacctcggggagcggcacgcgaggacgtcgggggcggccatggcgcggtggaggaggatgtcgcaggggatccaggatctcatcgcggcgtgtgcggcgggcgtggtggggacgcgcgacgcgagatcaggtggcggccgcgggatggagaggcagaacatagccgcatgtggacgccgcgcagaaatcggaggccgccccgtcgccgccatcatcggtcccaacctcacgaacgaacacggcgcagggagcagagatcggctgcgtgaaatgtagaggccgcggagcataggggagcgcgagattagggggattatggcggctgcgggatgctatcgcgaccgagattctggaggtggcggccgcgggaatgcgggatggagaggctatcgtgaccgagtcggaggcagaacacagccgagtgtggacgcctacaatgagtgcttaattagttgtaaagatttagtagaatgattctatttgttatagtataataaggt

SEQ ID NO: 143737 - DNA, 1706 bp, Zea Mays
ggagcaacgaaacacaggggcaacaagaaacagacagacagttcatggtgagattccagcagaactgcgtggtcagcttgcattagctcctccgcgattggtttgaccaggagaggaaacagagaaggatacaaatcgctcaagccattaaaaaaaatggaacggtgacggcgcacatggatgctcccagctcctactacttagctgccgaggcggcggatcgaccgatcgagtagctacatactgggcgcgcgccgcgatcgagaaacagagagtggatcacggtcgctgacctctgccctccccactccacgcgcgctcgcggatctcggtcgcgtcgcgcgccatggccagcggcggggcgccgtggctggagcggtgcgggccgagcgtggggatggtgctggtgcagctgttctacgcgctggtggacgtggcgctgaagacggcgtacgggctgggcatgcgccccatcgtcttcgtcgcctaccgccaggggatcgccgccgccacgctcctcctcgcgtcgctcgccgccagggggtgcacgctgcggcccatggccgtcggcgcgcggggcttcgcgctgctcttcgcggcgtccctagccaccgccactggccagtacttgtacctccagggcctccacctggcttcgccgtccatggccagggccaccaccaacctcgctccaggcatcaccttcgccattgccgccgtcatcgggctagagaaggtggacatcaggagcccgaggagcgtggccaagatcgtcggcaccgccatctgcctcgcgggagcagcatccatggcgttcttcaagggcccggcgctcctcggcgcggctcttccctcgaccaccagcgacaacagcgactgggtcaagggaggcatctacctcgtgggaaacgccatctgcgtctccatctggtacatcttgcaggtgcccgtctgcaagtcgtacctggaccctgtgtctctggcgacctggatgtgcctcctggccaccttgcagtgcgccgccatggcgctgttcctggagcccaacaactacctggagatctggaagctgaactcgctctgggagttcccctgcatcctgtacggaggcgtgtttgcctctggcgccaacttcttcctccagtcgtggtgcatagcggtgaaagggcccctctacagcgccatctttacgccgctgagcgccgtcatcacggcgacactgtccacgctcttcctgaacgaacagctccatgttggaagcgtcctaggtgcggttacgatcatcgcggggctgtacgtcgtgctatggggtaaagcggaagatgcgaacggcggacaggtcggatccaagcagacggcagatgcggatggcatcgctgtcacagtagacactccgaccaatctttcagaaccgttgctaccgacagtggctgagccagtgttttgaacttgagtcttgggatttgggaatacccaagttcaaagggaaatttttttccccaatgcataacaatataggatttcttattcgtttttgaagtccaaaagaaatctacaggaaacaaatgtgcgtactatcaaatatcatcacccgattaactgaatctgtgaatcagaatgttctgttcatcctcggttcctctcctcagccgctgctggcttgctgtcccgtcccgtcttctgtcttccccagatggccacagatc

SEQ ID NO: 143738 - DNA, 626 bp, Zea Mays
cgctggagacgagcgagcgagcgaggaaccttggagagctgatcgatggcgtgtggcgatgtggtgttgcagggcgtgttcgggtccggcgtcacgttctacctgcagtcgtggtgcatctccgtgaggggcccgctctactccgccatgttcaacccgctctgcaccgtgatcaccaccgtgttcgccgccgccgtcctccgcgaagagctgcacgtcggcagcttgctgggcgcgatcgccgtcatcgcggggctgtacgtggtgctgtggggcaaagcgggcgacgccaacaagggcggggtggagccagagcaccactcggacgatctggagaagacgtcatcagcgcggtcggatcccaattcgacggccggcgtcggcagtggcatcgccgagcccctcctggcgggcggcgatccaacggagaagtagatgggattttgctgctcttcaagtgttctgtgcgtgcgcgcgcggtgttttcagggtcggtatgctagtgctactgtaacagtgccgtcccagttttgtcatgtacactagtggcagcttcaaatgactccgtgctgccgatgtgtattatccgcacaattttgttaagcaacgcggcgtccccgtccaaa

SEQ ID NO: 143739 - DNA, 1635 bp, Zea Mays
gtaggaataatcttctgtgatacaacaaccatgtagccaccgatcctaatgagtcatgcataatagcagacacaggcaacagtgccccgtgagcacatgcaggatcagcagtacgacctccgactccgagctactgctcaccctctcgggctctcggcccgcccgtatgccagtctgtctctggtacactccttcatttcatcgcctagctagctactatatagtacgacctgcctgccttgctcttgccctgtgagcagcggcgtgcgatcgatcgaggcagtcgtagtaataagccaacaaacaaaccggccggaacgccatgctggaggagtacaaaccgtgtgcggccatggtggtgacgcagtgcatctacgccgctctagcgctcttgtccaaggcggcgttcaccggcggcatgagccccctggtgttcgtcgtctacaggcaggccgtcgccaccattgtactcgtccccgtcgtcatcgcggccaacaggaagaagatgaaggagatgacgacgggccttggactgacgggcttctcgctggtcttcgtcgcctcccttgtcggggcaacggtgaaccagtgcatgtactaccaaggggtgaatctgggctcgtcgtcgatggcaacggccatgaccaacttgatccccgccatcaccttcgtcatggcggcatcagtcggcctagagagggtggaggccaggaggccgaggagcctggccaagatcttcggcacggccgtctgcgtgagcggcgccatggccatggctttcttcaagggcccgaagctgctcggcgacggcccgaacgctctccagctcctcctccacgcgggcggcggcggcaggtgggtggccggcgcgctcttcctcgtgggcagcagctcctgctggtcgctctggctcatcctgcaggtgcccatctgcaagtcgtacgtggagccgctggctctgtcggcgtggatgtgcgtcctgtccacgctccagtccgcgctgctcgtctccttcctcctgccggaccccagcgcctggaggatccactcgctcttcgagctctcctgctgcgtcttctcgggcgtgttcgggtccggcgtcacgttctacctgcagtcgtggtgcatctccgtgaggggcccgctctactccgccatgttcaacccgctctgcaccgtgatcaccaccgtgttcgccgccgccgtcctccgcgaagagctgcacgtcggcagcttgctgggcgcgatcgccgtcatcgcggggctgtacgtggtgctgtggggcaaagcgggcgacgccaacaagggcggggtggagccagagcaccactcggacgatctggagaagacgtcatcagcgcggtcggatcccaattcgacggccggcgtcggcagtggcatcgccgagcccctcctggcgggcggcgatccaacggagaagtagatgggattttgctgctcttcaagtgttctgtgcgtgcgcgcgcggtgttttcagggtcggtatgctagtgctactgtaacagtgccgtcccagttttgtcatgtacactagtggcagcttcaaatgactccgtgctgccgatgtgtattatccgcacaattttgttaagcaacgcggcgtccccgtccaaa

SEQ ID NO: 143740 - DNA, 2056 bp, Zea Mays
atgcaggatcagcagtacgacctccgactccgagctactgctcaccctctcgggctctcggcccgcccgtatgccagtctgtctctggtacactccttcatttcatcgcctagctagctactatatagtacgacctgcctgccttgctcttgccctgtgagcagcggcgtgcgatcgatcgaggcagtcgtagtaataagccaacaaacaaaccggccggaacgccatgctggaggagtacaaaccgtgtgcggccatggtggtgacgcagtgcatctacgccgctctagcgctcttgtccaaggcggcgttcaccggcggcatgagccccctggtgttcgtcgtctacaggcaggccgtcgccaccattgtactcgtccccgtcgtcatcgcggccaacaggtgcgcgcgcgcgtcgtacgtcgttcgtccgtccctatagctagctctagctgctgctaccttgacaacttcttcttcgatcgcgcgccacacagctgtgtgcctgtgtctcgtcaccctctggttcttagtcgttgtccgtcgaccgtcgtcatatgcatggctctccgtgatgatctgcgtgtgcaggaagaagatgaaggagatgacgacgggccttggactgacgggcttctcgctggtcttcgtcgcctcccttgtcggggcaacggtgaaccagtgcatgtactaccaaggggtgaatctgggctcgtcgtcgatggcaacggccatgaccaacttgatccccgccatcaccttcgtcatggcggcatcagtcgggtgagtgtctactactagtttgacagagaagagacggtcgacccgtttcatcagcgccgcgagcaaaatttagttgagcaccgtgcgttttctctgctgctccaccgtacgccgtctaatatgggcgagttggagatggggtgtcctggaccaacgctgccacctcacctcacctcacccacctgcgcgccttaattcacaagtatctggtgtagaccggaaatcaaacatttacttcagttaacgaagaccaaactcccatgaacaccgaacagattggctatcacatctcggttgctgcaaaatgcagttttaagcaatggcaaaaatgcctagagagggtggaggccaggaggccgaggagcctggccaagatcttcggcacggccgtctgcgtgagcggcgccatggccatggctttcttcaagggcccgaagctgctcggcgacggcccgaacgctctccagctcctcctccacgcgggcggcggcggcaggtgggtggccggcgcgctcttcctcgtgggcagcagctcctgctggtcgctctggctcatcctgcaggtgcccatctgcaagtcgtacgtggagccgctggctctgtcggcgtggatgtgcgtcctgtccacgctccagtccgcgctgctcgtctccttcctcctgccggaccccagcgcctggaggatccactcgctcttcgagctctcctgctgcgtcttctcgggcgtgttcgggtccggcgtcacgttctacctgcagtcgtggtgcatctccgtgaggggcccgctctactccgccatgttcaacccgctctgcaccgtgatcaccaccgtgttcgccgccgccgtcctccgcgaagagctgcacgtcggcagcttgctgggcgcgatcgccgtcatcgcggggctgtacgtggtgctgtggggcaaagcgggcgacgccaacaagggcggggtggagccagagcaccactcggacgatctggagaagacgtcatcagcgcggtcggatcccaattcgacggccggcgtcggcagtggcatcgccgagcccctcctggcgggcggcgatccaacggagaagtagatgggattttgctgctcttcaagtgttctgtgcgtgcgcgcgcggtgttttcagggtcggtatgctagtgctactgtaacagtgccgtcccagttttgtcatgtacactagtggcagcttcaaatgactccgtgctgccgatgtgtattatccgcacaattttgttaagcaacgcggcgtccccgtcc

SEQ ID NO: 143741 - DNA, 1821 bp, Zea Mays
gtaggaataatcttctgtgatacaacaaccatgtagccaccgatcctaatgagtcatgcataatagcagacacaggcaacagtgccccgtgagcacatgcaggatcagcagtacgacctccgactccgagctactgctcaccctctcgggctctcggcccgcccgtatgccagtctgtctctggtacactccttcatttcatcgcctagctagctactatatagtacgacctgcctgccttgctcttgccctgtgagcagcggcgtgcgatcgatcgaggcagtcgtagtaataagccaacaaacaaaccggccggaacgccatgctggaggagtacaaaccgtgtgcggccatggtggtgacgcagtgcatctacgccgctctagcgctcttgtccaaggcggcgttcaccggcggcatgagccccctggtgttcgtcgtctacaggcaggccgtcgccaccattgtactcgtccccgtcgtcatcgcggccaacaggtgcgcgcgcgcgtcgtacgtcgttcgtccgtccctatagctagctctagctgctgctaccttgacaacttcttcttcgatcgcgcgccacacagctgtgtgcctgtgtctcgtcaccctctggttcttagtcgttgtccgtcgaccgtcgtcatatgcatggctctccgtgatgatctgcgtgtgcaggaagaagatgaaggagatgacgacgggccttggactgacgggcttctcgctggtcttcgtcgcctcccttgtcggggcaacggtgaaccagtgcatgtactaccaaggggtgaatctgggctcgtcgtcgatggcaacggccatgaccaacttgatccccgccatcaccttcgtcatggcggcatcagtcggcctagagagggtggaggccaggaggccgaggagcctggccaagatcttcggcacggccgtctgcgtgagcggcgccatggccatggctttcttcaagggcccgaagctgctcggcgacggcccgaacgctctccagctcctcctccacgcgggcggcggcggcaggtgggtggccggcgcgctcttcctcgtgggcagcagctcctgctggtcgctctggctcatcctgcaggtgcccatctgcaagtcgtacgtggagccgctggctctgtcggcgtggatgtgcgtcctgtccacgctccagtccgcgctgctcgtctccttcctcctgccggaccccagcgcctggaggatccactcgctcttcgagctctcctgctgcgtcttctcgggcgtgttcgggtccggcgtcacgttctacctgcagtcgtggtgcatctccgtgaggggcccgctctactccgccatgttcaacccgctctgcaccgtgatcaccaccgtgttcgccgccgccgtcctccgcgaagagctgcacgtcggcagcttgctgggcgcgatcgccgtcatcgcggggctgtacgtggtgctgtggggcaaagcgggcgacgccaacaagggcggggtggagccagagcaccactcggacgatctggagaagacgtcatcagcgcggtcggatcccaattcgacggccggcgtcggcagtggcatcgccgagcccctcctggcgggcggcgatccaacggagaagtagatgggattttgctgctcttcaagtgttctgtgcgtgcgcgcgcggtgttttcagggtcggtatgctagtgctactgtaacagtgccgtcccagttttgtcatgtacactagtggcagcttcaaatgactccgtgctgccgatgtgtattatccgcacaattttgttaagcaacgcggcgtccccgtcc

SEQ ID NO: 143742 - DNA, 852 bp, Zea Mays
acacgccacacacagagctgcaggtctagcaacacttcgtgcaaccgatcgagagtcgctgcttctctggccggccggccggggagatcgacatgagaaggaaagccgtgttcgcggtggggaagaagaagaagaacggaggcacggcggcggcgttgcggacgggcaggaggccgttccagcatatggctctggcacggctcagggagctcaagaagatcgtccctgacgcccaggacgccgccgacgtggacgtgctgctccgccggacggccgactacatctgcgccctcgagctcaagctgaccgtcctgcggagggtatcagccatctacggggtgtgatgcttcctttgtctgtcgcgctggcagcctggcaccttcgtcgtcgtccagtcctacgtacgtgctccactccgtcggtcgtcgtccacgcacgatgatgaaaggttttgaggtcaaaacctgctgcggttgtgaggggccggacgaggggagaagatttctcgcatgctcatctcttggttgttgctcctacgggagttagtttggatccaatatgtgttgtgcatatggcagttaattagtttgcaggtgaggccaagccattgttatagtcagtggtgtttagtttagcctgttggcttgaagaacaaggatccctagagtctgcttttattcagtttatggagttgttcatgttcgcttttttttcctttttaaaggtcccacgagtgaactagttattgctcatgtagtaatgccctgtctccgttctcgaatatttgtcgcatgttagtttatttttaaattaaaccgcgataaataaaaaaaaaacggagcgagtaatata

SEQ ID NO: 143743 - DNA, 2633 bp, Zea Mays
gcaccgacggcgggtaggtggaggcagagggccccgttgtcggcggcaatggcgccgggcctgaggctggcctacccgtgggggagggatgtccggcggggcacgccggtggtggtgaccatggagaaccccaactactcggtggtggagattgacgggcccgaggcggaggcgctccgggccggcgtgcctcccatggacaaaggccgaggccggggccggagcgccaagcagttcacttgggtgctgctcctccgcgcacaccgtgccgccgggtgcctcgcctcgctcgccgccgtcacctgggcgctgccgtctgccgtcgcgaagcgtttccggcgggccgccgccgccgagggcgtcggccgcggccggggctggctgctctacaggttcatcaaggtgctcttggcgctctccttgctcgccctcaccgttgagctggcggcctactggaaagggtggcactttcagaggcccaatttgactatgcctgaatttcatgtgccggaggtggaggacattcaggggtggctgcacacggcgtacctcgcctggatgtcattccgagctgactacatccgacggccgatcgagttcttgtccaaagtttgcattctgctatttgttgtccaatcgttggatcggctcgtcttgtgcatcgcatgcttctggattaagctcaagaaaatcaagccaaggcttgaaggggacccattccgggagggttcagggtatctgcacccgatggtacttgttcagattcctatgtgcaatgaaaaggaggtctatgagcagtcgatttcagccgtctgccagctagattggcctagggataagtttctaatccaggtgcttgatgattcgagcgacgagagcattcagatgttgatcaaagcagaagtttctaagtggaaccagcagggtgtgaacattgtctatcggcatcgggtgttgaggactgggtataaagctgggaacctgaactctgcaatgagctgtgactatgtcaagaattttgaatttgttgccatttttgacgcggacttccaaccaagcactgattttctcaagaaaacaatcccacattttgatgggaaccctgagcttggattagttcaagcccgttggagctttgtgaataaggatgagaacctcttgacccgccttcaaaatatcaacctttgcttccactttgaagtggagcagcaggtcaatggtgtcttcctgaacttctttgggttcaatggaactgctggagtctggaggatccaagctttagaagaatcaggaggctggcttgagcgaacaaccgtggaggatatggatattgctgttcgggctcacctgaatggatggaagttcatcttcctgaatgatgtgaaggtcttgtgtgaagttccagaatcttatgaagcatatcggaaacagcaacaccggtggcattctggcccaatgcaccttttccggctgtgctttccggacataattactgccaaggtatgcaatccggatagctcgaagttggaacttgtgccgatcaaagttccttttctcggggtatggatcaatatttttcttttgatgaaaatttgctactctgactgcagatctcctcatggaagaaagcaaatttaatactattgttctttcttttgaggaagttgatacttcctttctattctttcacattattttgtgtcattcttccattaaccatgtttgttcccgaggccgagttgcctgtgtgggtcatctgttatgtgccgatttgcatgtccttcttgaatattctgccatccccaagatcatttcccttcattgtaccatacctcctcttcgagaacaccatgtctgttaccaaattcaacgcaatggtgtccgggctgttcaaactcgggagctcctacgaatgggttgtcaccaagaagtctggccgatcatctgaattggatctcttgacatcggaagaaaagaataggaagtgcaccacacttcctcagctccagaatcaattgcctgaaaacagtgagctggtcgagatcaatgtgcgaaaggaacagcgagagaaggtgccaaatgacgccaaaaggggtaacaagatctacaagaaagagcttgctctttctctgctcctgctcaccgctgcgactcggagcctcttgtctgctcaggggattcatttctacttccttctgttccaggggatgtcattccttgccgttggcctcgatctaattggtgaacagataagttgattcctcgcatgctattgttcttgttcagacagcatgggaatcacacatatgttcatacatacagtgatatcaaaattctaaatttcccattcatggtttagagttttgcttcagaattgcaaccctgctcaacgacaaaggggagcgcaactgcctccagaaagcccaacagtacataataaactgaagagttgatagctcttgttcatctgtacgctctcagtaaatgttccagcagtgttcataaatagagttccgtttccgctgaagttcttttgagttttcatgaacactgaaatgtgtaccgtgtttcatttgtaaatcgtgatacgacgaaattggtttcgaagaagataaactgtcaaattcagtgtg

SEQ ID NO: 143744 - DNA, 2513 bp, Zea Mays
gcaccgacggcgggtaggtggaggcagagggccccgttgtcggcggcaatggcgccgggcctgaggctggcctacccgtgggggagggatgtccggcggggcacgccggtggtggtgaccatggagaaccccaactactcggtggtggagattgacgggcccgaggcggaggcgctccgggccggcgtgcctcccatggacaaaggccgaggccggggccggagcgccaagcagttcacttgggtgctgctcctccgcgcacaccgtgccgccgggtgcctcgcctcgctcgccgccgtcacctgggcgctgccgtctgccgtcgcgaagcgtttccggcgggccgccgccgccgagggcgtcggccgcggccggggctggctgctctacaggttcatcaaggtgctcttggcgctctccttgctcgccctcaccgttgagctggcggcctactggaaagggtggcactttcagaggcccaatttgactatgcctgaatttcatgtgccggaggtggaggacattcaggggtggctgcacacggcgtacctcgcctggatgtcattccgagctgactacatccgacggccgatcgagttcttgtccaaagtttgcattctgctatttgttgtccaatcgttggatcggctcgtcttgtgcatcgcatgcttctggattaagctcaagaaaatcaagccaaggcttgaaggggacccattccgggagggttcagggtatctgcacccgatggtacttgttcagattcctatgtgcaatgaaaaggaggtctatgagcagtcgatttcagccgtctgccagctagattggcctagggataagtttctaatccaggtgcttgatgattcgagcgacgagagcattcagatgttgatcaaagcagaagtttctaagtggaaccagcagggtgtgaacattgtctatcggcatcgggtgttgaggactgggtataaagctgggaacctgaactctgcaatgagctgtgactatgtcaagaattttgaatttgttgccatttttgacgcggacttccaaccaagcactgattttctcaagaaaacaatcccacattttgatgggaaccctgagcttggattagttcaagcccgttggagctttgtgaataaggatgagaacctcttgacccgccttcaaaatatcaacctttgcttccactttgaagtggagcagcaggtcaatggtgtcttcctgaacttctttgggttcaatggaactgctggagtctggaggatccaagctttagaagaatcaggaggctggcttgagcgaacaaccgtggaggatatggatattgctgttcgggctcacctgaatggatggaagttcatcttcctgaatgatgtgaaggtcttgtgtgaagttccagaatcttatgaagcatatcggaaacagcaacaccggtggcattctggcccaatgcaccttttccggctgtgctttccggacataattactgccaagatctcctcatggaagaaagcaaatttaatactattgttctttcttttgaggaagttgatacttcctttctattctttcacattattttgtgtcattcttccattaaccatgtttgttcccgaggccgagttgcctgtgtgggtcatctgttatgtgccgatttgcatgtccttcttgaatattctgccatccccaagatcatttcccttcattgtaccatacctcctcttcgagaacaccatgtctgttaccaaattcaacgcaatggtgtccgggctgttcaaactcgggagctcctacgaatgggttgtcaccaagaagtctggccgatcatctgaattggatctcttgacatcggaagaaaagaataggaagtgcaccacacttcctcagctccagaatcaattgcctgaaaacagtgagctggtcgagatcaatgtgcgaaaggaacagcgagagaaggtgccaaatgacgccaaaaggggtaacaagatctacaagaaagagcttgctctttctctgctcctgctcaccgctgcgactcggagcctcttgtctgctcaggggattcatttctacttccttctgttccaggggatgtcattccttgccgttggcctcgatctaattggtgaacagataagttgattcctcgcatgctattgttcttgttcagacagcatgggaatcacacatatgttcatacatacagtgatatcaaaattctaaatttcccattcatggtttagagttttgcttcagaattgcaaccctgctcaacgacaaaggggagcgcaactgcctccagaaagcccaacagtacataataaactgaagagttgatagctcttgttcatctgtacgctctcagtaaatgttccagcagtgttcataaatagagttccgtttccgctgaagttcttttgagttttcatgaacactgaaatgtgtaccgtgtttcatttgtaaatcgtgatacgacgaaattggtttcgaagaagataaactgtcaa

SEQ ID NO: 143745 - DNA, 2807 bp, Zea Mays
aggaggcacagacgccgctgagctctactagtaccactgctccgctcatctctcctgcggcggtggaagattaggaattgagcccgcggcaagctcggggagttactgtgaatccatctgattcccacccacccgcgcagacgcagctgcattccgcgatcccaggcggcgggaggcggctcttgatgctagagatgctcgctccgcgtcgttctcggcagcaccgacggcgggtaggtggaggcagagggccccggtgagaacagaagtgtcagtggtgctggtgttcccttaccttcgccgcttcgcgagtgctgttctttccttcagttgtcggcggcaatggcgccgggcctgaggctggcctacccgtgggggagggatgtccggcggggcacgccggtggtggtgaccatggagaaccccaactactcggtggtggagattgacgggcccgaggcggaggcgctccgggccggcgtgcctcccatggacaaaggccgaggccggggccggagcgccaagcagttcacttgggtgctgctcctccgcgcacaccgtgccgccgggtgcctcgcctcgctcgccgccgtcacctgggcgctgccgtctgccgtcgcgaagcgtttccggcgggccgccgccgccgagggcgtcggccgcggccggggctggctgctctacaggttcatcaaggtgctcttggcgctctccttgctcgccctcaccgttgagctggcggcctactggaaagggtggcactttcagaggcccaatttgactatgcctgaatttcatgtgccggaggtggaggacattcaggggtggctgcacacggcgtacctcgcctggatgtcattccgagctgactacatccgacggccgatcgagttcttgtccaaagtttgcattctgctatttgttgtccaatcgttggatcggctcgtcttgtgcatcgcatgcttctggattaagctcaagaaaatcaagccaaggcttgaaggggacccattccgggagggttcagggtatctgcacccgatggtacttgttcagattcctatgtgcaatgaaaaggaggtctatgagcagtcgatttcagccgtctgccagctagattggcctagggataagtttctaatccaggtgcttgatgattcgagcgacgagagcattcagatgttgatcaaagcagaagtttctaagtggaaccagcagggtgtgaacattgtctatcggcatcgggtgttgaggactgggtataaagctgggaacctgaactctgcaatgagctgtgactatgtcaagaattttgaatttgttgccatttttgacgcggacttccaaccaagcactgattttctcaagaaaacaatcccacattttgatgggaaccctgagcttggattagttcaagcccgttggagctttgtgaataaggatgagaacctcttgacccgccttcaaaatatcaacctttgcttccactttgaagtggagcagcaggtcaatggtgtcttcctgaacttctttgggttcaatggaactgctggagtctggaggatccaagctttagaagaatcaggaggctggcttgagcgaacaaccgtggaggatatggatattgctgttcgggctcacctgaatggatggaagttcatcttcctgaatgatgtgaaggtcttgtgtgaagttccagaatcttatgaagcatatcggaaacagcaacaccggtggcattctggcccaatgcaccttttccggctgtgctttccggacataattactgccaagatctcctcatggaagaaagcaaatttaatactattgttctttcttttgaggaagttgatacttcctttctattctttcacattattttgtgtcattcttccattaaccatgtttgttcccgaggccgagttgcctgtgtgggtcatctgttatgtgccgatttgcatgtccttcttgaatattctgccatccccaagatcatttcccttcattgtaccatacctcctcttcgagaacaccatgtctgttaccaaattcaacgcaatggtgtccgggctgttcaaactcgggagctcctacgaatgggttgtcaccaagaagtctggccgatcatctgaattggatctcttgacatcggaagaaaagaataggaagtgcaccacacttcctcagctccagaatcaattgcctgaaaacagtgagctggtcgagatcaatgtgcgaaaggaacagcgagagaaggtgccaaatgacgccaaaaggggtaacaagatctacaagaaagagcttgctctttctctgctcctgctcaccgctgcgactcggagcctcttgtctgctcaggggattcatttctacttccttctgttccaggggatgtcattccttgccgttggcctcgatctaattggtgaacagataagttgattcctcgcatgctattgttcttgttcagacagcatgggaatcacacatatgttcatacatacagtgatatcaaaattctaaatttcccattcatggtttagagttttgcttcagaattgcaaccctgctcaacgacaaaggggagcgcaactgcctccagaaagcccaacagtacataataaactgaagagttgatagctcttgttcatctgtacgctctcagtaaatgttccagcagtgttcataaatagagttccgtttccgctgaagttcttttgagttttcatgaacactgaaatgtgtaccgtgtttcatttgtaaatcgtgatacgacgaaattggtttcgaagaagataaactgtcaa

SEQ ID NO: 143746 - DNA, 735 bp, Zea Mays
ccaatgaagtctaagtttcttaagtattggaagaatattcctatgctctatgtatttgcttttatattagatcctagagccaaactaaggggtttcagcaatatcttaagattattatctgggctatatgatactgactactcactttactatacttgtgtgaaaagtgaattgtgtacaatgtttaacaaatgtgatctgaagtttggtgcagttaggaaataagtgcctcctcctccatctgtcacaggtaaaagaaaacaaaactggggattaatttatggatctgattgtacctatgagttctcatatcctggttctagcacacataactttggtagtggaacatcagcatctgctttgcttcaacaagcacactctagtgctggccttagttcacttgacacagagttgtcctcctacatggccagtgacactttgcagaagtttgatgagaacttcaatatcctaaattggtggcatgaacataagttgtcctatcatgttctctccatcttagctagggatgttatttatgttcctgtttcaactatctcctcagaatctgcatttagtctctgcggctagataatcgaggaacgacgaaggcgcctagcaccaaaaatggtagagatgcttctttgcatgaaagactaggaacttggtgaagatagagggcagcactgtacacaggaccaagaacttgaagatgcatttggaggactttatcttgat

SEQ ID NO: 143747 - DNA, 2859 bp, Zea Mays
atggagttagcagctagaaccacctcctttgtggtgttctttatcctcagttttgctcaaagagctcccacaagtgaagcagcaacactcaatgttggagtgatcctcaacttgcagtcattggtgggtaagatggcacgaaccagtattttgatggccatggaagatttctatgcagttcacaggaactatacgacaaagctggtccttcacatcagagattccagtgcagacagtgtccaagctgcatcagaagctgttgacctgctgaagaattacaatgtcagagccataattggaccacaaaaatcttcagaggctacttttgtggctaatcttgggaacaagagtcaagtaccagttatctccttcactgcaactagtcccacacttacatctggctccatgccttactttttgcgtgcaacaccaagtgatacagctcaagtgaactgtattgctgctctaattaagggatacggatggagagaagtggtaccgatctatgaagacacagactatggtaggggtatcataccatacttagttgattccctccaagaatttggagcttctgtaccttatcgtagtgtgatctctgtatcagcaagcagtgaccaagttgagcaagaactctacaagctaatgacaatgcaaacaagggtctacgttgtgcacatgttatcctcaattgcctctactctcttcatgaaggccaatgagttgggaatgatgagtgaaatgtatgcatgggttttaacagatgggattgcgaatatcattgactcactcaacccttcaattcttgattcaatgaacggtgcactgggtgtcaaattctatgtgcctaaatcaaaggaacttgatgacttcactccaagatggactaagagattcaaacaggactacccaaatgatccgtcagctcagttaggcatctttggactctggggttatgatactatttgggcattggcacaagcagcagaaaaggttaacatggtcgatgacatgtttcagaagcagcaggacaagaagccatcaacatgtttcggaactctcggtatctctactgttggtccaaaactcatagatgcaatcttacataatacgttcagaggcctaagtggagactttgaccttaaaaagaggcagctacaaccttccacattccagataattaacattgttggaagaagttcacaacagataggcttttggacagcaaagcatggaatcatcagaacactggatcaaaatggatcaaaaacaacaaatgcaaactctatgcctgaacttaatccagtgatttggccaggaaaagtatatgttgtgccaaaaggatggcagcttcctactaatggaaataagctccgagtaggtgtaacgtctagtggatatcctgaatttatgaaggcagaaagggatcctatcaccaacgcgacaattgctaccggatatgccattgatgtatttgaagaggtgctgaagggactaccatatgcaataccttatgaatatgtagcgtttgattttgaaggggcgagctataatgattttgtctaccaagttcatcttggagtatatgatgtggcaatcggagatataaccatcaggtacaatagaacttcctatgttgactttaccctaccttacaccgagtctggagtagcaatgattgtgcaagtgaaggatgacaccaataagaacacatgggttttcttaaagccattaactactgatttgtggcttggaagcatcgcatttttcatttacacagggattgtcatctggttattggagcgacgaatcaataatgctgaactgactggttcattttttcgccagcttgggatagcaatatatttctccttttttgcagatagggagaggatagacagtattttatctagattggttgtcattgtatgggtctttgtacttcttgtgattacgtcaagttatacggccaatctatcatcaattctcactgtacaacagcttcaacccacagtaactgatgttcatgaactcattagagaaggtgaatatgtagggtatcataatggttcttatgtggggaatctattagaagtacttggctttgacagaacaaagatcagggcatacaaaacttcagaagattttgctatgcactctctaaagggggcaaaaatggtggtgttgctgctgtcatacatgaagttccctacatcaagctatttcttgcaaagcattgcaaaggttacacaatggttggaccaatttacaaatccgaaggctttggctttaacttcgataaaaaataaatctgatcctaatcgggatgaaaaagaattggaaataatattgcaaaacataaacagccaggcattccccaagagatcccctatgatcaatgacttctccaggagaatcctcagcataacagaaggagatgtcatcattcagatagaaaataaatggattggggatcaacatgtctgtcaaactgatggtgccatcgccagccccagcagtctaaacttcagaagcttttctggactctttctggtcacaggtgttgcttcaacttctgccctttttatagccctcatgatgttcctctacaagaataagcacaagataagggacagtataagtcgagtccagactcgtggaggatatggatctgcgcatgcaaacagacagaatcaagaaagagaagtagattccaaccaggcccagagcatgcacgtgacagtgccaaatgatctagaagacgatacatgccaacaagagatagaagtatccatagaaatcactagtcctgttctggattcccatcgaggccaggctttgcacagtgttgcgcaatga

SEQ ID NO: 143748 - DNA, 192 bp, Zea Mays
atggcgaatagatttttctgtagcaggtcacaagatttgatccttcaacaacttacatctgatgctacaatagagtcggatggaaacagtcatgtaatttatgtagagactgtaagtaagatgataatcatcccccaccaaggacacaatgctaatgcaaatgccaagagcctgaaggctgcattgccatga

SEQ ID NO: 143749 - DNA, 366 bp, Zea Mays
atgcgcacaacaaagacacttgtccaatattcttttaagcttgatatagcatgctttatctcatcttctccagcagaaggatggatcttgcacctgtacggaacacgagtatcgacatgtcccagggcatcaacgagatcagggataaatctagtgttggaatcatcgtcctcgatgataggaatgacttccctccaattgtatttctggacaagtgaggcaatagcttcagcttggcaggagtcgttccatgctgtcctgatgaaatatggggtctggctggatgaccgggacgggctgtttgcagaaaaggaaatgattggaactgatgtcttgttcccaagctctgtaagaaatttagcttga

SEQ ID NO: 143750 - DNA, 116 bp, Zea Mays
tcttcaaatgtctgtccaggatgcaaacatgtccagtgacactgatatgagtaaggtgtttgaagacagaacatttgtgtcatctatccttaattcgcttcctggtgttgatccca

SEQ ID NO: 143751 - DNA, 1167 bp, Zea Mays
atgaagcgaaacatatgctttggagtccaaaaatctaattttttctgggaaaagtgcgagcacattgtttgtttggagaaatccaattttctactcacggacgccgcccctgtgcctcgccatcgcctcaggtacgcaaggcggccgaacacgagcgcccgccttcgttcttgcctgcgctgcccctctcctcgccgtttattcgggctcctacctcttgttacaacttgcgcggtgggggcagtgaggcagcaagacgtgaggtccaggatgatgaacaacaacagtggcggcggtgccggaggccctggagggggcatgggtacgggagtgggtggagggggggacgggcggcacgacgacgaggctgcgctcaccgagttcctctcatccctcatggactacacccccacgattcccgacgagctggtggagcactacctcggccgcagcgggttccactgccccgacctgcgcctaacgagactggttgctgtagccacccagaagttcctatcagacattgctagcgattctcttcagcactgcaaggccagggtagcagcacctatcaaagacaataagagcaaacagccgaagacgtcttgtattaaccatggatgatctttctaaagctttgcgcgagcacggcgtgaacttgaaacacgcggagtacttcgcagacagcccttcagctggaatggctccttcgaccagagaggagtagactggattaggccaacttgtacggaactagggagggatcgcgtggaatggatgggcatgttggcattcttgcccgatcagatcgatgggatgtattactattaagtactgctactatgactagtatatttctcaattaccattgtcactgagagaatccagacacaagtcgttttgcccatgcgcttttatttgtacaaactgtcaatcatctgtaaccctatggggcccaaggatgattgggcaaacatcatgagttttttgttttctacataccattctaaaggaggcagctcaccttccctgggtggcgaattgtcaaatcaccccctggccctaggagaacatctctatggacacttctctaggtcccttgtttcctccatgttgacaaagtgatcagtatgtacttaccacatgaccacactgattaattgtgtc

SEQ ID NO: 143752 - DNA, 952 bp, Zea Mays
taatcaatcatcatgataggctcatgtatcacatcatgtgccttagcaaggtgcgatttgaggttgtagtggcagcaggctagcgcctgctggagaggctcctagtttgacacgacctgaaatgcacattctgcagtcagcaatctggcaatcacatttagcctagacagctatggcaactgagctgcaggaattgctaaatgactagaacaggtgccaagctgattatttaccagggtccaggggagggggtcttaataaccctgaaaggcattgtgatttacaaagcccgtggaaaaacagatccattgtgcggggaggatgggatctttcggattatattgcgcactgcaaggccagggtagcagcacctatcaaagacaataagagcaaacagccgaaggatagacgtcttgtattaaccatggatgatctttctaaagctttgcgcgagcacggcgtgaacttgaaacacgcggagtacttcgcagacagcccttcagctggaatggctccttcgaccagagaggagtagactggattaggccaacttgtacggaactagggagggatcgcgtggaatggatgggcatgttggcattcttgcccgatcagatcgatgggatgtattactattaagtactgctactatgactagtatatttctcaattaccattgtcactgagagaatccagacacaagtcgttttgcccatgcgcttttatttgtacaaactgtcaatcatctgtaaccctatggggcccaaggatgattgggcaaacatcatgagttttttgttttctacataccattctaaaggaggcagctcaccttccctgggtggcgaattgtcaaatcaccccctggccctaggagaacatctctatggacacttctctaggtcccttgtttcctccatgttgacaaagtgatcagtatgtacttaccaca

SEQ ID NO: 143753 - DNA, 968 bp, Zea Mays
ttgtttggagaaatccaattttctactcacggacgccgcccctgtgcctcgccatcgcctcagtgaggcagcaagacgtgaggtccaggatgatgaacaacaacagtggcggcggtgccggaggccctggagggggcatgggtacgggagtgggtggagggggggacgggcggcacgacgacgaggctgcgctcaccgagttcctctcatccctcatggactacacccccacgattcccgacgagctggtggagcactacctcggccgcagcgggttccactgccccgacctgcgcctaacgagactggttgctgtagccacccagaagttcctatcagacattgctagcgattctcttcagcactgcaaggccagggtagcagcacctatcaaagacaataagagcaaacagccgaaggatagacgtcttgtattaaccatggatgatctttctaaagctttgcgcgagcacggcgtgaacttgaaacacgcggagtacttcgcagacagcccttcagctggaatggctccttcgaccagagaggagtagactggattaggccaacttgtacggaactagggagggatcgcgtggaatggatgggcatgttggcattcttgcccgatcagatcgatgggatgtattactattaagtactgctactatgactagtatatttctcaattaccattgtcactgagagaatccagacacaagtcgttttgcccatgcgcttttatttgtacaaactgtcaatcatctgtaaccctatggggcccaaggatgattgggcaaacatcatgagttttttgttttctacataccattctaaaggaggcagctcaccttccctgggtggcgaattgtcaaatcaccccctggccctaggagaacatctctatggacacttctctaggtcccttgtttcctccatgttgacaaagtgatcagtatgtacttaccaca

SEQ ID NO: 143754 - DNA, 1149 bp, Zea Mays
atgaagcgaaacatatgctttggagtccaaaaatctaattttttctgggaaaagtgcgagcacattgtttgtttggagaaatccaattttctactcacggacgccgcccctgtgcctcgccatcgcctcaggtacgcaaggcggccgaacacgagcgcccgccttcgttcttgcctgcgctgcccctctcctcgccgtttattcgggctcctacctcttgttacaacttgcgcggtgggggcagtgaggcagcaagacgtgaggtccaggatgatgaacaacaacagtggcggcggtgccggaggccctggagggggcatgggtacgggagtgggtggagggggggacgggcggcacgacgacgaggctgcgctcaccgagttcctctcatccctcatggactacacccccacgattcccgacgagctggtggagcactacctcggccgcagcgggttccactgccccgacctgcgcctaacgagactggttgctgtagccacccagaagttcctatcagacattgctagcgattctcttcagcactgcaaggccagggtagcagcacctatcaaagacaataagagcaaacagccgaaggatagacgtcttgtattaaccatggatgatctttctaaagctttgcgcgagcacggcgtgaacttgaaacacgcggagtacttcgcagacagcccttcagctggaatggctccttcgaccagagaggagtagactggattaggccaacttgtacggaactagggagggatcgcgtggaatggatgggcatgttggcattcttgcccgatcagatcgatgggatgtattactattaagtactgctactatgactagtatatttctcaattaccattgtcactgagagaatccagacacaagtcgttttgcccatgcgcttttatttgtacaaactgtcaatcatctgtaaccctatggggcccaaggatgattgggcaaacatcatgagttttttgttttctacataccattctaaaggaggcagctcaccttccctgggtggcgaattgtcaaatcaccccctggccctaggagaacatctctatggacacttctctaggtcccttgtttcctccatgttgacaaagtgatcagtatgtacttaccaca

SEQ ID NO: 143755 - DNA, 794 bp, Zea Mays
ttgtttggagaaatccaattttctactcacggacgccgcccctgtgcctcgccatcgcctcagcaagacgtgaggtccaggatgatgaacaacaacagtggcggcggtgccggaggccctggagggggcatgggtacgggagtgggtggagggggggacgggcggcacgacgacgaggctgcgctcaccgagttcctctcatccctcatggactacacccccacgattcccgacgagctggtggagcactacctcggccgcagcgggttccactgccccgacctgcgcctaacgagactggttgctgtagccacccagaagttcctatcagacattgctagcgattctcttcagcactgcaaggccagggtagcagcacctatcaaagacaataagagcaaacagccgaaggatagacgtcttgtattaaccatggatgatctttctaaagctttgcgcgagcacggcgtgaacttgaaacacgcggagtacttcgcagacagcccttcagctggaatggctccttcgaccagagaggagtagactggattaggccaacttgtacggaactagggagggatcgcgtggaatggatgggcatgttggcattcttgcccgatcagatcgatgggatgtattactattaagtactgctactatgactagtatatttctcaattaccattgtcactgagagaatccagacacaagtcgttttgcccatgcgcttttatttgtacaaactgtcaatcatctgtaaccctatggggcccaaggatgattgggcaaacatc

SEQ ID NO: 143756 - DNA, 103 bp, Zea Mays
cctctattcctatttcttgtggtcaagtttaatgcacacataagaaactttggcgtaaaatgcaaagtcgcttcagcttatttattgattgactgatttattc

SEQ ID NO: 143757 - DNA, 109 bp, Zea Mays
ggatacgaatacgaatatcacagtttaccatatttttgtccgaattcggatacgaattcgaatatcttcagatacgaatacaaaacagatagtcgaatcttaattcaac

SEQ ID NO: 143758 - DNA, 2417 bp, Zea Mays
aataaatgcgtcgcctccccatgtagaaagcctccaaggtccagcctctcctcgttgccgcatctgcgtcccatccaattccagggaagggcgagcgtcgcaggaagaaccgagcgggggaggcggagagggagaagcagggggaagatgaaggagtactggacggcgctggcgtcgctgatgggcgcgtttgcgttcctacagggggtggtgcacgcggtattcccggcggagctacgggcggtggtggtgcggctgctgggcaggctcacgcgggctttctccccctactgctacttcgacgtgacggagatggagggcatgagcaccaacgagatctacgacgccgtgcagctctacctcagcagcaccgcggccccggcgtcgggggcgcgcctcagcctgtcgcgccggctcaacgcctcctccttcactttcgggctcgctgccagcgaccgcgtcgtcgacaccttcgcgggggcggccgtcacgtgggagcacgtggtcgcgccgcgccagggccagggcttctcgtggcggccgctccccgaggagaagcgccggttcacgctccgcatccggcgcggcgacagggacaagctgctcccggcgtacctcgaccacatcatcgccgcggctgtcgacatccggcgccgcagccaggaccggatgctttacacgaacgcgcggggcgggagcatggacgcgcgcggcgtgccgtgggaccccgtgccgttcaagcacccgagcacgttcgacacgctggctatggacccggcgcggaaggcggccatcatggccgacctccgggacttcgccgaggggagcgcgttctacgagcgcacggggcgcgcctggaagcgcgggtacctcctgtacggcccgcccggcaccggcaaatcgagcatgatcgcggccatggccaacttcctcggctacgacgtgtacgacctggagctgaccgaggtgagcagcaacgcggagctccggaagctgctgatgaagacgacgtccaagtccatcatcgtgatcgaggacatcgactgctccgtggacctcacgaaccgcgcgggcgcgccgccgaggccgaagccgcgggcgagcatcgacggcgcgatcgagcaggacgggggcgccggcgcggggcggtccatcacgctctccggcctgctcaacttcacggacgggctctggtcgtgctgcggcgcggagcgcatcttcgtgttcaccaccaaccacatcgagaagctggaccctgcgctgctccggtccggccgcatggacatgcacgtcttcatgtcctactgctcgttccaggcgctgaagatcctcctgaggaactacctcggcttccagggcgacgaggagctggaccgcctcagcgacccggcggtcctgcgcgggctcgaggagtgggtggacgccgcggagatcacgccggcggacgtgagcgaggtgctgatcaagaaccgcaggagcggcaaggcggaggcaatgcgggagctcctggacgccctcaaggcccgcgccgagaagcggcgccggggcagcgcctccggcccggccgcggcggggaaggcggccggcggcggcgagaacgaggaggaggaggaggaggaggaggaggaggaggagaagcgggcgctggagagccccaatgaggggaaggagcaggccggcactgacagccgcgggggcggcggacaagacgaggacgcggacggcaagaaacaggtgtgagcagagcaggacggacggccagggccaggccgaggctggaaacgaacgaggagggaaagcgaaaggttcaaaaattttccctgttccgtggccaatcttcaccggagaaatcgatgcgagaaaggaacttgtaggagagcattgcttttttggttttgttttggttttgattattctttgtttatctcccacttttgatttgattgatgctcgtcgttgatgtcttctctctagctatatctagttgtaataagaaaaatcaattaattctagtggtggcgtcattttattatcagatgagctagtagtagtaaaatctagtgctctgtttgtttgtgttgctgttgcgcgtggggacgacattgagctcagagctctaaatgttatattataaaattaattaagagctcaaataaattatgaataagctacaatgattcattacaacccgtagttgtgcgtgctctgatcatttttcttaggtcagtcacagtgctaaaaacctcatatagtttctatcgccactaatttatatacagtacacagaataggtagtctttacaaaatatctttttttttcctaatcgcactcttatctaccaatcgcatgattcgcatcccttatattgatttacatagagacataatttcgtaataataaacaatttctctgtctc

SEQ ID NO: 143759 - DNA, 1549 bp, Zea Mays
cgtttagccaggccggccccggccacgagcccacgacaatgaagccgcccgcgtcgtccaccgccacctcctacctcctcctggccccgctcgcgatcctcctgctcgtcttcgtgctaccgtcgctccgcccttggtcccgcgtaggctccgactccgacggcctcggcatcctcagcctactggtgggcgtgctgaccgtgccgggccggcgggagcggcgcgacatcgtgcgcacggcgtacgcgctgcagccggccgcggagggcgcgcgcgtggacgtgcgcttcgtgttctgccgcgtgacggaccccgtggacgcggcgctgctggcggtggaggcgaggcggcacggggacgtcctggtgctggacggctgcgccgagaacatgaacgacggcaagacgtacgcgtacctgtcgtcggtgccgcgcctcttcgcggcggagccgtacgactacgtgatgaaggccgacgacgacacgtacctgcgcgtggcggcgctggcgggcgagctgcggggcaagccccgccacgacgtgtacctgggctacggctacgccatgggcgggcagccgatgccgttcatgcacggcatggggtacgtggtgtcgtgggacgtggcggcctgggtggccggcgcgcgggagatcctggagcgcaacgacaccctgggccccgaggacctcatggtcggcaagtggctcaacctcgccggcaggggcaggaaccgctacgacctcaagccccggatgtacgacctcagctgggacatggacaacttcaggcccgacaccgtcgccgtgcacacgctcaagacgaaccgccggtgggcggcggcgttcaggtacttcaacgtcgtcactgcggggatcacgccgtcgtccgaactgtaccacctgccgtgatcgtctcatcgatcgaccaacactttttttttttgtaattgtctgcgacccttgccaattgtataacaattatctggcaatacatgaatggatcgtggaacagtggtgggggagcatttgagtcacgttgacgcgctcatgtaagcgcagcgacgacggttcgcccgttgacgcgctccaaaccgccgtgcaagttcctctcccggcgaggcgacgggtcccaaaggctgggtcttggcctcgctccgtcgctcgtgaggtcgtgacatggcatcctcgccgccgattcattgatctagatcggaaaacagcattgccaatctaatctgtctttgtcgtcctttcctcttttttttgtctttcttttggatgaaaatggatgccaaattgcctagtgatagacaaaggaggttagggtatggtatgtgcaatgtctgtcatcctgtatatccctgtgtactctccgcaatgatcgacgacacttgcatggaagccgtgctgtccacactccacaagtggtggcaactagcaagcacaccggttttcatttccttgtctaacttatatttggcacttggcagccaaggaaaaactcaaatgaccaaaaatgtatgaaccggaagctttcgtttcaaaaggcc

SEQ ID NO: 143760 - DNA, 1585 bp, Zea Mays
ctggcgagtgccgacctcgaccgattcttcttcgaaatcctccactagaggatcgcagcttctcttttgagcgaacaataaagcaccagctgctctcacgcttccgcgtttagccaggccggccccggccacgagcccacgacaatgaagccgcccgcgtcgtccaccgccacctcctacctcctcctggccccgctcgcgatcctcctgctcgtcttcgtgctaccgtcgctccgcccttggtcccgcgtaggctccgactccgacggcctcggcatcctctgcgcccgccgcaccggcggcttcgtcgacgtcgccgccgacgcgccggcgccgccaccgggccagacgacacgggcggcggagttcagcctactggtgggcgtgctgaccgtgccgggccggcgggagcggcgcgacatcgtgcgcacggcgtacgcgctgcagccggccgcggagggcgcgcgcgtggacgtgcgcttcgtgttctgccgcgtgacggaccccgtggacgcggcgctgctggcggtggaggcgaggcggcacggggacgtcctggtgctggacggctgcgccgagaacatgaacgacggcaagacgtacgcgtacctgtcgtcggtgccgcgcctcttcgcggcggagccgtacgactacgtgatgaaggccgacgacgacacgtacctgcgcgtggcggcgctggcgggcgagctgcggggcaagccccgccacgacgtgtacctgggctacggctacgccatgggcgggcagccgatgccgttcatgcacggcatggggtacgtggtgtcgtgggacgtggcggcctgggtggccggcgcgcgggagatcctggagcgcaacgacaccctgggccccgaggacctcatggtcggcaagtggctcaacctcgccggcaggggcaggaaccgctacgacctcaagccccggatgtacgacctcagctgggacatggacaacttcaggcccgacaccgtcgccgtgcacacgctcaagacgaaccgccggtgggcggcggcgttcaggtacttcaacgtcgtcactgcggggatcacgccgtcgtccgaactgtaccacctgccgtgatcgtctcatcgatcgaccaacactttttttttttgtaattgtctgcgacccttgccaattgtataacaattatctggcaatacatgaatggatcgtggaacagtggtgggggagcatttgagtcacgttgacgcgctcatgtaagcgcagcgacgacggttcgcccgttgacgcgctccaaaccgccgtgcaagttcctctcccggcgaggcgacgggtcccaaaggctgggtcttggcctcgctccgtcgctcgtgaggtcgtgacatggcatcctcgccgccgattcattgatctagatcggaaaacagcattgccaatctaatctgtctttgtcgtcctttcctcttttttttgtctttcttttggatgaaaatggatgccaaattgcctagtgatagacaaaggaggttagggtatggtatgtgcaatgtctgtcatcctgtatatccctgtgtactctccgcaatgatcgacgacactt

SEQ ID NO: 143761 - DNA, 2307 bp, Zea Mays
cctgtctcgccattgcctcccgcccttgctccatcctctctgccttgggcgatggaaggcagagggtgacggccaggaggaagcggtcaataaaagacaaaaaaaaatttgcccaaaaaaggactagaataacagctccgatccgaccatgtcgtcgtcggcgttcggcgacttcggtccgctcaccgagcgccgccgcgccgaaaaggcgcggcagcagcgcaggcgcatcatgatcgccgccgggactatctccatcatcatcatactcatcgcaatgggcagcgccgcggtcatgtacagcgggaagaagtcgtccagcgacggtggccacaagtctgcttccaaaggcaagtcgagcggcgggtcagactcggactcgggagcggaagcggaagcggaatcggaatcggaatcggggtcggaatcgaagacgaatctgaaggccgtgtccaagagcatcaaggcgatgtgctcgcagacggactacacggacgcgtgtgagaagagccttggcaaggccgcgaacgccagctcgtcgtcgcccaaggacatcatccgcagtgctgtggaggtgatcggcgacgcgatcggccaggcgttcgaccgcgccgatctgatcctgagcaacgacccactcgtgaagggcgctgtcgccgactgcaaggaggtgttcgcggacgccaaggatgacctcaacagcacgctcaagggcgtcgacgacaaggacggcatcgccaagcagagctaccagctgcgcatctggctcagcgccgtgatcgcgaacatggagacgtgcgtcgacgggttccccgatgacgagttcaaggccaaggtgaaggagtcgttcaacgatgggaaggagctcactagcaacgccctggcgctcatcgagaaggggtcatcgctcctctctgtgctaaagggcggctcgaaacgacggttgctcgaggaggagggagaaccggcgcaagccgggcctgcactcgacaaggacggcatcccggagtgggtgcccgacggtgagcggagggtgctcaaaggcggcggcttcaagagcacactcacgccaaatgtggtggtggcgaaggacggcagcggcaagttcaagaccatcaacgaggcgctcgccgccatgccaaagacctacgacggaagatacgtgatccaagtgaaggagggagtgtacgaggagtacgtgaccatcaccaagactatgaagaacgtgaccttcttaggtgacggctccaagaagtccatcgtcaccggcaagaagagcttcgccgacgggatcacgactttcaagactgcaaccttcactgcgcaaggcgacggattcatggcgatcgggatggggttccaaaacacggccggcgcggagaagcaccaggcggtggcgctgctggtgcagtcggacaagtccatcttcctcaactgcaagatggacgggttccaggacacgctgtacgcgcactccaaggcgcagttctaccgcaactgcatcatctcaggcactgtggacttcatcttcggcgacgcggcggcggtgttccagaactgcatcctggtgctgcgccgcccgatggacaaccagcagaacatcgcgaccgcgcagggccgcgcggacgcgcgcgaggccacggggttcgtgctccagaagtgcgagttccaggccgaggccgcgctccgggactccgggcgcccgcccatccgcaactacctgggccggccgtggcgcgagtgctcgcgcaccatcgtcatggagtcggagctcccggacttcatcgacaaggcggggtacttgccctggaacggcgactttgggctcaagacgctgtggtacgccgagttcggcaacacagggcccggcgccaacacggcggggcgcgtcagctggccggggttcaagaaggtgatcagcaaggcggacgccaccaagttcacggtcgagaacttcctgcacgcccagccatggatcgatcccacaggcacgccggtgaagtacgacctgttcacatgaggacacagctggaccggggatcggatcggagggaagttcacggtgggggatcggagaccagcgcggcagaatgcatgcacttggttcgttgaatcgttgggtgtcggaggcaagggggaggaccgatcactgcatacacgagtggaaaatgctactgctgttcagtttaagttcgcgttgtacttgtatgtatagtggctgctacttatgtgagttttgtacctgtactgtacatgaagtctcttttcttttatataccatggctaagggggtgttgactaagtttc

SEQ ID NO: 143762 - DNA, 626 bp, Zea Mays
tttttcttaccctaatccttctcacctcatttggcagacaaccagaactgctttaacaccactgaccgggtggcgacctggtgcatgaactgggcgtgcaagttcggctgcctgattgacgccaagcagtaccataccaagtacaagaacagctggtgcgaaggcttcgggagaggcgtctgtcactgccagttctgcgactgattctcacgaacagtcatcttgaaataaatagatcatcatgtaataaaagccccgtggtcgtacaatataattttaaaaatgccgattgtagggatggaatcagatggaaaatgttgtagtgattaaaggcccctctgcctttggcaatagtataatgttctgcgctttgaaacaaacactggctacccttggaatgatttggcggacgatctttatatggcctccttactctaggcgttctacagtgtgcgtacaaatttaattatttggtttgtttttgtttagataaacattttttaatgcttcggtttaccacgggcacaattcaacccaccgcccttctcctaataggccagggtggccagctcattcactcccttcctctcccacagatgccggcctactagctgcctcaaccatag

SEQ ID NO: 143763 - DNA, 1954 bp, Zea Mays
cattatcccaatatatactcccttcatttcaaattagcatttgttttagttcttagattttttttgtctatatctaaatggatgataacaaattagacatatacagaaaacatatatcaattattgtataaacctattaaaaggttaaaaccaattttaatttggaacagatggagtactttttttcttttcatttcaattgttcattcaggtcattgctcacactgacactgccacccatggtgatgcgtgacacattattactcaatcatcgccgctaaatgactcaactagctagctagccagcggctatactacagcacatagtttcttcagtgggggacaccgccggcagcagcgtaggggcatggagtcggctgctgcaggccgcacatcgccgtcagttgctgcgctatctgcgccgccaacagccccgcgacctggccgctttgcggctgctgctgcaggatggactggaggaccaagccgaagatcgcctggtaccggtgctgcggctccacctgcctgagctgctggcaacactgctgccgcaacgactggcactgaggcgagcagtagggcgtcgccgtcgggctgcactgatgcctcaggaactcgacgcactggcccaggatcggggtgctgccaacgccgcaggttccctgcagctggcacgggcttggatgcggctgttggcacgggcatgggtgtggctggggatgaggctgaggccggggcggttgagtagggtagtggcatggtggcagatgcaccggcggcggtagatgaaccggcggcggtggctggcagccgcagccgccgcttgtatgcgtggaggtggcgctcgcagcgagagccaggagagcgagggcaacgagcaacaccctcatggtgtcgatcgggttcttctgcgctctggagtagataaagctaatggtctgaagacccagtggtggtgatggagaagtgcacaggcatgcgagcgttatttatagctttgattaattaacacaatttcttgtgttcttatgccaccgagacggctgtaggcagcttcatggtttcttgccaaatgtatatgactcgtcactctctttacgtagcacgtcgatggttcatctggaatcattctgtacttctgcgtggctcagttttgttgccttctacaggttgttgatctacgtaaaacgaattagatttagcttgacatatggcttttttttgttgtaaatttactttacacgtcaaggatttttgtcctgtccggcctattttatttttcatgaaacgatctttgtaatgcaatatgagttgtttgtaatgtcttgtgagctgtaagcatgtatatcagatgagtatgatctcggcatgactcaccgtgtttctttgcacacagagaggatttgtttgattgtttcttacccaatacccttgacgtgcaattttggttgatgttctgtgagttgttaaggatacaacaaattcttggagctttacatgccaatgcatggttgtttcgtgttcctcaccactttaggacttatacggttgcacctggatgatcgaaagggattgggagagattaaatctccttctattcaattttgactaggaagagatttaatcgtttccaacccctttcgatccagacgtaagcgaacaagttttttatttggataccctcttattcatcttaatacacacatgtattaagttgcactagttatatgcccgtgcattgctacggtttatatatatatatatatatatatgatatatgataaattttgttttaataaaacatatgttttctattgattaggttgtgtgaatatggagccaacaaccaatatccagaacacttatacataatttcaccttattttgtacataaactctcttattatagtagtagagaagagattataagagtgcgggttgattataaagaaat

SEQ ID NO: 143764 - DNA, 1422 bp, Zea Mays
aggttctgaagcatctagcgccagatatatcatacaggagcttggttgcacttggtattggttgtataaatggtactcctgttgcttcatttgagaggcgggatgcagaccgtctattattcttttgcacaagtcagtgcaaagatttggctaatgaaaatggtccatattttcatcttccaagatggtcagcctcccttaccaaggacagaacaaaggtgggttcagaatcaaaacaaaatctgttgggtgcaaatggagttttggaagacaagaagcatatgatggaagggccttcctcatggtcagccgtcaaggctaaattaaagcctgcaactatgaggcccattcctcactctcgaaagcaacaaatgcatccatttatgggttttcctgaaacttcccttcacgaaactagtattgtgaagccaagcttgccagctgcaccaactgtgaagcacaattcagtttcttctgccacaaccacgcacagaaaatcaacatcagggccgtctcatactccctcagtcattcagttaaatcctctgccaatgaagaaacacggatgtgataggttgcctatccaagtgtgctctgaggaggattttttgaaggatgtcatgcagtttttaatccagaggggccacaatcgacttgtacctcacggaggactagctgaatttcctgatgcaatccttaacgccaagcgccttgatctttataacctgtacaaagaggtggtgtctagaggtggattttatgtgggtaatggcataaactggaagggtcaagttttttcaaagatgcgtaaccataccgcaacaaacagaatgactggtgtaggtaacacgttgaaaagacattacgagacatacttgttggaatatgagttggcacatgatgacgtggatggcgaatgctgcttactttgtcacagtagcgcacctggagattgggtgaactgcggtttatgtggtgaatgggctcactttggttgcgacagacgacaaggactaggcactttcaaggattacgctaagacagatggtttggaatacatctgcccccactgtagcttagcaaactacaagaagaagccaccaccaccaaaagcagctaacggtttttcaaatacagcatctgtaccacgaaatgcttaattttcttgttttttttttcttttcctttggtcccatgtttatgggaagaatcattagagtagataataggctgatggaaagatgggcaaggccttccaggtatgtagtagtattcgaatgtatcatctcgttaatttagtggttattatgaggcttatataacatgtaacaactgataacacagacaagctcctacagtagttggttagatgctggtgtaagcttcttgtttatattaatctcaattgtgtttttagtttcc

SEQ ID NO: 143765 - DNA, 518 bp, Zea Mays
acatccagggccagcagctcgaggatgagaaggagattggctcacttgtatggggggacgccgatgtctctgatccgcaggcatttagcactcttatcagcccaccattcccaacaatagtatatctggaagttcctattggtgaaaaacttgctcaagcagttcactcaaaggggatcccatatgtaatatactggagaaattcattctcgtcttatgcagcatctcattttcgccatgcgttgatgtcagcaattcaaagttcagtgagccatacttgggatgcttttcagcttgctcatgcatccttccgtctatattgtgtaagaaacaatcatgtgcaaagtgttaagcttggtccgcgtctccttggggatgctccaaaaataaatataagcccacctgagacagaaatggttgatgaagaaggttcatctgaagtgaccccggctataaaaatatatgatgaagaaatcaacatgaaattactcttatgtggagtgccatgcaccttggta

SEQ ID NO: 143766 - DNA, 973 bp, Zea Mays
ctttatcaaggccaaagccaggcatggccgcgtcatgtgcgaggctgggcggcgcgccgccgtagctgctcctcattctcttcggcgctccgccttgcgtgtaagacgccgccggcagcacggcgttatcgggagcgaagaccgaggaggtgtagtccgaggtcatggcggcggccgccgcgtcgtcgtcccacgaccacgaccccaccaagtcggaggagccggagccgtaggagttgctgcgctggtcgtcggagacggagagcatagtgttggtcgcggacgacctcctcttattaccgggcaccaccgccaccgcaggcgcagggacgaggaagctgccactgccactgccaccctcggcggcggctggcttcgctgcaggaaccttcttcttattgtcaccgaacgcaaacatcgcaaacagatcatcgttgttgttgttgtcgtcgttcttcaggttgttaaagatctcatcggtcgttggcctgtgacgagtgcctgtcgcgtcatcgggaaaattcaccttcgctttcttgccgcggatcttgcgagcttcggcgtcgtatgccctagctgcctcctcggcggtgttgtaggttccgagccagacgcggacgcccttgttagggtccctgatctcagctgcccatttgccccaaggccgctgcctgattcccctgtactggttcttccggccgcgcttttttactgctctatctccttggacatcctttggaggaggagtcatcacgccatctataataaaaagactgtcgtctatcagtcagtccgtctcaacaaaacgtatctagcatgaattgtttgtttgtttgtaatcaacgaatagctactctacttgtttgtagggtagtttgttcgggttgctgaattggagaaaaagtagcaaacaacaaagaggctgaagcataaataatgtcattctctcaggaaaaaaagaagaagagtcagc

SEQ ID NO: 143767 - DNA, 965 bp, Zea Mays
ctttatcaaggccaaagccaggcatggccgcgtcatgtgcgaggctgggcggcgcgccgccgtagctgctcctcattctcttcggcgctccgccttgcgtgtaagacgccgccggcagcacggcgttatcgggagcgaagaccgaggaggtgtagtccgaggtcatggcggcggccgccgcgtcgtcgtcccacgaccacgaccccaccaagtcggaggagccggagccgtaggagttgctgcgctggtcgtcggagacggagagcatagtgttggtcgcggacgacctcctcttattaccgggcaccaccgccaccgcaggcgcagggacgaggaagctgccactgccactgccaccctcggcggcggctggcttcgctgcaggaaccttcttcttattgtcaccgaacgcaaacatcgcaaacagatcatcgttgttgttgttgtcgtcgttcttcaggttgttaaagatctcatcggtcgttggcctgtgacgagtgcctgtcgcgtcatcgggaaaattcaccttcgctttcttgccgcggatcttgcgagcttcggcgtcgtatgccctagctgcctcctcggcggtgttgtaggttccgagccagacgcggacgcccttgttagggtccctgatctcagctgcccatttgccccaaggccgctgcctgattcccctgtactggttcttccggccgcgcttttttactgctctatctccttggacatcctttggaggaggagtcatcacgccatctataataaaaagactgtcgtctatcagtcagtccgtctcaacaaaacgtatctagcatgaattgtttgtttgtttgtaatcaacgaatagctactctacttgtttgtagggtagtttgttcgggttgctgaattggagaaaaagtagcaaacaacaaagaggctgaagcataaataatgtcattctctcaggaaaaaaagaagaa

SEQ ID NO: 143768 - DNA, 96 bp, Zea Mays
cacgttttcgtgatagacaacatttcattttatctgacatcaatggagccaagatcgaggccataacatatttgtatgagacagtcaaacatttcg

SEQ ID NO: 143769 - DNA, 465 bp, Zea Mays
atgacctaccgaccgcgatgggtggtgctagtgcatcacgggacttcgccgcgcacgtatgtggcctcgtcaggcgtgggccatggtcgggacgccgacaattgcacgtcggcgctcaccaatccgccctgggccgtggtcgaggaattccgtgctgtaattgccggtcagcttctctcccacagattcacattctcgtatgttcgtagtgacctcgcccaagccattgcaaagatgcatgtagttgggaaggagttgaaagatttggccggagacgagattatggattcgccagatacggccaaagaggtgtcagtgaacttcacaatgtggcgcgtgtatgagcttgctcagtcacttgaagctggtccgtcgccaccattatctgagtgtttcaacaaccaatttgctgaagatgaagatatgggtggtggggaatgggcactggatgatgtcagttcttaa

SEQ ID NO: 143770 - DNA, 735 bp, Zea Mays
atggagtacaacgaacgagtacgacgtgattacccaggtcctgcatgccagacttctctccatccctttcccttgtttcgtctcgaaggaagctctcatcaagctgttcagagatccaagaaaccatcactgcgaaggtgtacggcgactgtccgtgcgcgcgcaagcgtcatgggcgacgacgacggcgcgaaggcggcgtcgggcgtgaagcagatcgtgcggctgcgagagctgctgcacaggtggcatttcacggcgctgggtgcgaagcagcagcagcagcgggaggaggagggccgtggccatgccggcgtgccggagggggcggtggcgccggcgatcccgccgttcgtgctgcggcggctgcggcgcacggagacggcggactcggtgtcggacgacgagagctgccacagcccggagccgccgccggacgtcccgcggggctactgccccgtgtacgtggggcccgagcagcggcggttcgtgatccccaccagctacctggcgcaccccgtgttccggctgctgctggagaaggccgaggaggagttcgggttccggcaccaaggcgcgctcgccatcccctgcgagaccgaggccttcaagtacatcctccagtgcgtcgagcgccacgaccagggcctctccggcggcggcggcggcgacgaggcggcgaaccacccgacgacgaccgtgctggagcaagaaccagcggtgcgtcgtgcgtaa

SEQ ID NO: 143771 - DNA, 621 bp, Zea Mays
atggtggctggcttcctccatccttgtgctgtgtcctcgtcttggcccggccggctgcttcagcggtccagcgaactgatcaccacccagtcgtacacagtggggctcctcggcgtgccgggggcgtcggcgccgtcggccatcctgcctttccggcgcagcttcttccagccctctcccctgggcgtcgtcgctgcgccgaagggcgagtccggagcgccgcttgcgggcgacggcgacgacggcgcggagctggactcgctgcgcggcgacgtggcgacggacagcgccgccggccgcagcatggtgatgctccgcgtcacggcgggcggcgccgcgccctccgcggtcggcgacggcgcggccgacgagggggagaaggacgcgtgcttgcggagcttgccgaggccggagtccgggcgcggcccggccaccgtgtcgtcccacagctggtccagaagccccatgcgcgctctgctagcctacgtgcgtggagcgcccggcgtgctgcgcgttttgcttagagaccgatggtcgtgctctgtttttgtttggttcttagatgtttatcgttgtccttgggcgaggacgagaaggcttagatctgaacttcaggcgtga

SEQ ID NO: 143772 - DNA, 1333 bp, Zea Mays
cctattggcaacatcccttcatcgagcaatttaactttgagctcaatatgtgtcacgatacacttatacacacagctactaccgtatcaaaatgcagcttataccgaacgcaaacagaaggaaaagaaaagaaaagaaaaaaaagcaaaaaatgctcagtggtgcaggtgaaactgacaataattccaggcagttcaccagtgcatattcgttcgcacactccgccagccacctatatatacgcttcccacccaaacccaccttccattcctcaccgcacgaacaccatcccccacctcccccctcctcgatcttcaacaaccgccgagacctgtccaccaccaccgccacacgccgcgaatggagctcctcggcctggtgcccgcggaggccatagcgctccgcctctactccctccccgcagcagccgcggccgccggctcgctctacgcctggctcgtcgccgcactcgccgccgccatcggcctctggcgcatccgcgccgtcagcgtttccaacatcaacaagcgtgacgcaggcgtcagcgccctcgtcgacgataaccaggagccactggtgcctcttctgccgtctcggggggctgccattactgacgagccgcccgccgccgagccgtcttccgtgagcgagccgagcacgccgtccaaggttcggttcactgcgtactacggtggctcgggagacgaagacggagtggtcgacggcgtcaggaaatgcgcggatgacgacgacgtcgacgacggtgcgcgcggccgagactgcgcggtggaggtggttctcagaaggaccgtgtcagagccggggacaagaagagcggcggccctggccacggggccgtgggaagggagggagatggcggtgaggcggaggagtgacctgggttggtaccgccacatcgacatggccgcgctcgacggcagcgtcgtgaggctgtgggacggcgacctgacggcgtcgccgagggggcggatgaggaggtcaggattggaattgcaattgccattataggaggtactagtgtggttaatatatttatgcgggtacaaacaatgggatactattaggaggatacgacgattttgtccttgagatcgtcatgagctacagccggggcgaagtgcctttgtgtaataataatgtactctagtgcaaggacacaaatgcgatctgaacgtgtctctgtgctctactgctatcttcctcgccagtgccggtcctgacattagagaggcccaggacaagacttataaaggagaccctttataataataattattacacgtaaatatagtgtgtatatattgtcaataaa

SEQ ID NO: 143773 - DNA, 1453 bp, Zea Mays
gtccaaattcacgagccggcgtgctgtccgcgcggcaaacctggagtaattgagcctgccgcgcgcgaccgctgcccccgacacggtcacgcctcaacggcgcccaattgatcgcgcgccgcgggggggtccgtatatgtagcggccttgcggtcgcggcggcagccggttgttggcaggcacgggctagagttcgcgcggtggtgatgatggcgacccaccacgacgcgctgtgggtgaagctgcacgagctggagctgcagctcgcggcgtacaagctcctgcgcgccgcgcgcggggacgaccacgcgggtgccgtgggcttcgcttccgcggacggggccgacacgccggggggcagcgcctgccgcggcaggcagtacgacgcctacatgcgccagcgcgacgccaggcgcgtggccgcgctcgcgcagcagcagcagcagccgccgcacccggcgaacaataaggctcagcgacctcggggcgtgcgcgccacgccgatgagcccgcgtgcgctcaggtgcgcgacccggaacgtgcaagaggcgggcgccacgccgcggctggccgtcaccccggtgaagaggacgccggccgcgtccatcccaagcaccccgagaagggacggcgccgcgctgccgaggagcaggacggcgagcggcggcggcggcacggcggggagccccgcgcggtcgtcgcaccaccagaggcggagcagcctcggcgtgctcgcggagttcggtgagtgcgccacgccgaggccgttcctgaaacgcggcacgggcacgggcggcgcggcggcgcccgtcaggctgcggacgacgcgggtttacgacctgccgtcgatcgacgtggccgtcaccccgaggccgctgcctcacgtgcatgcgcacacccatgcccatgcgccgcgccacgtccggtccctgtctgagctgccgttcgacaccgcggcgctggcctcgccgcagtcgcgggcgaggaggcggtggggcagcccggagaggccagcggcgatgttctcggctgctgctgcagcggcggccgactcgcacagggacctgtccaagggcctcaagaagttgctgagctacgtgaggaaaggcggccggagcggaggaggcggcggcggcgaccagcctttcccggcacccagcccgcgcgggagtgggaagcccgtgagcaaggggtggtctggttgctcccgcgtcgacgtcccgttcgaccgcgcaagcctggacgtgcaccggttccccatgacgcgggcagttggcatctccggatgaggccctgcgcggcacggcgccgaacagtgacacgccatgggaactgccttcattgctctgcgttcaggtcatgtggttcgacgagccagagcatcaccgctcactgcacttccctgtgcctccctgcttgctggtgcgaaacagagttcagagactggccccaa

SEQ ID NO: 143774 - DNA, 1444 bp, Zea Mays
gctattaaagggggggcaaagggccatttgcgagaggaggaaaagcacgcgagagcttgtcggagggctctctgtctctgtgataaaccgatacgcagaggaagctgcggagaggtgtccctgctctgctggtgagctgcggccagcgggtgaagtgaagtggaccggacgtggacgaaggagagagagagagagagagaagaaagggcgccgcgggggccatggctggacacgcgccggcgagggacaagaccaccaccggcttcgccgctacgtgcagcctgctgagccagtttctcaaggagaagaagggcggcctgcagggcctcggcggcctcgccatggcgccggcgccggcagctggagcaggggctttccggccgccgaccaccatgaacttgctgtccgcgctcgacgcggccaaggccaccgtcggggagccagaaggccatggccaacgcaccggcgggaatccaagggaggcagctggggaggaggcgcagcagctgaccatcttctacggcgggaaagtggtcgtcttcgacaggttcccctccgccaaggtcaaggacctgctgcagatcgtgagcccgccgggggccgacgccgtggtggacggtgccggtgccggtgccgctgtccctacgcagaacctgcctaggccttcacacgacagtctctctgccgatctgccgatcgcgaggcggaactcgctgcacaggttcctcgagaagagaaaggacaggataaccgcaaaggcgccgtaccaagtcaacagttccgtcggcgctgaggcgtccaaggcggagaaaccctggctgggtctgggccaggaacaggaaggaagcgacggtcgtcaagcaggagaggagatgtgatcgatcagtagagactagattcgttcgtgcgcgcgtcgtcgtagcttcaggttaagggaaagaataatccaaccgtcggttaattgctcggcttaattacactgctctactacgtagtactggcactgctaccaccaccaccaccaccagagtgaccaagttaagctagggattgttacataggccggccggtcggccgttcgttcgcgagattgtttcgctgctggagatgcgcatgcacgctcgcagcagcttcgctggtccgcgtggccgcgtcttgtgttcgcgcaacgaacggtgcacgttccggtacgttttcatttgtctccgacctgtcctgtgtgtgtgcgtgtgtttttgcactggatattccccctcccctctcgtggtcgtagggagggtttgtatgttcagtggaaagatgtttggtatggtctactccattctatttcatgattcatgaatatgtatgtatgtatgtatgcgtgtgatgtactactgtggtatgctgtataaatttataaacacgcgctttattatattctgagctccagaggtgttttggc

SEQ ID NO: 143775 - DNA, 769 bp, Zea Mays
gctattaaagggggggcaaagggccatttgcgagaggaggaaaagcacgcgagagcttgtcggagggctctctgtctctgtgataaaccgatacgcagaggaagctgcggagaggtgtccctgctctgctggtgagctgcggccagcgggtgaagtgaagtggaccggacgtggacgaaggagagagagagagagagagaagaaagggcgccgcgggggccatggctggacacgcgccggcgagggacaagaccaccaccggcttcgccgctacgtgcagcctgctgagccagtttctcaaggagaagaagggcggcctgcagggcctcggcggcctcgccatggcgccggcgccggcagctggagcaggggctttccggccgccgaccaccatgaacttgctgtccgcgctcgacgcggccaaggccaccgtcggggagccagaaggccatggccaacgcaccggcgggaatccaaggtaaatcacaagcgaaattaaacccacgaccgtccgtgtgcaatactcctggtaaattgatgaccaggaaatcaagaaaaataaagcgtgtgtttgcgcatgtgttcaattctccccaacaagaaagaacaacacacactcagctcaaaagaaagaacgaacgaacgaacgtgtgatatatatatatacacacatatatatcattatgggcaaataacagagacagtgttcctgcagggaggcagctggggaggaggcgcagcagctgaccatcttctacggcgggaaagt

SEQ ID NO: 143776 - DNA, 378 bp, Zea Mays
atggagagtcccgacaggaatggagatgttgagcacaatgcgacagatgtaaattggtttgtcagcattgaagatgttgagcacttgcttattgagccaccagccttgcctgatgtagagcaagctttgccttgtgttgattttttgcagcaagagaccagagttgtctatgactctaataatccagtgatggagctgccagcagtagaagaggcttcaactgttcaggaacctgtaaacaacatcccttcttcctcgctgccaataatagaagaggcttctactattcagctgtcaacaaccgaatgggcaccacctagaagacttcggacagctgtcaacaagaaacttactccgaagaagaagatctacttctga

SEQ ID NO: 143777 - DNA, 96 bp, Zea Mays
ctttagctgaaactggcacactggtttcaaaatcgatcaggccagttttctctagaaatagattgtatcattctgtttctcgcgtggagctaatgc

SEQ ID NO: 143778 - DNA, 2128 bp, Zea Mays
caaagagaactggtctgggccgaccaaaacactttccttccctccccgtttcctaccgacggccgagggggccacatccttcggcttctgtcccggttttgccccccggcccctgccgagctcagcaggggaagcgcggcgctctactccactccgcttcacgccagatccaacctcaccagctcgcccccatggccgtccacctcctccttgccgttgccgtcgctctcctcctctgccccggggatgcgtccgtgcacgactaccgcgggctcagctttgccaacaagggcaacgccttcattctccacgccggcagcgagggcctctacgcggcctcccacgccaacaccaccgccgaggacgacgaggacaccgccgcggtggccgacgccttcatccggtttgacaaggttacttttagacgaccagaagatactaacgattctgtgaaggagactagttcagctaaggttcacatacttgtttttgaggtagaagaccgtgaaatgattggtggatctgcctatggaggtcagaaggctatttgttgtagttcagatcttgcaaaattaggagcttgcaaagaaggttctgtcatctatcgcccatcccaggtaaatcctggttggccaaagttgtttgttgcatcttttgagggaagtgatctgatcgcaacgctgccgtcaaggaccattcaaattaccaaaactgggatgtacaatatgtactttatacattgtgatccttcacttgctagtttggaaatcgaggggaaaaccatatggaaaaatcctactgggtatcttccaggtcggatggcgcctcttaagaacttttttggactgatgtcttttgcatttgttgtgcttgggatctactggttttatcagtacatgaaatcttggaaagaggttcttccacttcagaactgtattactcttgtgattacactaggcatgcttgagatggcattgtggtattttgagtatgctgagttcaatgagactggagttcggccaaaaggtatcacattttgggctgtcacgtttggaactgtgaagaggacggctgctgaagttattgtcctcattgtctcaatgggatatggtgttgtcgcacctaccttgggtggcttgacatcgaaagtggtcatgcttggaggaacgttctttctagcaacagaaattcttgagttggtagaaaatcttggtgctgttaatgatctatctggaaaagctcgtctgttcttggtctatccagtggccattttagatgccgcatttgttgtttggatatttatttctttagctaagaccatcggtaaacttcaggcaagaaggttgatggccaaacttgacatttataggaaatttgcaactgcattgattgtatctgttctggtgtccgttgggtggattggctatgagatttactccaaatcaacagatgtatttaacgaacgatggcagcatgcctggatcattcctgccttctggcatgtcttgtctttcttacttctttgtgtcatttgctacctgtgggcaccttcacagaactcaatgagattttcctacgacgcaagcgaattctttgatcgaaaggacaatctgtcattaattaggccagcaacgagtgcttccaagaacggctggagtttatcttctgcgccagaggccaaagcaacaaaggacgtgaatacagttgcagattttgaaggcgatgatgaggaaaacaaaagggagtagaatgtactgtcgatttggttaggggagggtatattctgagatcatttgaagtgggtgctagagcagttttggtacttaggagaggactggccatgctaattactaccagtggagcacgccacttgtggctgtttctttctttggttcattaccaccacagttcttcgcatgggtggctagttatgtacttatgttgtcatcgtcatagtctgaatgatggttatgataggggggaaaatagtctggtgtataatatttatattattggcaccatattgcttctggatcgtgggaactctacatatgctgcgaatgttagagaataaattgttttgctggacctttgctagaattccacttgattgtctaatgtttcgata

SEQ ID NO: 143779 - DNA, 1073 bp, Zea Mays
gtaggctaggctcgcgctccctcatcccactcccacgcacgtgtactactttacttactggtggggggccggtctccagttccgcaggatatgaagattttcagttgggtagccaacaagatcggcgggaagcaagaaccgaagcgatctgccgcgcattatcgtggcaacgtatcagaatgtcgcaacgacgagttcagtgattggccccaatcattgctggcaatcgggacgtttgggaacaggcagctggaggaaggggtggtggagacgtcttctgggaacgtccaggccgcgcaagaccccgccaagttcacagaggaagaagaggcggacagcatacggagagaactcgaggtgctgctgctgcaaggcaataataataatggcggccaagcagaggcgcagggctctcgtggagacgaacgacgacaggtagcttggaaagagcatgacggtgaatgtagcaaggagaagcagccgacgagcggggagatggtcacgagcaaggcgagagcgagagaaatggtagcagggaagaaaaggagcacgctgaagccaaggtcggtggcctcgctccttagactgctcgcgtgcaagggcggctttgccaccccggttctggaaccgaggagccctttcccccagtcgagaatggagaagctgctcaaggcgatactggagaagaagatacacccgcagaaccccagcacggctgcagcgaggcggcaccagctggactggaagctagacgagaaagagatcgacgagtgccttgacgacgcgctgcgtgacctcgacgacgacggcgccaagtgggtcaaaactgactcggactttattgtgctcgaaatgtaaaggcccgcgcgtgtgtggttatgtttgtttctttgaggccaggtcccgaagctctctcttggcggcctggtgcaaatatatatatgattattagattatatatgtgataaatagaaggaattaattatgggggtattgtaagcatcatgaggctatcatgtaccatctgtaagtttgggtttatgatgagtcggaacaacagatcctattccatg

SEQ ID NO: 143780 - DNA, 700 bp, Zea Mays
actggcgaccacctccaccccgctacggatacgcgacatcccggccgcggctgctgcgtcggaaggcggcggcactcgcgccacgcatgtggggcgaaactattaaaagggcgggcggggttccgtgaggtggggagaaagggcgggtggggagggaccggatccggtggcgcttgcgagaagggtggggggagggagttaatggcggcaatcgcgcggagtttcccttcaccttctccttctccttcgcccagtgaaggctggagggggacctcgcgggcggcggtggatgacgatgagcgccgaggggttgtggtcaggtcgtggaacctgaaggcgatctggctacacggcgcggcgggcgagggcggagcagtagatcagacggatgaaagaacagcggtggagacgaatgttcagtctgggcattattggtgtggtgtgtggacacatgtgatgatatgtgatggcgatagtaggtgcgctaatccgtggttgtttactggagtaggcagtgtgttttattgttagaaataatctgcacatcggttgctcttgttggataagcaagcgcgtagatgttgatgtgatgtacaagttggacttttttgcgagtgtccctttccagtgaggttagaggtgatatatcagcgtattgagaattgagatgtactaatcgatttaatctcggtattcacta

SEQ ID NO: 143781 - DNA, 1034 bp, Zea Mays
cttcccctcaccccgctccggatcggcgcagttgcaaccaaactgctgctgcggccatggcggtccgagccccctctgtgcgcgcatccagtccgtcgagtcgccgccgtagccgagctccacatgcgcagatcacgatttgtctccgcgcctcgaggaatcgacgatcaagcgttggcgaccaagtgatcaagctctctgagttctacgaggctgaagaccctgagcatctatttggtgaaagcaagtgtcctctgacccattatgtcccattcacttttaatgcactgtcccgcattacttaattgaaacctaaggattgactagctttccatttaccttatccttgtttaccttttgggttatcatggttagcattatgctattgctttacttgaatcaatgaacatgatgtgaatacttatgatactatgatgttatcccgatgatgttcctgtgatactttagggggctcaggctgtttcctgagtgcctctccgtaaggacctgtttggggagtgacaacccgggataacagtgcaaccatgagggtgaaatgggatgcccttagctaattaattagaggaactagaggtgtagttgcttcgccgtcgtgccgtcaatggggtccaggcacagtgcttgctctgccgaggctgggtgccgaggttctttcgttttgcttttgttagtcaccctcctgcggggagaggtactgtgtttatcaaactggagaaacctaacgggcggctatgacctctagagaatctttgtaaaggctacgtagtgataccctgccggaccacctaggaagtgatcaatggggagtcatgatccccgggcaagacgagaatcacggctcatgggtaaagtgtgcgacctctgtagagggttagaaactgatatatcagtcgtgctcacggttatgagcggccttgggatcctctttgattagagatacttgatcagagatggttggtttacaggtggtgacaaggatgatggttatgactatggtaatggtaagtagtgtt

SEQ ID NO: 143782 - DNA, 422 bp, Zea Mays
tccggccggcagaggaggaggaggcggatggccgtggcgcgcctcggcgacgcgtgcgacggcgccgccctgcggcgcggcggcaggacgttcgccctcgggaggatcgtcctgccgcggctccggctgcgggcgctgctgctgcggtcccggcgtctgctcgcgcgcctcaggaactactacgcggacatgatgaagggcctcatcgccgacgccgcggcagcggagcccgcgaaggcaaggagggtggtcgagaccgggaccggggagacgttggtgcacgcggggagacctgcaccagcagcggtcgtgccggccgcggtggccggcgccgtgctgcggtgcaactcgcactactacatccgttgagcgttgacgcgcgacatgcacgtacgactcgggttggcgttggggtaggtgtg

SEQ ID NO: 143783 - DNA, 130 bp, Zea Mays
ttattttttttcttttccattttattttcttcaatttcaacttagactcaaattcaaatttcagtttaaattcaaattgagttcaaccttacagcatatttaagtgctcaaataaaaccccaatcaagaa

SEQ ID NO: 143784 - DNA, 556 bp, Zea Mays
cctttcgcatatctgttgcataacagcatgagtattgttagatattgagatgcaagacatctagttcacttgtggaagctctttttttgtcattcagagagctcttttcattcacaagttactgaactgcatcttttgcaaatatgtttggccaaaatagaaaaacctgcagagaactttgttagcagagcagtgcaatggaagagcttgcagtcatattggggcatattatgttgttgctattggattgatattcttgacattctaattctagttggcttctgtcaacaggttttgtagtttaacctcagcatctatagagctgttgatgtaacctggacccttttgcgacagttttttgttttgtcaggtgagttatgattgcccatttgatccagcattcctatttactgatgcaacatgtgttcaatccaggtagctattatatgatactatcaacatcttttgatgtgtcacttcgatctacatccttcagcccatattttttctagtttgacaatagtgaccctaataaaatgaacaaaaaattacaaga

SEQ ID NO: 143785 - DNA, 144 bp, Zea Mays
cttttctattttctgatgcaacatctgttctgtccaggtaattattatctgacgctatcagcatcatttgatgtgtcagttctttcacccttataattttttagttcttaaaatagtgaaccttacactgaaaaaataaaaaaa

SEQ ID NO: 143786 - DNA, 694 bp, Zea Mays
tttttcttcattccggagcaaaaacaggacaaaaaaaccattctccatggctccatgcttggtttccccaaccccaacaatgcaatctacgtgaggcaatctagcaattcccgagacccagacttctactagttcattgctgaatctcattggacgcccccgattcgcccagcggcatcggagaacaagtcgcatggaagcccatccgaccggcgccgccatcccttcccccatggcggcaccacagccgccaccctcttccaccaccaccccgcccccaaccgctacaccacaggagccagccgccaccgccgtcaccgctgtgcgctctccccaacccgtgcgtttcgcattcctcgtcgtcgccgcgctcatgtccgcgtcgtggttcgtcgagccgttcagcgcggcggcggcggccgacctccgcgtgccgtggcccgctgtcgtggccactctcgtctgcttcaccgcgttattctgcgcatcagttctcctcttcgggtccttcttcatgttgcggccaccgctcgccgccgccgtcatggacgcacagtggaagggggtcagggccttcgccgccgtcttcgccgcggtggcgattggagttgccgcctgccttgttggcgccagtggatccgcgtatggttctggcggcggctacacatatagtgcctaaagcaactattctgtc

SEQ ID NO: 143787 - DNA, 453 bp, Zea Mays
atgagcttcaccaggttcttgtgcctcagttgcccgaggaagaacacctcagccagccactccttgtgcccctgcgcgccgccctccaggtcgaggtacttgacggcgacgtcctgcgcgcgcaggcccgggcggagggcctcgccgacggcgcccctgtacacggggccgaacccgccgcagccgaggaagttggcgcgggagaagctggccgtggcggagcgcagctcggcgtacgtgaaggcgtgcaggttggacccggacagcgtcagcgacaggtcctcgggggagagcgtctccgacgacgagccgaggctcgtgagcgacatccgcgacgacgacgacctcgggctgtccttgctgctgccgccgccgcagccgcgcctccgccgccgccgcagcgtcgagccgtcgtcctcgaccgccgcgctgccgcccacgcagcacaggtag

SEQ ID NO: 143788 - DNA, 705 bp, Zea Mays
atggaaggccggcgccgctccgaaacctccgcgcacacccatgcggccgtgctgtccctgtgctctgctctctatggaaggcctgcggcactccgaaacctccacgcacacccgcgcagccacgccatccccgcgctctgctctccatggaaggccggcgccgccatcccacgcccgatttgctctccatggaaggccgtccccgcgatctgctgtccatggagagcacggcctcaggccttccgaaatctacaccccacccccgcgaccgcgcgatccactcccccatgcccgatctgctctccaacatacaccatccgcgtgatccatggacagcagacagtccccgcgccttcccgatcggcttcgcccacacaatccacgcacctctgcgccccgtccggcagtgcctcagtggagatggtggatgacgacggtggatctcgtctggttcggatcgtcgtcgccagccagtgtggatctcggctctcaacgaatttcatggggttgttcgtaacatctgacaagatctgtggtggctgtttaggtgctggatccgtagtggcggcggcggccatggacaagagcatgctcggcgacctggatgacctccccgaggaggacaagatgtggatggccgccatgatcgaccagctccagatccgcgataggttcgtgccataccaactcgagccctcgcgctag

SEQ ID NO: 143789 - DNA, 1544 bp, Zea Mays
gtatccaagttgagccacctcagcaaacttgctcgtgacaacaacacggcaagcaggacagttgaagcagatcgcttgcatacgatgctcctcgcaatggcggatgcacgcgctgttctaataaagcttgcggatcggctgcataacatggagaccttaaaagctttgccttgtgccaaacaagaaagattcgccaaggaaacaatggagattttcgtgcctctagctaaccggctaggggttgctagctggaaagaccagctggagaatctctgtttcaagtatctgaatccggaagagcacgaggagttgtcgtccaaacttagggaatccttcgacgaagaactgatcacatctgccgtggataaactggataaaggcctgagggatgctggtgtctcgtaccacagtctttctgggaggcacaagagcctatacagcatccattgcaagatgctaaagaagaacttgacgatggaagagatccacgatatacacgggctgcgtcttttggttgagagcgaagaagattgctacgaagccctttgcgtcgtccacagactgtggcctcgagtcaccggtcgattcaaggattacatatcacgtccgaaactaaatgggtatcggtcgctgcacactgtcgtcatgagcgaaggcgtccacccgttcgaggtccagatccgcacgagggagatgcatctgcaggccgagtacgggttcgcggcgcactggaggtacaaggagggcacctgcaggcactcgttcgtgctccggatggtggagtgggcaaggtgggtgctcacatggcagtgcgaggcgatggacagagaacggactgcctcccttggcagtgatgacggtactgtgagcgtgaggccaccaccagcatgcccgttcccccagcatgcagaggactgcccatactcgtacacccgccaatgcaaccatgatggaccgctgttcgtcatcctcttggagcatggcaagatgtctgtccaagaattcccggcgaacttgacggtgatggatctcatggaccgcgtgggcgccaacagctcgagatggagcccctacagcattccgatgaaggaggacctgcggccgagggtgaacggcgagcccatatgcgacccagaccggaggctcaacatgggggacgtggtggagctgacgccggccctgcctcgaaagtccctcagcgggtaccgggaagagatccagcgcatgtacgatcgcggcggcttcgcgctctcagcccggggcggcggcggcggcggcggcggcgccagacgctgctgagagacagtagcaagacgacgatgcgtagccctttttttttctagtaccattgtaccattcaattcgttgtaaatacgtagtatagcaggtaggtaggccttgcagccggggtgggtgggttctgaaatctgttgcaccctgtcctgaaccccatgcagtgtgtaaaaagtagaacgctgtgtatgtaagctgttcaagttcgtctcagcttctatctcaggccctgtttgaattacaaggactaa

SEQ ID NO: 143790 - DNA, 1026 bp, Zea Mays
gactccacctcaccgaggtcaaatctttggcatcggattctgttctgtgctgccttttggtttcggcgccgaattcagttccgattccgaacagttagcagctttaagcggctttcagttcgagcgcgtcggaggcatccctgattccggcgatgtcgttgcccgcgatttccatgtacaccagtccgccgggcgcggtctactcttcggagttcgacccagcctcccgtggctcgtcgccttgcaccaccgctgcgcccccgccgccggccgcctcgtaccgcttgccctccggcggcggcggcctgtcttgcctcttctcctcgccggcagctgcggccgcgccgccccgcgccccggctcacgacgacctcggtgcgctgtggcacaacagatccgacgacctgagcgtccccgccgacgggggcgggtactcctactcgcactcccactcgtcttcgcagctaaagcggagggacctgcatcaccaccaccacagccccgtgtcggtgttccaggggccgtccacctcttcaccatcccggagcccaccggcttcttggctcgccgcccgcgaccgcgaccgcctcttcgctggcttcgtgcgcaacgctctcggttcctgcgttgactacgcgccgcccaccagccctcgcccggaggtcggcgccagcgagctcgcgttcgagctcgacgagaacctcgcggaggctagccctgcctgcgagccatacgcccaagagctgctcgcgagtgcccaggatcgccaccgcatcttccacgaggagctggtcgtgaaggccttcttggaggccgagaaggctcaccgtggccagacgcgcgcgagtggtgacccctacttgcaacattgtgtggagactgctgtgctacttgccaaggtcggcgcaaatgcaacggttgtctctgctgggcttctgcatgacaccattgatgattcattcattgactatgaccacatcttccatatgtttggtgctggggttgccgatctcgtcgaaggggtat

SEQ ID NO: 143791 - DNA, 4718 bp, Zea Mays
ctccaggtagctcagttccttcaccactagccacatcaatctagacaaaaaatgcagagcagtgaagtttgagataacatcactccgatgtattaagaccaatatcttattgtcaaggtttttttaatcgttaattaagatcttacagatgtgatggtttagagtttattaaactcgtatacaggtttacacaaacacaagcatgtattccatcaactttgtttcaaccaagaatgccataagattaggtgcctgtgtataagagcctcgagaggaaatgacgcttcccctcccgcctcctcgactccctccaccatcctttcgcctccctgccttggccgacgcccctgcctcttcctctaccagccccatgccggttctcatcctgaggccggcggccactgcactttcctccccggcgtcggccgctgctcccgtttctcctctccccagccctggcgggcgtacgaaggcccagcgatggagtgacgagggcggccactcttcggctgtcgctctggttcacggcgcgtcccggcattcctacaaggaggtgttgctggctgcagaatttccagcttctggtggcgccgccggtgtggttgttggcgatggctggataagagtggaaggtcgccgggctcgacgtgcaactactggaacttcgaagcccctgccaaggcctgtcccgcttagttcgctggttctcctgccggcggcctggtcaccgggcgctctcgtgccctacccggtggtcgcctctatccccctctcgacctgctcgggtgtggcgcccggtcagcagggggtcgcttctcttcctggacgtgctcgggtgtggcgcccggtcagtaggggggccgcttctcttcctggacgtgctcaggtgtggcgtccgatctccagggagtcctcttcggtggcgactcctcccggtgcaatggaggcagtcctttctggtgggctaaagaagcgcactcgtcgaggacagaggaggaggaaggttgctggggacatgcaagttgatagtgttgtttctggtcaggtggcgtcggatcattcgcctagagggcctgctcgtattgtgaagttccttcgtcgctccagggaggttgagcatgctgaggctgaccttcgtcgggtgctgattgtcactattcttggtccggggagctctgattgcgccgcggtggtgttggagcagctcgcctcaagggtttcgcttgaagctgacgcgctccacctacggcgtgctgcgtcgaactctttcctcgtcttcttcccctcggaggagctggcttcacgtgccatcaatgttgggcagtcgcttttcgttccccccgtccggctgcacctcaggcgttggtctcgtcaagccttggcctctggcgggagcagcctgccattgctcatggatatcgagttggaaggggtccctgctcacctctggggggttggaactgctgagctcctgttggatggtctgtgcatggttcagggacttcacccagattcaatagacagtgtggatatgtctgttctcaagctcagagcgtggtgtttctctccggatagcctgccagcgcagaggcggcgccttcttgggcatgatcattcagctcggccctcggtgcattcgaggcttgggccgcgaacctcttcttcgtcggctgctgaacctgtcgatgacgcattacccccggttgtgttggctgatgagttggctgtgcctgggtctgatgcccttgctgacgctgaatttttcccatgtgctttggttgaagagttattggctcctgggcctgctgaaccagttgatgctacaattctcccaaatgacttggatggatctgctgaaccatttattcctggtgttgcggttgtagagttgacggcgcctggatccgctaatccagttgaagctgtaattctcccgagtgacctggttgctgttgattccaatttgtgctctgcagacatacgggttgctgatgtcaatattgtggaatcctctagttctttcatcaatctgcttgggaggccgggaccttcgctgaattgctggttaagtaccaagccgtggtgtttcaaggtctactccagaaagaagaagacactggtggttgaggaatcggtgatgtcaccccaattgctggaattcagaaacgatctcgttttgccgatggctcaattgtttcctactcctctgattgctaagcgcaaaaagttgatgccaagcaatttcaaaccacagcgtagcaggagggttgcgaagtttccccctgagttgggttctgaatccgctgctaaagtgtgcagatttttgggcttttgtgatgagcaggaaaatatttctttccaagatgctaggaagtatgctagtttgtttgatgctgccctgtccagcgatcatattgctgccctggcggctctgtttggttgggaggtgccccaagtggtgcaggcctgagctggttctgcccccgtcttggtagcttgttttactcttttccatggaacctggttgttttttggtttggaatgtcaggggcctcaacagtcgtgctaagagagactctgtcaagtcagtggttgtaagccttaaacctcctgttgtttgtcttcaggaaaccaaattggattctgcctcagatttcaacattctttctattcttgggtccgggttcagtaattttgtttttaatcctgcccatgggtccagaggaggtattttagtcgcttggcgtgatggttcgtttgtctcagctgcctcagttatcaagaacaattctgtttcagttcagttgcaaagtgcagatggtcctctttggtggttctctggggtgtatggacctcatcaagacagtttgaaatctgcttttctccaagaattaagagatattagaaatacatgtgtgggtccgtggatagttgctggtgattttaatcaaatttacaagtcagaagacaagaataattctaatattaacaggtcttcattgggcaatttcagaggccttattggctccttggatttgaaggagattcctttgaatggtagaagatttacttggtcaaattagagggcggttcccacccttgttaagctggaccatgttttttgcactacctgttgggaggaggctttccctgattgttttctttacagcagtgcttctgaaatttctgaccactgtcctctaatccttaaactcaatgcggatcttagagggaggcgtaggtttcattttgagaacttttggcctaaactcccgggttttttggaggaggttgctgcttcatgggatcaaccggttcagtcttcttgccctctggagagggtgtcgatgaagcttaaaagattagcgcgaaggttgcagtcctgggggcatagtgcagttggaaatgtcaattctcagctggggctggctcgcgaggtgctgcacaggttggagatggcgcaggacagcaggccgttgtcctcagatgagctatggttgctgcagaaattgaaacaacactgccttgtccttgcttctttggaaaggacagttgcacgcttgcattcccggttgcactacttgagagatggagatgccaacacaaaaaaatttcacctacaggctcgcttccgcaagaagagaaattttatttcccatttggagaatgaagggaggacagtcaccagccatgaacaaatgcaggaggttctggatgattttttctccaatcttttgggttctaatatccagagaccatattctcttaacctagctgcttgccacatagacgctattgatttgagttccctggaggcacctttctctgagaaggaggttcgcgacactattggtgctctcccatctgataaggctcctggtcctgatgggtttactggaaaattctacaaatgttgttggcatattattaaatcagatttgttggcagccattaattcactccatcaaggaaatactcacaagttggggatgctgaattcagcttatttaactcttctccctaagaaagttgatgccttgtctgcaagagattttagaccaattagcttaattcatagttttgctaaattggtcaccaaaatgcttgctaatagattgggaccctatctgcaggagttggtggcatctaatcagagtgcctttgtgagaggccgatcgatccatgatagttttatgttggtgcagcattcaattaaaactctccacaagagagtctctagtttgctcttgaagttggatatctccaaagcatttgactcggtctcttgggccttcttgattgaagtgctttcatatcttgggtttggtcctgtgtggcgaaatatgatttccaatattctggcctcttcttctacgcaagtgcttttgaatgggtctcctggtattcctatgaggcaccggagagggcttcgccagggtgatcctctctctccaatgttgttcgtattggttatggatgttctcaatagtctgtttaatctggctgaaaatagggggctgctgcacagcttggagggtgctaatatccgaaacagactgtccatttatgctgatgacgtggtcctttttgttcaaccttttgaggaagattttcaatgtgtcaaaacgattttggactgctttggttcagccacgggattggtatctaatttgcaaaaaaaattcgttatcccaatcaggtgtaatgagcaggcggta

SEQ ID NO: 143792 - DNA, 548 bp, Zea Mays
aactagatcactaatgtttcatatcactctaactatcactctaactattgttcaaaagcccacaactatatcgctctagctgctccagagctgatcagtcacaaaagcaccaaagctacactaatgcttcaagcagttcaaaagccttcagacaaccactccagcttcttgtatcctcctattttaaggtacaagctttctttgtccagaacaccctccactagatggtgttgcagccttatgcaccaacttcagctcgtgcaatcaaggttaatcatcattaagttgctggctcatataaatctaaacataaacaaggtaagatataaacagaaatatacatatgaactaataactcactggaaggaacttgaatgacttcttcatgacaacaaactagcgtacttccaagcgctgaacacttgaccacaaatcaagagtctcatattaattatagtatgaactatgagcaaagtaaatttctaacagctatagaaaaaatgaaagataaactgggccaatatccatctaataagccaatcaatatc

SEQ ID NO: 143793 - DNA, 135 bp, Zea Mays
attaatgtcactaaaacaatcaggcttgattggttgctgcagcagctccaaggcattctagactggaggtctcaagttcgattcctcttaaatgcatctttttttgtgcaattactaggggcaataacgtccaaa

SEQ ID NO: 143794 - DNA, 102 bp, Zea Mays
ggatcacggccatcaactccttcgtcgtcatcaacttattagtggggctccctagatcggaattggatctggtaccaattgtcgctgacccaattgcttaac

SEQ ID NO: 143795 - DNA, 540 bp, Zea Mays
atgccccccgtcaaatggtaccgtactcacacatcgcgaactttcttctctctcctcccactccgcctcaaaccgcggttttcggcgcgcaggttgatgcactggcatccgagtcccggggcgacgctcaacagccagatcctggcggaggcgtgtggctgcgccgagtccctaggcggctccaaggacgggcggtggaagacctccatcttcttctaccgcgccatgacccgggacggcgcgggaggccccgcggtgcagcagcaccccgacttgcctagggagctcctcggcgtcgcgctccacgagcgcccgggtctctacttctccatcgtccgcgcccagcgcctcgttctccaggccgatgcggcgttcccccaggtcatggagaagctccagtcatacagaatccgcgtcgccctcaacttcgaggtaccttttgctcttctggttccagattcgacccctgtatttagagttttgctcttaggagtcttattttgctttgattcaagcgatagcggacaaatgtgtttgtaa

SEQ ID NO: 143796 - DNA, 945 bp, Zea Mays
gaaaatcagattaggatcatcaatacttgttgcatattgcacaactttgtaagagataggcagagagatatagatgatttacttttatgccaaattgatcaagtaatatctattcaatctcatgatgctcaaagtgaggtgagtatgattaccaatgtacaatcatcaaataaatggagtaacttcagggacaccaaagctaaccaaatggatatggagaagggtaagaagtcaggctcgggcagggggtacatttcttggaatgatgatatggacaaggcacttcttgacacattcgtggagtactacaacaagggtgacagatgctaaaatgggtggaagtctcttgtctacacggctgctatcaagaatgtccgagaaaagtgcaatgtagaaatcacaaaagacaacatcatgtcaaggaacaagacatttgacaagcaccacactattatcaatggtatgctagaaacaagtggctttggttgggatcggaacaagaacaagatatccgtcgttagtgattctgtatgggaggcttatgtggcggtaaatcaaaaaattaaagaagctaatgggtacagacacaagacagtcttatactgggacttgatcagcttagtgtttgggaaagatcatgcaaatggtgaagcgacaaagaccctagctaatggtgcaagagatatgagtaaggaagaaggaaccggtaaagagcttacttcatcaacaacctctggaagcttgaagaggcagtggtccagtgattccttcacctcaatgatggcggagaaattagacaagttcactgaagctattaaggatgaagcaccaaaagggccgacatcaaaagaaatttttagcacattagaggagatagatgggttagatgaagacacatttttagacttgtttgatatcttaataggtgatgcgcacaagtacgag

SEQ ID NO: 143797 - DNA, 92 bp, Zea Mays
gcacctgctgcatccatccactatatattccaatgtttggttcgctagtgatgtactcggccactcggggcagctccaataatgtctacgac

SEQ ID NO: 143798 - DNA, 296 bp, Zea Mays
gctaggcttggtggtcggctcggcctcaactcattcatacaaatgggacaggtgtacacgtatgaaatacctagggtaatcgggttcggattattgcttcccaaatccatacacatttgcccaatgggtagagattttgtcccatatccatacccatagagacaatttttgtcccatacccataccctaataggggaattccccacgggttagcgggtatcgggtccccattgacatctctagatgagtgggtggtaagcataagggttcgcttgccacctgacaatgatcagatc

SEQ ID NO: 143799 - DNA, 1106 bp, Zea Mays
acgaggcgagcaccccaagaaaacatcgagcaatccatgcattattgacacccaggccagtttccatcgcaacgaccaccggaggtcgatcgagcgagccatgggtggcggcactccgcgcagcagcatcggccacatcctccccggcgccggtttcctggccgtcggcctgtggcacctgttcaaccacatcaggctcttctccctgcgccccgacgcgtacgtcgcgcccgtctggttcccggcgccgcgcgtccgccacctcgagctcatcctcgtcatcgccggcagcgccgtcgagttctccatggagatgttcgtcgaccactccaccttcctgccgttcgacgccgacggatccatcccgtccgaccgcctgcacaaccacgagcacgccatcatctgcctcgcgctgctcgtgtacgcggcctccgcgctgcacctcgaccgcgcccgcgcgcgctgccgcgacgcgctctccctgctcctcgtcgcggccgtcttcgcgcaggagctgctcgtcttccacttccactccaccgaccacgccggcctcgagggccagttccactggctcctgcagctcgtcgtcgccgcgtgcctcgccacggcgctcctgggcatcggcttcccgcggagcttcgccgtcagcctggtccgctcggcgtgcgtcacgttccacggggtgtggttcatggtcatcggcgccatggtgtgggtcccgagccgtgtgcccaagggctgctcgctcgtggaggaggacggccgcaacaccgtgcgctgccatagcgaggccagcctgcaccgcgccaaggcgctcgccaacctacaattcgggtggtacctgtcctccatgacggtttttgtcgtcgtgctatacgtgaacgtgtgcaagtggtatcctgcggagacagcgtacgtgcggctaccgccggaagccggcgaagaggaagaacacctgaagcgcaagtgcgggatcgtgtgcagcggcgaccatggattcacgcccttggagattgaggtgtaatgtaaaactgcactggccaattgtacaacatgttcccctgcttaattgtaaacttgcacagtagcttacatgccccata

SEQ ID NO: 143800 - DNA, 1391 bp, Zea Mays
tgcagaccttcttaaacccccacaatattcgcccatcaaccttcaaacctcccctctccacacgccaccaccaacttcttcccctgtcgtccacttccgcagtcgcacgcaaaaggcacagcgcggcggcacacgccatgggcaccctcgtcgggcacgtcgcgccgggcgccggcttcctcctcatcggcctgtggcagctgttcagccacacccgcctgttcctgctgcggccgagctcgtactctgccccggtctggttcccggtgccgggcgtgcggcacctggagctcatactcataatcatcggcacggtgctgtccatcctgatggagcttgtcatcggccccgcgaagcaccagccgttcgacgacgacggcaccatcccgtccgaccacctccacaacttcgagcacgcgtccatctcgctggcgctgctcgtcttcgcggcggtgaccatccacctggacagggcgagggcgcccatgcgggacgccgtgtcgcagctcgtggccgccgcggcgttcgcgcagcagctgctcatcttccacctccactcggcggaccacatgggcgtggaggggcagttccactggctgctgcagacggccatcgccgtcacgctcgcgaccacgctgctgggtatcccctacccgcggagcttcgcggtgagcctggtccggtccgccagcctcgtgttccagggcgtctggttcgtcgtcatgggcgtcatgctgtggacgccggcgctcatacccaagggctgcttcctcaacttcgaggaagggcacgacgtcgtccggtgccgcactgacgacgcgctcgaccgcgccaagtcgctcgtcaacctccagttcagctggtacctcaccggcacggtggtgttcgtcgtcctgttctacctccagatggcgaagctctaccccgaggagccgcagtacctgccgctggtgaagggaggcggcagcggcagcgatggccggttcagcatcggagatgatgatcacgacgatgaggacgacgtcgaggccgcaaaacgtggcggtttcggacacgtggttagcggcacgaggcctgtcgaaatcgagaggtgagggtcgtgcgtagcaccgtacaaaaggttagcatgttgttgcgtggttatagtgtaatttgacttgaacgtttttgtttattggtgaaattaaaacatgcaaatattctctagggaggttgtaatgtttatagtttgtgacacagtgacacttgtggattaaaagaatcctatatttatcctacctgaagccatcttatcctacttgtcagttgtcaccacgctaattcaatagtgtcaggcgttgaccattgactgctgcgatcgctaggctgtatgcctgcatggactggcttta

SEQ ID NO: 143801 - DNA, 330 bp, Zea Mays
aaataagaataaatatattatctgtcaccaaatcttcacatgaactgctatcctgtattatctggtggaaatatgaaggtttctttatttctcttcttaaacaacaagagaagacggaagacaagtcagacaaaacagaagaggagaagaactgatgtagccatgttcatgcttccactattgaaatgcatattcagcatagcttgctcagctcctatctgttgtttcaacgttgatttaaaagaatagctggtagttgtgggcttttgaacaagtgctggaatgatctagccagctatatgtaaatgatctagttgtgaatgatattat

SEQ ID NO: 143802 - DNA, 188 bp, Zea Mays
atgtgtgcgtgtacaaaactaacaaatatgaaagtttagaggtacttacaagcaaaagagggttaagtagttggtttccatcctttgtcggtggtacaacgactagagatcgtcaaagaataaatgccgcacaggatctatattatctttgctccaaaatgcatcttctggcacaacaaatgtgaagt

SEQ ID NO: 143803 - DNA, 122 bp, Zea Mays
ttgttttccttttctttttaaagttttataggatcatgcgccaacacaaagatatgccagttttgggtagcggttactctattactggacaatgtagtgaggatgtataaaccttgatggct

SEQ ID NO: 143804 - DNA, 101 bp, Zea Mays
tcataaaccaggtcataatgttagaacatgtatagctaatccctcaggaggtaatatcagaaaagttatggagagagccaaagaggtgagtgcactttgtg

SEQ ID NO: 143805 - DNA, 369 bp, Zea Mays
atggctaattgcattccagagggtggtgtaactgaaatttttgtgcagacaaacaacatttcaggtgataatgtaaacacggatgcgggagaaagtgatagtgaatttgttgatgaagaggcatatgctggagaagatgagagtgaatttgaagatcacaactatattccaagggatgaagacacatcagaagatgacgaagaagcaaatgagtttagaaccgtagcaacgaatcagagaaagaatcgaattactactgctgctgcaacagacattggaacaatttctagggtgcaaatcgaagaggctgacatagaagatgaatattttggtgaatcagaccctccaatgatagactcaagtgaataa

SEQ ID NO: 143806 - DNA, 1583 bp, Zea Mays
ctgcgtccagctccccccacccagctctccttttccgggtcacgtgcggaagcgtcaactggtcaaacccaccattatcactcaggcggaaacgcgccggagggagggagagaggaggggcgtgggtggctgggccgagcgactcctccttccagtccaccgctataaagccccgcaggcctggcgagtcccgacggttccattactggtccctagcaggaagcaggatggagttggcgctcagcttgggggagaccatggcggatgccgggagggacctcatgctggggcttgggatgggggtcggggtgcggagggaggaggaagcgcagagagggaggagggacagggaggtgaggcgggagctggagttcacggcgaggagcgcccggtcgtcgccggagccggcggtgcgactcaccctcctgcacggcctcggcctcccgtggccgccgccgccgtcgtccgagaccaaccggcacctggaggcgtcggcgcgtggcttcgacgtgaaccgggcgccgtcgctgtccgcggccggtggcgccgcggaggaggacgaggagcaggacgaggcggcggcggcggcggcatcgtcgtcgcccaacaacagcgcgagctccttcccgacggacttctccgcgcagggccaggtggcgcccggcgccgaccgcgcgtgctcccgcgccagcgacgaggacgacggcggctccgcgcgcaagaagctgcgcctctccaaggagcagtccgcgttcctggaggatagcttcaaggagcacgccacgctgaacccgaagcagaagctcgcgctggcgaagcagctcaacctccggccgcgccaggtggaggtgtggttccagaaccgcagagccaggacgaagctgaagcagacggaggtggactgcgagtacctcaagcgatgctgcgagacgctgacggaggagaaccggcggctgcagaaggagctatccgagctccgcgcgctcaagacggtgcaccccttctacatgcacctcccggccaccaccctttccatgtgcccctcctgcgagcgcgtcgcctccaactccgcgccggcgcccgcgtcatcgccgtcccccgctactggcattgcggccccggcaccggagcagaggccctcgtcgttcgcggctctgttctcgtcccctctgaaccgcccgctggccgcccaggcgcaaccgcaaccgcaggcgccggccaactcgtgaggcgctctctactctatctccggcgacgcgaacggaggtggatctggctgtaaatacgatcacctttttttggcttcctttttcttttgttttcacttgatgcggttcttgagattttttttttgtggattgccgatgggttggtttaccggtttattagagcgcatcatctggccgtcggattggactgcggacggccgggtgcagaaaggaagtgctgcgatagagtttattaacctcagtagcatcgatcatgttttgttaccttgctatctatcttggcgtcaatataggccttgaaatccgaagttaccctgatgatgatgaaatgggtggtgtcaccatttaactgtc

SEQ ID NO: 143807 - DNA, 1780 bp, Zea Mays
tcccctccaaccctgctatggttgctctacgtctcactcgcctcctgcctcctctacaagctcttctcttcatccaatacgagctccgagaaggcgcggcggcgcgcacctggcccagcacctctgccgctcgtcggcaacatcctggagctccgaggtgagccgcaccacgccctcgccaggcttgcagagacgcacgggccggtcatgtccctgaggttgggcactaccgacgccatcgtggtctcctccgccgcggcggcgcgcgacgtgctgcagaggtacgacaacgtgctggcggcgcggtcggtgaccgacgccggacgcgcgctggggaaccacgagcgctccgtcatctggctcccagccaccagccagctgtggaagcggctccgcgccgtgtgcaccaaccacctcttctcagcgcgcgggctggaagcgacgcgcgccacgcgggaggaggcggtgaggcagctggtgtcatgcctgggccgccgcaccggcgagaccctggaagtgggccgcgtcgtgttctcgtgcgtgctcaacctcgtctccggcgcgctcttctccgaggacgtggccggcctgagctcggaccgcgcacgggagctggagacgcttgtgagagacaccgtcgaggaggccaccaagcccaacctctcggacctcttccccgtgctcgccaggctcgacttgcagggccgtcgccgccgcagcgctgagttcatcgggaggttctacgacttcttcgatccgatcatcgcccgccgtgtcaaagctcggggcagtggtgaacatgttggtgatgatttcttagacgtgctgcttcagcttcactcgatggatcaactcagcctgcaaactgtcaagtcttttcttttggatctcttcgccgcaggaacggacacgaacacgatcgcggtggagtggacgatggccgagctgctccggcacccggccgtgatgtccaaggtccgcgcggagctgcgggacgcgctgggctccaagccgtgcccggacgagtcggacgtcggcaggctgccctatctccgcgccgtggtgatggagagcatgcgactccacccgccgagcccaatgctggtgccgcacctggccatggccgacggcgcggaggtgggcggcttcacggtgcccgccggcaccaaggtgatcataaacctatgggcgatcatgcgcgacccggcgtcgtgggcggagcccgaggcgttcgtgcctgagcggttcgtgggcgcgagcgacgcggacttccgtgggacggaccggcttgagttcatgccgttcggggccgggcggagggcgtgccccggcgcgcccatggccacgcgggtggtgacgctgctcctggcctccatgctgcacgcgttcgagtggaggctgcccgaggggatgaagccatgcgacgtggacgtcagggactggttcggcacgtcgctcaacatggtcacgccgctcaaggccgtacccgtgccttcgtcccggtgatgcactgcggcggcttgctgtgcatgtccaggatatggttctacttagcccagtctcggcgaagacttctatagcgctgcgttataactatccgacaggtttcatcacgatgaaattgtcgctttataatttccctgttaaatcattaaatttggtaatgtatcagtgttaaatgtaaataaaactaagacaaaatttcaccgaaactggccttactatgtcaggtcctgtttaaatgttctaaaacttatgatataattgagaataagttcct

SEQ ID NO: 143808 - DNA, 201 bp, Zea Mays
atggaaggctcgcctccggttaggatcttaacccttaatgcttcatacttcttgaagaacgatggccactttgtcatttcaatcaagggtaactgtatcgactccaccctgtctgttgaggtcgtgtttgttgttgaagttggagaagctcaaagcacatcaattcaagcctgcctagcaggtgacattggagccctatga

SEQ ID NO: 143809 - DNA, 751 bp, Zea Mays
aacactcactccatcactacaaacggcaagactcacgggcaacctgtgcgcgcatcaataatattcttggcgccgctcgccataagaagccaaccgcgccacactgccccctaccctacaccccctactgtctgctgctgttcctgcaccctgatccagtgctagcatcgcatcgcatcacgccatcaccatgggcctctgcctgtccgtggctctctggaaggagaagctctacggcgccgacggcggcagcagccggtcggtgcggggccgcgtcgtcgtccataaggttgccggcgtggagggtggtgactgcgagtacgggatcttgggaggcgacgacgccgacgcggtgggggtagagcagaaggcggcgccggccatgggcgtggggagtggtggagtggacggcgctgccgctgccctgtccggcggcactccgctgcggccgatatggcagaggagggtgctgatgggcgtcaagtgccagctgccgcggttcagcgggatgatactgtacgacgagagcggccggccggtgtgcagtggcatccgggacagatctcgtgaccaggagaagcatgctgcggcgatctcagtgctaagggacctgctctagtcttcgtcatcagcaagcgatggcaattctgtcgatgcgatattcatgtttggttatatgtacgtcattgttgatgggctgcatgtttatgtgtgaactaagcagcttgataataaaatcttttatgtattc

SEQ ID NO: 143810 - DNA, 3066 bp, Zea Mays
ctactagagcaaatactctcaagtcccaactaaccaaaactgggaggaagagaaaagctgcagacacggtctctctctcacccttcaccgcttcacgtagcagcaagaaaaagaaagaaaataaaaagagagagagagacagagatggcttgcaccttgaaactccaaaacccaccatgaaaaaagaccttctctggcccctgaccctgagagagagttgctgttgctgccattcggtcggtgcctccttttcggtacgccgctggtatgtggtatcactggtatggttgttctcccatcccaaggcgacgagggaataggaagctagaaagttcgtctgcagtctgcacctttgcccatggcctaggcgcctagctcaggccgtagctcagcgtccgtccatgggccagggagtctgaaaccttgcttgccttgcctgcccgctcctctcacttctctctctcctcctcgctcgtgtccccggcgttctgctggtccctggggactggagagcgaaggtctgtctcctttgcgcctgctctgcttcttcaatgctgggcgtcggtggcttgggctcgggctcgggcatggaaccaggtaccagctgcggtgctctgctcagagagcttcagcaaatctgggcagaagtaggggaaagtgagggcgagaagaacaaggcgttgctggacatcgaaagagagtgcctggaagtctaccgcaggaaggtggacgatgccaatcggactagggtccagctgcaccagtcagtggctgccaaagaagctgaggttgcatctctgatggcaacccttggggagcacaagctgtacttgaagaaagacaagggcgttgtaccactcaaggaacaacttgccaccgtcgccccagtactggagagcttgaaatgcaagaaagaggaaaggatcaaacagttctctaatattaggtcacagattgagaagatccgctttgagctaagtgaatataatgatcagggtgatgacccgagcagtcttgctgctgaggaacacgatttgtcgatgaggaagcttaatagttaccaaacacagcttcgtgcccttcagaaagataagtctgagcgcctccgcaaggttctggagtatataaatgaagtgcattccttatgtggagtccttggaattgattttggaagtactgtacacgaagttcatcccagtttgcatcagaatggtgttgagcagtccagaaatatcagtaacagcacactggagggccttgctagtacaatttataagctaaaagcggaacgaaagtctagaatccacaaggtcttctctaggttcctttctcttcgttttaagttactaccaattgcccataacacgtttccgaatgatccattgctgacaggcgagagagatcatggagtcgttgtgtcaactttggaaactcatggactctcctgaagaagaaaagagacagtttagtaacgtaatgagcagcctcatattacctgaggagggaatcacgtcacctggagttctctccgaggaaacaatcgagaagatggaatttgaggtcgagaggttaacaagactaaagaccagcagactgaaggaaatcgtcatgaaaaggagggcagagttagaagcgatctgccagaatgcacacatagaacctgatgtcagcacggcccctgaacagactgatgctttgatcgattctggcctcatcgacccttctgagctcctggcgaatattgagtcacaaatattaaaagcgaaagaagagtctcttagtcggaaagatataatggacaggataaatagatggattgctgcttgcgatgaagaggcttggcttgaagaatataaccaggacccaaagaggtacagtgctggaaggggtgctcatataaaccttaaacgggcagaaaaggcacggattttggttagaaaaatcccaagtatggtggacgacttgataaaccgaacctttgcttgggaaaacgcaagaaataaaccctttctctatgatgggggacgcctaatatctgtactagaagagtacaggcttagccggcatcagaaagaagaggaaaatcgacggtaccgggaccagaagaagctggagagcatcctacttgcagagaaagaagcgatcttcggatctagaccaagcccaaggaagacgagcagcttaagtaggaaggcaaatgggtaccggccaaatgggaacaccaacggactcaagactccaactcctcgccgattgtctctcggcagtgctactcctgagcttttgacgcccagatcgtactctggccataatagatactttggcgatgtgaggcgtctatcgacttcccatctgaacttcggtgatgattcgctgtcaacgtttacatccatcagtggctctgaaccagaatccccctctattggatgaacaccgtactgctggatgactggatggtcagtattgcgtattgtaaatgggcaccatgttaccaagttcttgcactagcatgtacattcctgatgtcatatatttagctcatattggagtactaagtattggacgggttgacttggtttgggttgggtgtggagttgaattgtttcaagttgatggctttgtagattgacaattaggcggaaagatgtaggggagcgatctggatttgggcagtcagctgtaacatatcataacttatgtgtttggtttgtgtgtgcaaccttgtgtacaggtgcaatgaaaaatctgtgtgcagaatctactacttcaatagtactggtgttcctcaatatgcaccatgtgacgatgccggcttgagcttatcttgcgaaccagcacactttgtcttctgtgagcttcagactgcaagcaatggcatcaggtccacatgatgactccttccaaacatagtggcacaaggcgacacgaagggggctcggctccctgatcctcctagcgtggaccctgtggaaacatagaaaccagtatgcgttgtgatggagtgacaccatcggtctcggtagcgctccaggaaccaggagccaagcgagcaggcacattgctgta

SEQ ID NO: 143811 - DNA, 2984 bp, Zea Mays
ctactagagcaaatactctcaagtcccaactaaccaaaactgggaggaagagaaaagctgcagacacggtctctctctcacccttcaccgcttcacgtagcagcaagaaaaagaaagaaaataaaaagagagagagagacagagatggcttgcaccttgaaactccaaaacccaccatgaaaaaagaccttctctggcccctgaccctgagagagagttgctgttgctgccattcggtcggtgcctccttttcggtacgccgctggtatgtggtatcactggtatggttgttctcccatcccaaggcgacgagggaataggaagctagaaagttcgtctgcagtctgcacctttgcccatggcctaggcgcctagctcaggccgtagctcagcgtccgtccatgggccagggagtctgaaaccttgcttgccttgcctgcccgctcctctcacttctctctctcctcctcgctcgtgtccccggcgttctgctggtccctggggactggagagcgaaggtctgtctcctttgcgcctgctctgcttcttcaatgctgggcgtcggtggcttgggctcgggctcgggcatggaaccaggtaccagctgcggtgctctgctcagagagcttcagcaaatctgggcagaagtaggggaaagtgagggcgagaagaacaaggcgttgctggacatcgaaagagagtgcctggaagtctaccgcaggaaggtggacgatgccaatcggactagggtccagctgcaccagtcagtggctgccaaagaagctgaggttgcatctctgatggcaacccttggggagcacaagctgtacttgaagaaagacaagggcgttgtaccactcaaggaacaacttgccaccgtcgccccagtactggagagcttgaaatgcaagaaagaggaaaggatcaaacagttctctaatattaggtcacagattgagaagatccgctttgagctaagtgaatataatgatcagggtgatgacccgagcagtcttgctgctgaggaacacgatttgtcgatgaggaagcttaatagttaccaaacacagcttcgtgcccttcagaaagataagtctgagcgcctccgcaaggttctggagtatataaatgaagtgcattccttatgtggagtccttggaattgattttggaagtactgtacacgaagttcatcccagtttgcatcagaatggtgttgagcagtccagaaatatcagtaacagcacactggagggccttgctagtacaatttataagctaaaagcggaacgaaagtctagaatccacaaggcgagagagatcatggagtcgttgtgtcaactttggaaactcatggactctcctgaagaagaaaagagacagtttagtaacgtaatgagcagcctcatattacctgaggagggaatcacgtcacctggagttctctccgaggaaacaatcgagaagatggaatttgaggtcgagaggttaacaagactaaagaccagcagactgaaggaaatcgtcatgaaaaggagggcagagttagaagcgatctgccagaatgcacacatagaacctgatgtcagcacggcccctgaacagactgatgctttgatcgattctggcctcatcgacccttctgagctcctggcgaatattgagtcacaaatattaaaagcgaaagaagagtctcttagtcggaaagatataatggacaggataaatagatggattgctgcttgcgatgaagaggcttggcttgaagaatataaccaggacccaaagaggtacagtgctggaaggggtgctcatataaaccttaaacgggcagaaaaggcacggattttggttagaaaaatcccaagtatggtggacgacttgataaaccgaacctttgcttgggaaaacgcaagaaataaaccctttctctatgatgggggacgcctaatatctgtactagaagagtacaggcttagccggcatcagaaagaagaggaaaatcgacggtaccgggaccagaagaagctggagagcatcctacttgcagagaaagaagcgatcttcggatctagaccaagcccaaggaagacgagcagcttaagtaggaaggcaaatgggtaccggccaaatgggaacaccaacggactcaagactccaactcctcgccgattgtctctcggcagtgctactcctgagcttttgacgcccagatcgtactctggccataatagatactttggcgatgtgaggcgtctatcgacttcccatctgaacttcggtgatgattcgctgtcaacgtttacatccatcagtggctctgaaccagaatccccctctattggatgaacaccgtactgctggatgactggatggtcagtattgcgtattgtaaatgggcaccatgttaccaagttcttgcactagcatgtacattcctgatgtcatatatttagctcatattggagtactaagtattggacgggttgacttggtttgggttgggtgtggagttgaattgtttcaagttgatggctttgtagattgacaattaggcggaaagatgtaggggagcgatctggatttgggcagtcagctgtaacatatcataacttatgtgtttggtttgtgtgtgcaaccttgtgtacaggtgcaatgaaaaatctgtgtgcagaatctactacttcaatagtactggtgttcctcaatatgcaccatgtgacgatgccggcttgagcttatcttgcgaaccagcacactttgtcttctgtgagcttcagactgcaagcaatggcatcaggtccacatgatgactccttccaaacatagtggcacaaggcgacacgaagggggctcggctccctgatcctcctagcgtggaccctgtggaaacatagaaaccagtatgcgttgtgatggagtgacaccatcggtctcggtagcgctccaggaaccaggagccaagcgagcaggcacattgctgta

SEQ ID NO: 143812 - DNA, 165 bp, Zea Mays
tcacctattagaaggtacgaacgtagtgtacatgcattacatgtctatattaaactatactcggttatatatgttagaggatggaggaccgtgagtggatgtacacgggccgcgttcgacgtaatgatgtcaccccagaatggattaagaagaccgatgctttcg

SEQ ID NO: 143813 - DNA, 132 bp, Zea Mays
tttttttgttgacatacttgtttatttttttgcagaggtcttcctagccgctgcgggtctgcctcgcgtcgccactgcaccgacccgccacagccccactagcctgactccaccgccaccctaggtataacc

SEQ ID NO: 143814 - DNA, 1998 bp, Zea Mays
agaaagcttgaacttggatgccgagcctataaatggcgaccgaccccggccacttccactcaccgcactccagcgttcagcattagacacgagagctcctagtagccagaccagtagtcccgcgaccctgtcgagagaaacagacagagcaacatggcgcctgcattgtcattcccgatcatcgacatggggctgctcgccggggaggagaggccggcggcgatggagctgctgcaagatgcgtgcgagaactggggcttcttcgaggtagatgctcagcatggatggagaactgatccaactccaggaactgaaacaaaataattaagctgcacaaatatacactctatctgtttttatcgttgatgatggtgctctatctgttttctttaatcctattattccctcctgccctgcagattctgaaccacggcatctcgacggagctgatggacgaggtagagaagctgaccaaggagcactacaagcgggtgcgcgagcagaggttcctcgagttcgccagcaagacgctcggggacggccgcgacattgcgcagggcgtgaaggcggagaacctggactgggagagcaccttcttcgtccgccacctcccggagcccaacatcgccgagataccggacctggacgacgagtaccggcgcgtcatgaagcggttcgccggcgagctggaggcgctggcggagcggctgctggacctgctgtgcgagaacctcggcctcgacaggggctacctggcgcgcgcgttccgcgggcccagcaagggcgccccgacgttcggcaccaaggtcagcagctacccgccgtgcccgcgcccggacctcgtcagcggcctgcgcgcgcacaccgacgccggcggcatcatcctgctgttccaggacgaccgggtgggcggcctccagctgctcaaggacggcgagtgggttgacgtgccgcccatgcgccacgccgtcgtcgtcaacctgggcgaccagctggaggtgatcaccaacggcaggtacaagagcgtcatgcaccgggtggtggcgcagcccagcgggaacaggatgtccatcgcgtccttctacaacccgggcagcgacgcggtcatcttcccggcgccggcgctggtcaaggccgaggaggcggcagcgggggcgtaccccagcttcgtcttcgaggactacatgaagctgtacgtgcggcacaagttcgaggccaaggagccacggttcgaggccttcaagtccatggagacggacagctccaatcgcatagccatcgcgtgaaacaccggacctgcgccgagctctggcttactgttcgagatgtacgtgcggcgtactgtactcactaccggaatccgagactttgccgagtgttggcttctttgccgagtgccttttgtcgggcactcggcaaagaaagctttgccgagtgccgtactcggtaacgttaggcactcggcaaaacgtgctttgccgagggctgaacactcggcacagaacggcactcggcaaagacaactttgccgagagtcaaacactcggcaaaggaggctctcggcgagcggccgtcccaaagctgacggccgttagtctttgccgagtgtcatccgttggctctcggcaaagaggttctgtaccgagtgccacatagtaggcactcggcaaagcatactttgccgagtgtcatctctggacactcggcaaagtatatttttatttttttattttgtctctcgaaatttttgtggtatgtttctacactatgtagacctacatgtaccattttgggataattataacagttttttctatagctagtatatttagtttgtttatttgaatttcttcggaaaattcagatttgaactgcaggtcactcgaaacttggaaaaccgtgaatgcaaaaatgatatccatgctacatagcacaagttacgaccgatttcaggagcgaaccggaaacttcgagcaccatgctcactcaacatgaccg

SEQ ID NO: 143815 - DNA, 1829 bp, Zea Mays
agaaagcttgaacttggatgccgagcctataaatggcgaccgaccccggccacttccactcaccgcactccagcgttcagcattagacacgagagctcctagtagccagaccagtagtcccgcgaccctgtcgagagaaacagacagagcaacatggcgcctgcattgtcattcccgatcatcgacatggggctgctcgccggggaggagaggccggcggcgatggagctgctgcaagatgcgtgcgagaactggggcttcttcgagattctgaaccacggcatctcgacggagctgatggacgaggtagagaagctgaccaaggagcactacaagcgggtgcgcgagcagaggttcctcgagttcgccagcaagacgctcggggacggccgcgacattgcgcagggcgtgaaggcggagaacctggactgggagagcaccttcttcgtccgccacctcccggagcccaacatcgccgagataccggacctggacgacgagtaccggcgcgtcatgaagcggttcgccggcgagctggaggcgctggcggagcggctgctggacctgctgtgcgagaacctcggcctcgacaggggctacctggcgcgcgcgttccgcgggcccagcaagggcgccccgacgttcggcaccaaggtcagcagctacccgccgtgcccgcgcccggacctcgtcagcggcctgcgcgcgcacaccgacgccggcggcatcatcctgctgttccaggacgaccgggtgggcggcctccagctgctcaaggacggcgagtgggttgacgtgccgcccatgcgccacgccgtcgtcgtcaacctgggcgaccagctggaggtgatcaccaacggcaggtacaagagcgtcatgcaccgggtggtggcgcagcccagcgggaacaggatgtccatcgcgtccttctacaacccgggcagcgacgcggtcatcttcccggcgccggcgctggtcaaggccgaggaggcggcagcgggggcgtaccccagcttcgtcttcgaggactacatgaagctgtacgtgcggcacaagttcgaggccaaggagccacggttcgaggccttcaagtccatggagacggacagctccaatcgcatagccatcgcgtgaaacaccggacctgcgccgagctctggcttactgttcgagatgtacgtgcggcgtactgtactcactaccggaatccgagactttgccgagtgttggcttctttgccgagtgccttttgtcgggcactcggcaaagaaagctttgccgagtgccgtactcggtaacgttaggcactcggcaaaacgtgctttgccgagggctgaacactcggcacagaacggcactcggcaaagacaactttgccgagagtcaaacactcggcaaaggaggctctcggcgagcggccgtcccaaagctgacggccgttagtctttgccgagtgtcatccgttggctctcggcaaagaggttctgtaccgagtgccacatagtaggcactcggcaaagcatactttgccgagtgtcatctctggacactcggcaaagtatatttttatttttttattttgtctctcgaaatttttgtggtatgtttctacactatgtagacctacatgtaccattttgggataattataacagttttttctatagctagtatatttagtttgtttatttgaatttcttcggaaaattcagatttgaactgcaggtcactcgaaacttggaaaaccgtgaatgcaaaaatgatatccatgctacatagcacaagttacgaccgatttcaggagcgaaccggaaacttcgagcaccatg

SEQ ID NO: 143816 - DNA, 342 bp, Zea Mays
atgggcaaaagagcactggtgcacggaataatcgctcgccggtggtgctctgtcgcggcacggcgtgctgtcaagctggtgggcgccgtagggaagctgacggccgccgctgttggcccacgttctcgtctcggtgccgacctagggagctgcgggcgggcgaggatggatgtcagcgcccagggaactcgtaccatggaggttgggcctctagtgatcgcgcatgggtggcaatttcccgtcgtcgctgttgggtcgccatccgccgtggccagggggctccatgcgatgatttatggtgaggcttcctctcccaggatcgattccttctcctctacatag

SEQ ID NO: 143817 - DNA, 1434 bp, Zea Mays
cgtaccacactgccgcatttttttctctctccccctcctctcgcgctccgacgactggtcgccgccgctgccccaacgccaggtgctagggtcttcggcggcgaccagaatttaacaggaatatcaaagatggacctatgcaatctctgcggtgacaatctccactgagtttctgaccaaaaccagacatttctgtaacttagttctttcaggatgaccaagcatacgaggaacaaaaaaagttcatctcatcagcttagatcctcgcatcacaggaaaccctaaagtagttccagattttttaaaaaaatccagcaagataccatttgcagcgatagagaaatatgcatggacagaggcaacttgtccagtatgcatggaattcccacacaacgctgttcttctactctgttcatcacatggcaatggctattgcccatatatttgtgcttccagctaccaacactcaaactgtcttgatcagcctgtggagtcatgcagaaaagaagcctctgaggacccagatgcaatagagcttgcgtgtcccctttgccgtggtgaggtcaagtgttataccttggttgacccagctcggaagcagctgaatcacaagaagaggagctccatggaagatggttgttcatacatggttacatacatagagctctgaaagcatgtccaaaagaaacacccttctgcaaacccacgagctgtggaccccttacatgcttacagatggaagagacttttatttcggctgcttcagaagcagttcggctggctgcaactctataactactaagtattgtcgcatgaactaaagaatctacagccgcagccataaaaagtctagctggtctgttcaagtacttcagaggtgatgcgaaggtttatttctctcatgctgcagtttgaggagcttgtggctccttcgcgagagggtggtgaccgtcatggcgctaccattgacgattcactgcaaagtgccaatgcagaatccactgatctatatgatctctggtcctctcgccgaaatgtgagaatctgtgttgatcctgcaggcaatcttgcatgaatccctgacttgctccccctgccgataagccgattcacaattactgacctgacaaagcgatagtagcctccatctgttctcaggggatgctcaatggtaatcttgaaatgaaacagactgttaagctttgatggatttattcagtaacagtgataatggctggttgaatggcatggggctagtgtgtcatgtgatgcattgttatcgtgcagcggctagccctcccccctccctcgattgtatggcataaccgtttctatggaatgcaatgtgatcctgttccgaaaacgaaatcgtgccttttccgcattcactgctttaattgtttttgcaaggcaagtgctgggtattattacttg

SEQ ID NO: 143818 - DNA, 1423 bp, Zea Mays
cgtaccacactgccgcatttttttctctctccccctcctctcgcgctccgacgactggtcgccgccgctgccccaacgccaggtgctagggtcttcggcggcgaccagaatttaacaggaatatcaaagatggacctatgcaatctctgcggtgacaatctccactgagtttctgaccaaaaccagacatttctgtaacttgatgaccaagcatacgaggaacaaaaaaagttcatctcatcagcttagatcctcgcatcacaggaaaccctaaagtagttccagattttttaaaaaaatccagcaagataccatttgcagcgatagagaaatatgcatggacagaggcaacttgtccagtatgcatggaattcccacacaacgctgttcttctactctgttcatcacatggcaatggctattgcccatatatttgtgcttccagctaccaacactcaaactgtcttgatcagcctgtggagtcatgcagaaaagaagcctctgaggacccagatgcaatagagcttgcgtgtcccctttgccgtggtgaggtcaagtgttataccttggttgacccagctcggaagcagctgaatcacaagaagaggagctccatggaagatggttgttcatacatggttacatacatagagctctgaaagcatgtccaaaagaaacacccttctgcaaacccacgagctgtggaccccttacatgcttacagatggaagagacttttatttcggctgcttcagaagcagttcggctggctgcaactctataactactaagtattgtcgcatgaactaaagaatctacagccgcagccataaaaagtctagctggtctgttcaagtacttcagaggtgatgcgaaggtttatttctctcatgctgcagtttgaggagcttgtggctccttcgcgagagggtggtgaccgtcatggcgctaccattgacgattcactgcaaagtgccaatgcagaatccactgatctatatgatctctggtcctctcgccgaaatgtgagaatctgtgttgatcctgcaggcaatcttgcatgaatccctgacttgctccccctgccgataagccgattcacaattactgacctgacaaagcgatagtagcctccatctgttctcaggggatgctcaatggtaatcttgaaatgaaacagactgttaagctttgatggatttattcagtaacagtgataatggctggttgaatggcatggggctagtgtgtcatgtgatgcattgttatcgtgcagcggctagccctcccccctccctcgattgtatggcataaccgtttctatggaatgcaatgtgatcctgttccgaaaacgaaatcgtgccttttccgcattcactgctttaattgtttttgcaaggcaagtgctgggtattattacttg

SEQ ID NO: 143819 - DNA, 1571 bp, Zea Mays
gaaacgcatagacacgacacgacacgacacggcacgacacgccggagaagaggagagaggcggaacgatcggaggggaggtagatgaagcccaagaacggcggcctggcctcggacaggaggctgctctcgcgccggatactgatcctctgcttcctcagcttcttcctcggcatactcgtcacggacctgtttggatcggtgccgagcccggtcgtggtgcagacggggtggcacgagcacgagcacgagcacgacacggagctgcagagcctttccgaggattttgttgccaagccgaaaccggcagaagacagggacattatgggagaggtgtcgaagactcacgaggccatacaatacttggagaagtcaattgacacactgcagatggagctggcagcgaagcgcagcatcaacgagcttcacggggaaagtacaggtggtggcgtaagtaagcagaggagaagggtgttcgtggtgatcggggtcaacaccgccttcagcagcaggaagcgtcgggattccgtgagggagacctggatgcctcaaggtgagaagctcaagaaactggaggagaagggaatcgtcgtccggtttacgatagggcatagcgctacatcgaacaacgtccttgacaaagctatagacgcggaggatgaaattcatggcgactttcttaggctggaccatgtcgaagggtaccacaagctgtctgcgaagaccaagacattcttctcaactgccgtggccttatgggacgcggatttctatgtcaaggtggacgacgatgttcacctgaacctagggatgctcgtcgccaccctcggccggcacaagctgaagccacgggtgtacattggctgcatgaagtcgggaccggtcctctccgacaagaatgcgaaataccatgagcctgagttctggaagttcggagaggacgggaacaagtacttccgccacgccacggggcagatatacgccatctccaaggacctcgcgacctacatctccatcaaccagcccatactgcataaatacgcgaacgaagacgtctcgctcggcgcgtggttcatcggcctagacgtggagcacatcgacgacagggacatgtgctgcggcacgccaccagactgcgagtggaaagcgcaggcggggaacgtctgcatcgcgtcgtttgactggaggtgcagtggggtctgcaatccggtcgagaggatcaagtacgtgcattcgcgatgcggcgaagggcaggatgcgatctggagcgcctccttctgacaagatggtgatggaatcatggaatgattatatatatacagacgcacgcctgcttgtgtgcaggcccaggccatagctgcattagaaggctcgcgttgtgtacacacagtgagttcagagaaggggaggcatgcgtgtctgatacaggaagaaaccactggagcacaatctcttatcttttttgggggggagggttcagaaataggtgatacagccatacagagctcatgtgggtgggtatacatgttttttttcagtcgttagtgcagaaaacacgaatacattcgattt

SEQ ID NO: 143820 - DNA, 1467 bp, Zea Mays
ccgagggcctccatccctccacgttctcagaaaagtcgtccacgcgtctataaaccacaccaatcttttggcccttcgcttctccgttctcccccaattcgccttcacctcgccgcttcctccttgaccgccaccgttgacgtcgtcttccggcgaggtagctcgccggaagacctcacctggacttttccgacgcaccctccacacactctttaaccctccggaatggccgcctgcttctagctcgtcgacgccccaatctccgcttgcttcctcgacagccccatccgcctcttctcgctctcgctacggctcctctgcctgttcgccatggcgatccgcatcaccgtctcctactccggctacgtggcgcagaacctcgccgcgtcgctcggccaccgcttctcctccgcctccgcctcgggcagccgcctcctccatgacggcgcctggcgccccttctgcatcttcacctccacccgccagcccgagcagcaccgcggcagcggcagcgaccgccatgacggaggcgactacaaccacccgaagccccaggccatcgccgccggagctcactcgttgctgctcacgcgtgcgtgcttatcgtccaagtcgccgccgccgtctcttgccgtggggctgctctcggtgcttgcgcagaggacgggaccgacgcctggaaccaccggatcggcggcttctctctcaggctcgtcgccgatttccctcggtttcaaccccacctccttcctcccgttcctgcagacagcgaggtggctcccgtgcagcgaccttgccacctcgtcgtcttcggcaccctcttcccctccccgctcgctggcgccttcggctccccccaagaaggcgttgattggtgcttctactggttctaccggaattgcgacgagcagtggtgctggtgcagcgatgagcaggagcaactggctgtcgaggtgggtcagctcctgctccgatgacgccaagacggcgtttgcggctgtgaccgtgccacttctctacgggtcgtccctggccgagccgaagtccatcccgtccaagtccatgtacccgaccttcgatgtcggtgatcggatacttgctgagaaggtctcatacatattccgggatccagaaatttcggacatcgtgatcttccgggctcccccaggacttcaggtttatggctacagctcaggtgatgtgttcatcaagagagttgtggccaagggaggagactatgttgaagtgcgtgatggcaagctgtttgttaatggagtagttcaggatgaggattttgtgctggagccacacaactacgagatggaaccagtgcttgtgccggaaggttatgtgttcgtgttgggagacaaccgcaacaacagctttgattcccacaactggtacgtcgcaagctactgtaattcgacctgttacactagaaacgcacagatatgcggatatgcctga

SEQ ID NO: 143821 - DNA, 1926 bp, Zea Mays
gtaagggggccaagggcatcggcttccggttttctagttccagggtttaaagagctcgccgagcccgtcgtgcgccggcccagcaagagcccactactttccgccatcgtcatcgccgtcgacatcgccggcgccgacctctccgtctccgcgcgcggcaatggcattctccttcgcctcgccgccgaaccccttccagacgccggctgcgtcgaatcccttccagacgccagctgcgtccaacccctttcagacgccggcggcgccgaatccgtttcagacgccgactccggccacctcacaggcgccgtccctatcgccctcgccgttccagttcagcttccagccgcagccgcagcagcagccacagcagcaggtggcgccggcggcgcaacctcagcagccgcagccacagcatcagaagctgatgctgtacacgacggatatgaaacccgctgggtacaacaccaagtgggaggagctgcacgccgagtcgcagaaggctttgctccagatcgaggacaaggtacgagactacagagacgagtgtgagaggttggatcagtgcagtcgcctttatgactcctcaatctcaaatgtaaattttgagcttgatgcaagtcggattgttcaggaacttggagggaccaccactgtaatggagagagagaaggcttccattcaagagttgatgaatgttgtcaatgaaatgatgtggaacacggaatttgctattaggtcgtatctgatgttgaggccaagattcacccgtacaggtgctggagttgcaaatggtggttcttcaaatccttctgctggtgctccacccaatcagccagtgttagatttctacagtggagtcccaaagcgcccttccatttttatgcagcacactgtcaataggtttgagtgctatcttgcggagtgttgcaagtggattggggagctagagcagctggttcaaattgagacaaataaaatatcatcagattctctagattctcttccaaaagttatgtcaaatgtgcatgattacttcatctatgttgcttctaaggtggaaaatcttcatcaatatgttgaatcaatgaaagctgaatatcttaatgaacaacgccgcaacggcaatgggagcaatccatttctagaggcaaacagacgagaggcagctaaacaagaagcagctgccagaagggtccatccaacactgcatttgcctgcccctgcgcagcccatgccacaaatcgctgcaccagctacaagccaaccgcagcaaccttcctttccgtctgctgcgacttcctcaagtgccttttcaacttttagcacaccggcttctgctccatcctcatctagtctgtttgcaactccaacaactccagctccatcagccaacctttttggtgcatctgggtcggctcagttgaccacaccatttgggacagcctccactccaacattggcatcaacacctgctcctggatttgggactagcactacatctttgggtggaacatctctattttctacaccatttggaggtggggctacagcttcaggttccagctttggtggtgcatcgaaaggaaggtcgaagccccggggacgacgctagatgtaaatgtggatgctattgattctcttgactgttacttcgtccattttatgcagaaattgtaactaatccccgcccccctcaaaaaaaactagtggagttttaggtgacttattgcatgcttactactctaacctttttgtactagttgtcataaagttttaatccctatgccccttcataatcttgcctgattgttgaactgcaaacgtaagagatgttgtatgggccagaacctgttaatgcgctgactcttctggatgtaaaagccggttccttttagatcaggtagagcttagcttttatctggc

SEQ ID NO: 143822 - DNA, 309 bp, Zea Mays
atgtgggagatcgtccggagcgacgcgcagagcgagcggcggagcagtgaggacgagaaagttgcggaggaatttattgatggcatctcataccaggggagcgtggcaagggtggaggaaaaggcggccagattcatgagggctgggccgggcgccgcctggactccggtgtgcagggcgcggcaaaggttgcgcggctgctgtagactgcgactctgcgaggggcgaggtgccaaggcgcgcatgtgtgagcgagtagcgatgacgagtgggtctgcaagtttgttgggcccgtttggcattgtgtga

SEQ ID NO: 143823 - DNA, 1292 bp, Zea Mays
gagctgggcgcggggcagccggtaccgcggccagtaccgccaggggctccgccacggccacggcgtctaccgcttctacagcggcgactgctacgcgggcgagtgggccggcggccagagccacggcatcggcgcgcagacctgctccgacggcagctcctacgtcggggagttcaagtgcggcgtcaagcacggcctcgggagctaccatttcagaaacggtgaccgttacgcgggcgagtacttcggggacaagatccacggcttcggcgtctacagcttcgccaacggccactgctacgaaggctcgtggcacgaaggcaagaagcagggattcgggatgtacacgttccggaacggcgacaagcgatcgggggactgggattctgggacgctcaagacccccttgcccccggccgatccttctgtccagcgagccgtacaggtaaaacagacagcggttttcctgtgcggctaaaatccacccaccttccgtaaatcttaacagtggccgttgcgcgttcctctttgtcctcccacccaggctgcacagcgagctgcagagaacgcgtttcgcttgcctagagttgatgagcaggtccacagggcggtaatggccgcgaacagggcggccacggccgctcgagtggcggcgatcaaggcagtccagaacaggatggatgggaagttttgtgagacctatgtgtgaattgctgtgtgcgagaccatgtttcgctctctctctctctttctaactgtacattagggtagtgaaggacaataactaatcagtgaggtgagacgacgaccggggcagcacaaccgcgcgcttccgagtcagggttcagcaacgagacgacgggagcctgtctgacgaagagcggagctggcagaaaccatttgcgagaaacggccatatcgccatggctgtcggaggggttccctcgcacctttccttgcaacaagctgtaactgtacatagatccaggcggtgtatcaatggtggagagcgagttttttcttcttctttccagtgcccttctcagttttcatttactcctcaattatgtctcagtaggggggatgtgtgcagggcactggggccactgcttacagtcacaggagtctgttagctttgcatctgcgtctccatttctccaacctaaatcttgaccgcttctcccatgtgcagtgattctccgtttgcaaatgtacttggaggtgcacatgggggaaggactgtaaatctccccgcttgtcctgccctgcaatgcaacccaagcgtctctggt

SEQ ID NO: 143824 - DNA, 542 bp, Zea Mays
tccgctccacccactcccgctctgctcccgtcgatctgccatcctctgcctgccccgcttgctccgcgcgtctgctctagtgatttgagacggagatccgccagagatcgaggagccggagagcggcgtcgacgagggatggacgtccacggcggcggaacgggagccggcaagctgacgcggacgccgtcctcgctgctgcgctcgccaacggtgcgcaactgctcctcgttccaggccgtggttgtcgaggacccggagcccgacgacaagaaggcacaggcgcaccccaagcctccgccccaccacttccaccccggcggcggctccaaccacccgctgctcgtcctcgtgctcccgctcgccttcctgcccctgctcctcctcctccgcggcggcgacggccgccacctcgccctcctcgcggcgtccgcggccgccgcgctcgccgccgccgcgggggccgcgcgcctgctccggggacgcctgcgccgctcgccgggctccggctccgtccagtggttcatcggggacgacgacga

SEQ ID NO: 143825 - DNA, 969 bp, Zea Mays
atgagtccatgacacactcctgctcgcggtgggggtgctcatcccggcgctgttcctgctcgtgccctcgcgccaggaggggtacatctcagacgaccacgacgtgttcgctgctgaaatcaaagttggtttcactttggaaaagccagtgtcattccttacttctcacatagacaaactagggaatgccatatttgaagagattggtgtacctaatagcaaggtatcatcgtttcaatgcacccattagcttttaaatactccacacatgttgtttttggtgttcttccttatccaaaagatgcttcaataagtttgccagctctaagtgtgttgagatcatccttaatagagatgattctccagcaagtgaacctatccttgacaccactttttgggcatccatgttgtttcgagctgttgagatttcctggaggagttacagtcattcctgcagtgtctggttttacatgggcaaacacagaccccctattcgactttgtgttgaacaactccattttatcagattttgggtaatcttacagagctcaaggatcagctgaaacttggattgaacttaaggtcatatgagctctcgttcacacttgaagttatggttgcttcgactgttagccatgcgtcatcaggaaaatcgagccagaagacaaggtcacaattttgcttcaagcataaccatgagttgcaatcatgggctatgatgcaaagatgaggctttgtttattggctactgtaactatatgattaattttaaagctttttgaggtcaggttaactgtagatatagatgttgcttcgactgtatatatgattaattttaaatctctcaccgaagggttgggagcttatatagaggaatgcaaggactcttactcgggtccacgttctgcaataatactttcttgtaacgtattgaccataaatacataatacaacatgcaacttctctgc

SEQ ID NO: 143826 - DNA, 2820 bp, Zea Mays
gtcaacattccccgatcgcctacgccacacgccgtgccgtgcactcctacgcttcatgggcgcatccgcgcgtgccccctcgccgtcgccacacaaatgtctccgctcccacgcgctctgccgcgctcgctcgcgttcctaggctgggttctgctgatcctcttgcccgcccgcgccgcggacgccgggccgctggcgaccgagctcctgcgacctcccttcaccgcctctaacatcctgtacgtcgacacaggcggcgcgttcctagagtccacgagcggcgcgttcagggccgccgtgttcaaccccgggaagcagcaggacaggttctacctcgccgtcctgcacgtcccgtccgccacgcttgtctggtcgggcaaccgcgacgcgccgacgacgtcgtcgggaccggtgaatctcacttcgcaggggatcacggtgtcgaagcccgacggaacattgctgtggtcgacgccgtcgcagctgcgctcgcccgtcgtggcgctgcggctgcaggacagcgggaacctgcagctgctgggcgccgggaacgcgaccctgtggcagtcgttcgataccgccacggacacgttgctcccgggccagctgctgcgcgccggcgcgtacctgtcggcggcgacgagcgccaccgatctcgcggaggggaactaccggctcggcgtgacggccgcggatttggtgttgacgtggcaggcgtccacgtactggcggctgtcgaacgatgcccgctcctacaaggatcggaacgccgccgtggcgtccgtgtcggtgaacgcgtcgggcttgttcgcggttgctgccgatggaggcctcgtgttccgcgtgaacatcggggcggcggcgttccccgtgctaagtctcggatacgacggccggctgcgcatcacgagctatgcgctggtgaactcctcggcgtcgcttggaagcgacttcgtggcgccggccaacgattgcgacctcccgcttcagtgcccttccctcgggctctgctccccggcggcgggcaacagctcgacctgcacctgcccgccactcttcgccgcctcagtgacgacgcccggcgcgtgcacgccgggggacggttcagcgctcgcgtcgccggccttgtgccagagcaacaacagcaccgtgtccccgtcttacctcgccctcaagtcgcaggtggcctacttcgccaccaagtttgatccgccgatcaaggcgggcgtcaaccacaacgcgtgccgcggcctctgctccacgagctgcggctgcctcgcctacttctacgacaacctctcccaaagttgctacctgatccaagataagcagctcggctcgctgtattttagctcttctgcttcagccttgggatacatcaagacggtcccttcggcgaacaatgctacaagaaacaatccaagctcgtcgtctgcgaaccgtgccatcccaatcatcctgccatccatcgcagctttcctactcctcgccgtgatcatatgctacttgtgctggaggaggatgagcaagaacggcaagaaaaagaaaggcaagagcaccggcgtcaagcaggtgtacatgggccgtcaaaaggacaccggtagcgcggacgacgacgaggacgacgacaacgtcgtcgtaccgggcatgccgacgcggtttagctacatggagattgcggcgatgactgccaacttcgggacgaaaataggctccggcgggttcgggtctgtgtacaaaggggaactccccggcgtcgtcgaagggctcgttgcggtgaagaagctcgaggccgtcggcgtgcaggccaagcgggaattctgcaccgagatcacggtcatcgccaacatccggcacgtcaacctcgtgcgcctccgcggcttctgcgccgagggctcgcgccggctgctcgtctacgagtacatgaaccgcggctcgcttgaccggtcgctgttcggccgcacggggccgatcctggaatggggggagcgcatggaggtggcgctcggcgcggctcgtggcctcgcatacctgcacaccgggtgcgaccagaagatcgtgcactgcgacgtgaagccggagaacatcctgctggcagacggcgggcaggttaagatcgctgacttcggccttgccaagctgatgtcgccagagcagtctgcgctgttcaccaccatgcgtggcacccgcgggtacctggcgccagagtggctcagcaacgccgccatctcggaccgcgctgacgtgtacagtttcggtatggtgctcctggagctgatacacgggaggaagaacaggggcgagcagaccaacgacaacgccgccgtcgccgtcgccggcgccggcgccggcagcagcgtgcagtcggactggccgtccgggtggagcagcgcgacggcgacgtcttcgccgagtggcgccagcggcagtggcgatgagtacttcccgatggtggccatggagctccacgagcagggaaggcacttggacctggtggaccggaggctagaaggccgcgtggacggggccgaggcggcgcgtgccgtgcgcatcgcgctgtgctgcctgcacgaggaccccgcccagcggccgagcatggccgccgtggtgcggatgctggaaggcaccgtggcccctccggagccgcgcgtggaggcgctcgggttcctccgcctgtacgggaggggccacgccgtgccgaacacctccctgatcgccatggctggcacgtcgggctcggcgggcacgtcatcgtcgatggccggcgtcgcggagttgactgatacgtcgcagagcgtgtcagcgccaagatagcaccac

SEQ ID NO: 143827 - DNA, 479 bp, Zea Mays
atggtcgatcgatcgatgatgaatgagcaactgagtaactgacgatacatacacacatgcagcagcgcgagccaacattaccgaacactatccacggtggggcctcctcctgcctagctcctcataattccgcaacggtttcgaaacaacggcaaccacctccccccaaaggcaccaaactgtattcaaggccggccggcggacaccgccacatgcgcgcgccgacgaaacggcgcccgacacaaacgattcagcacctgcatctactgctgctacgagcatgctataggcatggccggccgatttaccgttgcgggttgcggctcgatcgcgagatgccatggattcctttctgttcatcctgcctgcctgcgtgcgcgcgattgcagatagacaagtagtatccatgcaattggggcaaagacgacatgcacggatcgacgtgacgcgagataggcctggacgaatcgaccggcaca

SEQ ID NO: 143828 - DNA, 1337 bp, Zea Mays
atgacggagcactggacagtctggacaggacctccaattgttggtaaagtatgtgctgcgcctgcgctggccaatttcttggagcccagccgtgacgtgagaaatgattccaacgacaaagctagtcacatcatgagaaagagtgcagaagattggaacaaggatagcctttcttcctgtgcagccactccagtgcacgccgccgcagcttgctacacgtgccgggcaagggcaatggattccagcagcagagtgatcgccttcgattgcagctccttcaaactctacatggacggccaagtcgagcgtgcggcccaacgcatggaaaccgtgcccgccggcttcgacgcggacacgggcgtggcatccaaagacgtcgtcatcgacgtcgccaccggcgccaccgtgcggctctacctaccaccagtccagggagccacgacgaagctcccagtcgtcgtcttcttccatggcggctacttcatcgtcggctcagcccgcgagcctatgtaccatcgctatgtcaactcgctggtcgccagagcacgcgtcgtcgctgtctccgccgactaccgcctcgcgccagagcacccgctcccggcagcctacgacgactcctgggccgcgctcaagtgggcggtctccggcgcggaccagtggctgtccgaccacggcgacctcggccgcgtcttcctggtcggcatcagcgccggcggtaacattgcccacaacatggccatctctgtgggcgtgagcggcttgccggccgctgaaccaccgcgcatagaaggcgtgatcctgctccacccttccttttccggcgaacagaagatggatgtagaagaagaggagttctggcgatctaacaatagcaggtgggcggtcatcttcccgggcgcgaccggcggggcggacgatccaaggattaacccgatggcggacggcgcgccgagcctggagaagctagtgggtgaaaggctgctcgtctgcacggcgtctttggacccgagggcgccgagggggcccggatactgcgaggccgtacgggccagcgggtggcgcgggaaggtggagtggttcgagacggaaggtgaggaccacggtttcttcgtcctcaaccccggcagccacaaggcggttgaggtcatggatcgagtggttgctttccttgcggaccagtgatgacctcctcagggcacagcaaggtctagcagctcgccgcaaaaccggacgtcctagctacggcgcagccgttctcaggcgattgtttactgtctgtactcccaagagtgtcctagatgagttattggaataaacactacagtcaattcaaacca

SEQ ID NO: 143829 - DNA, 558 bp, Zea Mays
atgtacgagccctttaaaaaccaagcagagtgggcatggaacccaattgcaagccaggaggaagattcgactttcaatgagccgacaactttgatgccaacttcctcttcttgttctgctcagcatgctctgctagtacctaagtctgtcgaaccactcgttgtggaaccaaaacttggccttaccgaactctcacctggtgatcttgatcagacaccagaaaatgttggcgaggatgcgaatcttagcagcctttacgatctggttccaagctgttcgatacttgctggtatgacggatggtgaggatctggttctaagttgttcgatactcgctggtatggtggatggtgaggacgggctgaatttggctgatgtcagtttgcagacccagtctgcatcaaagccacttagtggtggtggtgctggtttggctttaattgatgccagtaataattcccaggtggacagcgagttgatcgacgaaccaattatgtctaccggtaatttacttagggggtgtttggttcaaggaatcattccatccaaaatgaggtga

SEQ ID NO: 143830 - DNA, 603 bp, Zea Mays
ccttgcaaatagacatttcatggaggaccactgagggtgaactgtgggccacctccacctatggctctgctaaggaggtcaacaatgacatatcaaaccttgatggcatcgacaatatggaagcaatggtggtagatcagttgaagatggacaacttgtgaagtcttctacagaagttgtttcccatattttgttgagctcaagtaaattccttcacaatgttgaccttcaacccgcctccaagaaaagctctgtctcctccttaagattgttgtcatcatcgatcatgctaaagttacatctcacaacaatggacctcttttttatttgctatgcttgttgtctagttggtccgatcatattgctattgtagtagttgtgctcaaatggagcttgtggttgttgaacctattctatttgcttttggatttacgttataggatatttaaacatatttgatgtttagaacttatgttggatactttatgcttcaattatgtggatgctgaaaagttgtgcacactgaaagggaaatgtgcctttgggccatttctaagtattttggtgattgagtgcaaacacaagtgcttaaatgtgaaaata

SEQ ID NO: 143831 - DNA, 2286 bp, Zea Mays
accattcgaaagatccctccaggaaagatttttcttccctcctccgacgccccagcccaccaacacactctataaagcagccctcagtcacacacagaacgcacaagcgcaagccgggcaagaaaactccgcaggccagtctgcgagttggatggccttcttcttggccctcgtgtgcatcctcatcttgctagccatcgcctcctacgtccagtacactcgctggcaaaaggggaaaggccgcttcggcggccatgggaggtctgctcccttgaagctgcctcctggctccatgggctggccttaccttggcgagaccctccagctttactcccaggaccccagcttcttcttcgcttccaaacagaagaggtacggcgagatcttcaagacgcaccttctgggttgcccgtgcgtgatgctggcgagcccggaggcggcgcggttcgtgctggtgacgcaggcgcacctgttcaagccgacctacccgcggagcaaggagcgcatgatcgggccgtcggctctcttcttccaccagggcgactaccacctccgcctccgcaagctcgtccagggcgcgctcggccccgacgcgctgcgcgcgctcgttcctgaggtggaggccgccgtgcggtccactctcgcttcctgggacgccggccacgtcagaagcacgttccacgccatgaagacgctgtcgtttgatgtgggcatcgtgacgatcttcggcggccggctggacgagcggcgcaaggcggagctgaggaagaattactccgtcgtggagaaggggtacaactccttccccaacagcctgccggggacgctccattacaaggcgatgcaggcgcggcggcggctgcacggcgtgctgtgcgacatcatgcgggagcgtcgtggccaggcccaggcggcgggcaccggcctgctgggctgcctgatgcggtcccggggcgacgacggcgcgccgctcctgagcgacgagcagatcgccgacaacgtcatcggcgtgctgttcgcggcgcaggacacgacggccagcgcgctcacctggatcgtcaagtacctccacgaccaccccaagctgctcgaggccgtccgggcggagcaggcggcggtccgcgaggccaccggcggcgggaggcagccgctggcgtgggcgcacacgaagagcatggcgctaacgcatagggtgattttggagagcttaaggatggcgagcatcatctcgttcacgttcagggaggccgtggccgacgtggagtacaaagggttccttatccccaaggggtggaaggtgatgccgctcttcaggaacatccaccacagcccggactacttccaggatccacacaagttcgacccttctagattccaggtggcgccgcgtccgagcacgttcctgccgtttgggcacggcgtgcacgcgtgccccgggaacgagctggccaagctcgagatgctcgtcctcatccaccacctggtcaccggctacaggtgcgtccatctcctctcagatcctctccatatattcccgcttgtcctatagcttgtggaccaggatgacacatggctggctgctgccgctctccatggggctccggctctgatctctctccgtgcatgctccaaatctcctcctgtctgtatgtatgcctgtatcgatcatgtatatactcctgtaccataatctgtggggtcctcgaaatgtacgtcttcactagccccgctgtgctctccctcctatataaactgtggtgatcgactgctataacgacagtttactgatcttacactgagacactgattggcgtctctgcatgctttatttttaaatttgcaggtggcaaatcgttggatccagtgacgaggtcgagtacagcccgttccctgtgcccaagcacggcttgcctgtcagattatggagacaaaacaatccggtcgacagaaaggggcgtgagaccgacgacgatcatgtggagaggatatttatttagtttgactcttgagttaggcatgaatttaaccccaagctagctagagaagttttttttcccctttgaaattcttctttgctcgcctcttcctcctggatcaaattgcgttggaggagaagaaacggcagctttctctctttcgttttctttgcctgcttcaccgctacgataatggtgaaaatatgtaagctacgtggacatcaatgatccacagcatcgttgatatatataatatatagagaaaattctctgcacgatcaatgcaattttatccggtatcttatttacc

SEQ ID NO: 143832 - DNA, 1910 bp, Zea Mays
accattcgaaagatccctccaggaaagatttttcttccctcctccgacgccccagcccaccaacacactctataaagcagccctcagtcacacacagaacgcacaagcgcaagccgggcaagaaaactccgcaggccagtctgcgagttggatggccttcttcttggccctcgtgtgcatcctcatcttgctagccatcgcctcctacgtccagtacactcgctggcaaaaggggaaaggccgcttcggcggccatgggaggtctgctcccttgaagctgcctcctggctccatgggctggccttaccttggcgagaccctccagctttactcccaggaccccagcttcttcttcgcttccaaacagaagaggtacggcgagatcttcaagacgcaccttctgggttgcccgtgcgtgatgctggcgagcccggaggcggcgcggttcgtgctggtgacgcaggcgcacctgttcaagccgacctacccgcggagcaaggagcgcatgatcgggccgtcggctctcttcttccaccagggcgactaccacctccgcctccgcaagctcgtccagggcgcgctcggccccgacgcgctgcgcgcgctcgttcctgaggtggaggccgccgtgcggtccactctcgcttcctgggacgccggccacgtcagaagcacgttccacgccatgaagacgctgtcgtttgatgtgggcatcgtgacgatcttcggcggccggctggacgagcggcgcaaggcggagctgaggaagaattactccgtcgtggagaaggggtacaactccttccccaacagcctgccggggacgctccattacaaggcgatgcaggcgcggcggcggctgcacggcgtgctgtgcgacatcatgcgggagcgtcgtggccaggcccaggcggcgggcaccggcctgctgggctgcctgatgcggtcccggggcgacgacggcgcgccgctcctgagcgacgagcagatcgccgacaacgtcatcggcgtgctgttcgcggcgcaggacacgacggccagcgcgctcacctggatcgtcaagtacctccacgaccaccccaagctgctcgaggccgtccgggcggagcaggcggcggtccgcgaggccaccggcggcgggaggcagccgctggcgtgggcgcacacgaagagcatggcgctaacgcatagggtgattttggagagcttaaggatggcgagcatcatctcgttcacgttcagggaggccgtggccgacgtggagtacaaagggttccttatccccaaggggtggaaggtgatgccgctcttcaggaacatccaccacagcccggactacttccaggatccacacaagttcgacccttctagattccaggtggcgccgcgtccgagcacgttcctgccgtttgggcacggcgtgcacgcgtgccccgggaacgagctggccaagctcgagatgctcgtcctcatccaccacctggtcaccggctacaggtggcaaatcgttggatccagtgacgaggtcgagtacagcccgttccctgtgcccaagcacggcttgcctgtcagattatggagacaaaacaatccggtcgacagaaaggggcgtgagaccgacgacgatcatgtggagaggatatttatttagtttgactcttgagttaggcatgaatttaaccccaagctagctagagaagttttttttcccctttgaaattcttctttgctcgcctcttcctcctggatcaaattgcgttggaggagaagaaacggcagctttctctctttcgttttctttgcctgcttcaccgctacgataatggtgaaaatatgtaagctacgtggacatcaatgatccacagcatcgttgatatatataatatatagagaaaattctctgcacgatc

SEQ ID NO: 143833 - DNA, 2059 bp, Zea Mays
accattcgaaagatccctccaggaaagatttttcttccctcctccgacgccccagcccaccaacacactctataaagcagccctcagtcacacacagaacgcacaagcgcaagccgggcaagaaaactccgcaggccagtctgcgagttggatggccttcttcttggccctcgtgtgcatcctcatcttgctagccatcgcctcctacgtccagtacactcgctggcaaaaggggaaaggccgcttcggcggccatgggaggtctgctcccttgaagctgcctcctggctccatgggctggccttaccttggcgagaccctccagctttactcccaggaccccagcttcttcttcgcttccaaacagaagaggtacggcgagatcttcaagacgcaccttctgggttgcccgtgcgtgatgctggcgagcccggaggcggcgcggttcgtgctggtgacgcaggcgcacctgttcaagccgacctacccgcggagcaaggagcgcatgatcgggccgtcggctctcttcttccaccagggcgactaccacctccgcctccgcaagctcgtccagggcgcgctcggccccgacgcgctgcgcgcgctcgttcctgaggtggaggccgccgtgcggtccactctcgcttcctgggacgccggccacgtcagaagcacgttccacgccatgaagacgctgtcgtttgatgtgggcatcgtgacgatcttcggcggccggctggacgagcggcgcaaggcggagctgaggaagaattactccgtcgtggagaaggggtacaactccttccccaacagcctgccggggacgctccattacaaggcgatgcaggcgcggcggcggctgcacggcgtgctgtgcgacatcatgcgggagcgtcgtggccaggcccaggcggcgggcaccggcctgctgggctgcctgatgcggtcccggggcgacgacggcgcgccgctcctgagcgacgagcagatcgccgacaacgtcatcggcgtgctgttcgcggcgcaggacacgacggccagcgcgctcacctggatcgtcaagtacctccacgaccaccccaagctgctcgaggccgtccgggcggagcaggcggcggtccgcgaggccaccggcggcgggaggcagccgctggcgtgggcgcacacgaagagcatggcgctaacgcatagggtgattttggagagcttaaggatggcgagcatcatctcgttcacgttcagggaggccgtggccgacgtggagtacaaagggttccttatccccaaggggtggaaggtgatgccgctcttcaggaacatccaccacagcccggactacttccaggatccacacaagttcgacccttctagattccaggtggcgccgcgtccgagcacgttcctgccgtttgggcacggcgtgcacgcgtgccccgggaacgagctggccaagctcgagatgctcgtcctcatccaccacctggtcaccggctacaggtgcgtccatctcctctcagatcctctccatatattcccgcttgtcctatagcttgtggaccaggatgacacatggctggctgctgccgctctccatggggctccggctctgatctctctccgtgcatgctccaaatctcctcctgtctgtggcaaatcgttggatccagtgacgaggtcgagtacagcccgttccctgtgcccaagcacggcttgcctgtcagattatggagacaaaacaatccggtcgacagaaaggggcgtgagaccgacgacgatcatgtggagaggatatttatttagtttgactcttgagttaggcatgaatttaaccccaagctagctagagaagttttttttcccctttgaaattcttctttgctcgcctcttcctcctggatcaaattgcgttggaggagaagaaacggcagctttctctctttcgttttctttgcctgcttcaccgctacgataatggtgaaaatatgtaagctacgtggacatcaatgatccacagcatcgttgatatatataatatatagagaaaattctctgcacgatc

SEQ ID NO: 143834 - DNA, 412 bp, Zea Mays
gattgggacatcaacgcgccgatatcatacaactcagctcgccggttggattgggacatcaacacggcaccacactcaccgccgacacagagtgcccaaacaacacaggcagcggcaaccccacacgagagcacacactccgacctcccaaagcagccaacaggcgaaccaaacgaaaagcagagagacagcccgatgcgaaaggtctcaacaggtcatcgttgtcgggctcaagacatagacaagctccaacttccaatcttgaccctctgccttgcctctagttttagcctgaccttcgaaacattctagaccacgaagaagggaggttcgtctcatgttatcgttgccgagccacatcccctcacgtagcagctccgacttcacgttgcaaaaccccaccttcactcgc

SEQ ID NO: 143835 - DNA, 902 bp, Zea Mays
agcgggcgtccagattcctgcaccatgcccccgctcgcgcaatcctcgctcccacactcgctctccaagctcgaacatgcatcattcttccccgcctccacgattctgcgccgccacccccatgtcgcccccgtccttggtggctcggcgacttcaccagacataaatctcatcgtcggcgcttcttggtggagcaaggaggagcaatcatcagcgctctccacaaccatagatttgatggcccaacggctacatcaactctcagttttccttatatgtcatatataaagtatggattgttttttcttccacccgctgcaggagctcatagagtgaaatgcccaagacagggagaagtttggcttttcgtcttcatgatttgcgtctctgggaggactgcacctgaggtcttggccaagcataagggttccacatgcacattcaccgagtcaatcctgtgatcgtgtggcttccataatgggttgttcacctcaccacatttgatggatgttagagagcgattttagctagagggcatcagggttaatatttctgaagagaaaattttgaagtacttctggtggtgctggaacaagttgaagcctatttcaggttcctcgcgctgctcgcatcaagatattttgtgctgagcaggtagatgttgctgttctcgaggttggcctaggaggaaagtttgatgcaataatgtggttaaagcacctgtagtttgtggcatatcttcccttggatatgatcatatggaaattcttggtgaccaaatcctgttcttggtgataaacttggtgtcgataaacgggttaattctgttggaaaaattaggatgacataggtgacatgaagatgccaagtcggtgcatcgacactaattgcgacttaggtct

SEQ ID NO: 143836 - DNA, 1805 bp, Zea Mays
cgcgccaaggctggcttctgtttgtgggcgcaggcaagatcgacgaaggatcggaatggacgcgaagctgaggccgctgccgcagccggcggtgaggaaggccgcgtggcccgtcggcctgctcgtcgcgctgtgctttacgacgctgccgctcttcctcgcgctatcgcccggccggccaaccctgttcgacgtgtggcagcagatcggcatcagagtagcggtgcactacgacgacgagccgaagccgccggagccttcgggttcgccactggagggccgcgacatcctcctcggcggcctgctctcgccggaagtcagcgagaggacgtgcctgagccggtacctctcctcgctgtaccgcagggcgtcgccgcactcgccgtcgccgtacctcgtctcgcggctgcgcaggtacgaggcgctccaccgtaggtgcggccccggcacgcccttgtacgccaagtccgtgaggcagctcgcctccgcccacaacagcatgggcctcgccgagtgcagctacctcgtctggacgcccggcaaccacctcggcgaccgcatggtctccatggcgtccgccttcctctacgcgctgctcacccgccgcgtcttcctcgtcgacatggccaaggacatggcgggcctcttctgcgagcctttcccgggcgcgtcgtgggagctgccgccgggcttccccgtgcacaacctcacgcagctccgccgcggcagcgagcacagctacgggagcctgctgggggccaagaagatcagcaacgaggaccccgtcggcgtgcggtccgagtcgctgccgtcgtacgcatacctccacctggcccacgactaccagctgccggaccacttcttcttctgcgacgacgaccagaccgtgctggggaaggtaaactggctgctactgcgctccgacctctacttcgcgccggggctgttcctcgtgccgcagttcgaagacgagctccggtggatgttcccggccacggacacggtgttccaccacatcgggaggtacctcttccacccgtccaacaaggtgtggaagatgatccaggggtactacacgtcgtacatggccaagttcgatgagaaaattgggcttcagatcacgaccctcgcctggaaccccgtgtccacggaagcctacttcaaccagatcgcggcttgcacgagtcaggagaagatcctgcccgaggtagtagaccccaaagtggcgttgagtgacgagcacgaggccgctgtggcgtcgtcgaaggcggtgctcgtcatctcggcgcatccggagtacgctgagaggctcaagtccatgtactacgagcacgccacggtgaccggcgagcctgtaagcgtgctgcagccaccgggagccggcaaccagccgcagaaccacaaggtgctggtggagatgttcctgcagagctactgcgacgtgtccgtggtgagcgggtggtcgacggtgggctacgtcggtcacggcctcgccgggttgaacccgtggctgctactgccgccgacaaaccagacggtggcccacccgctctgtgtccgggcaatgtcgatggagccgtgcttccacgcgccaccgagttatgactgcagggccaagaaaaacggcgacctcggtgccgttttcccgtatctcaggcactgcgaggatgtggatgatggccttaaattgtttgatggactttcatgaaatttgatccgatctgatcaagtaacatcatcatttttcccaagaagtcagattcgaaagaaatttcataataacttatttcttctggtaaatgtat

SEQ ID NO: 143837 - DNA, 440 bp, Zea Mays
ccggagacgaagctgctacatacggccggagaagaagacgtctctggtggctcatcacagtcacaccgatgtgcatttcccttttacctatttgccgcatcttgttcccttcttttatttattatttattctgggtgtataaggggaatttttttttgtcatttgtttcttgatagtagtagttcgttggccgagttattagtagatgcatgtccaaccatccatggctgcaggctgctgcagctagctttgttgcattgtagtaatggtcgtcgcgtgcggtgtagcagcagtcagtcagtagtagtcaaaattaaaactccgctagctggtgtggtgactggtgcgtgcctatctctgattgttttgaaaagggccagtatatttcccctttaatttcacatggtgtggtccctggtgtacgtgttgtttagctgctc

SEQ ID NO: 143838 - DNA, 988 bp, Zea Mays
aagcttgctccacgctccatcactctcctcactagtcacaagtacacccactggccagtggctacacgagctgagctatctccgctagcagctcgctcacaagtcacacccacgcccagagtgttctagctacaccctagctccggtcttcttctttttcttttttgaaaggcgccaccttggcgcggccttcctcctagatcgagtccaggcgcgcggtgcgagagggttccagcacccgcaggctgcttcccacaaccccattccacccttggaggtggccactgggccggccggccgcacctaactccggtcttgatctcatagcttgataagtaacaacgacgggcgtaagagctcagagaggtgggagctagggagaggaacaaaagaaaccagcgcgcttgtgcgtcgtgtggcgatgcatggcatgtgttgacatgtacaacccagagcaccatcatcagcaccagccagcgccgccgtccttcatggcgccgcggatgtccttctccagcgacttcgcggtggagccgccgcccccggccgcggcgcgcgggggcggggacgccgacttcgaattctccgtcggcagccacccgatgatggccgccgaccagctcttctccaagggccgcctcctgccgctccgggaggcgccgcagcaggccgccggcgggaggcccgtgactctgcgcgacgagctgcgcgccgacgagcgccacggccgcgccccccgcgcgaccaacatccggtggaaggagctgctcgggctcaagaaggcgcccaagaagcagcaggccgccgccgccgccgccgaagctgccgccggcgcgtccaccgacgcccacatggtaggtcactaacgctagctagaagctcgggtgtatatacatcttcgtgttcacttatttcctcgcatcactcagtccatccaagtgcccatctgggtatataactatatatatagtgcattgttccgcacttc

SEQ ID NO: 143839 - DNA, 918 bp, Zea Mays
atagccatggacacaccgcagtcacgcgcacgtccacctcaacagtccaagccaagcccaccttcggctcccccaccgctgcccttctccgccaccacctccccctcccacggcttctcatccccctctcccttcggcggccacctgcgcccgctctccatgtcccgcacccccgtcggccgcgtcggcagcgacctcagccacgccagagcgaaccatcatcacgccactacgagcgacggcaccagcagcaaggacagggacagtagggccaagagcaaggcctcgcctttcttctctggcctcggcggcgcgtggaggaagcaggccgaggagaagaggaagggaaggcccaagcccaggagagcggcgctggacgtgggccagtgggtgaagcgacacatggcatccatggtggagcagctgcgtgcctccttctcccggcactcggagcgggagcagcggcgccgtccgcactcgttctcgggccacggcccgggcgccgccagggagatgagggagcgggagcactggaggcggcggcgcgggcagctgtcgtccgcgccggcgtcgctgcgcgtgtcgcctgcgaacagcgggcacctctccgttggcggctcggtcaaggtgtccacgtcgtcggaggagagcaccatggaggagctgcagagcgccatcgaggccgccatcgcgcactgcaagaattccatctccgtggccaagcagacggcgccgaccggggacgacggcaccaagcttcagtaaaccagagtagttggtaggggtgctggctgcacttatggattcttaatttgatcgaaatttcagaagcccagtcgtttggttcgatctcacacaggcgcatgtaaattaagatgcatgtaagaagagatatataagagcgatatatatacatat

SEQ ID NO: 143840 - DNA, 1818 bp, Zea Mays
aaagtccacaaaaacaccctgacctcgtctctcctcccgatcaagctggtttgggttgtgctcacgcacgaaccgccataacaacccgcgaacttttttctcgctgcgtgattctattcttcagggtttgcttgcgtacgccgcggcgagtcgctagccgtctcaaaaagcagaaggagtcctcctccctggtcacatctgactgaggagggccgagggtttttagaggaaggaacccgtccgcgaccgatggcgatggcgttgtcgccggggacggtgcctttgggagtgctgctgcggcgggaggtcaccaaggagcggatggagcggccggacgtgctgtgcggcgaggccaacctcagccgcaagggcgaggacttcacgctgctccgcgccgacgcaggccagcgcatccccggcgacccgtccacctccttctccgtcttcgcgatttttgatgggcacaacggatcaggagctgccatatacgcaagggagaatctgttgaaaaacgtcttgcgtgccattcctacatgtttctgcagggaggagtggcttgccgtgctcccacgtgcgcttgttgcagcgttcgtcaagactgataaagattttcaggcagtggatgaaacttctggcacaactgtgacatttgtgataatagacgagtgggttgtgactgtagcatctgtcggtgattcacgttgcatactagaatctgccgatggctcaatctactttttatcagctgatcatcgctttgactccaacccagatgaggtcaagcgcgtgacagcatgtgggagcaaagttgggaaaatggatattgtcggtggaccagaggttggtcctctaagatgttggccaggtggtttgtgtctatctagatccataggggatcttgatgttggtgaatgcatcattgctgttcctcatgttaagcaagtgaagctttctaatgctggaggcagaattatcattgcaagcgatggtgtgtgggatgatttgacttgtgaaatggctcttgattgttcccgtgggttctcatcagatgtagctgccaatcgaattgttaatgaagcaacccggcctcgtggaatcagggatgatactacttgcatcgtaatcgacattctaccaccagaaaatatagtcccgagtcctcgtaagagaccccgcaggattacattcaataatgtgtttcgcaaaagacatctagacgtcccccccgaaacaaatagatcagaatatgctgaaccggatgtggtggaagaaatatttgaagatggctctccgatgctttctaaaaggctaactaccggatatacacttgagaaaacttttgcaccctccagttgtgcagtttgtctggtacggttgaaatctggacagggaatttcagtgcatgataacccattgcaatatgagaaactacaaggttggcagggtcctttcctgtgcccgagctgtcatgaaaagaaagaagcaatggaagggaaacgccggccaaaaggatcttcatcaaacgtctttggtcacatgtgctaggcctgcctaccactaaagattcttttattgattgttagctggaaataatagtcagcccataacaattcattggctagaattgaccgtttcagttgagtaagacggaatattcttgacaaacagcctggagatttattcatcagtttgagtagagcataggaaaacccatcttattttttcgaaggactacggctgtgtccgcatctaggcatttcactgtacagactcttgcttgtatagagatcttctaaatgatcattagtcttcctgtaa

SEQ ID NO: 143841 - DNA, 186 bp, Zea Mays
atgaaggaggaggaagttgagggcgagggccaggagaaggatgtcgacgatgaagagattgaagtcatcactaccggtgttggagctgaggacgaggaggacgtcagtgtcgttactgccgctgaagttataattcatatgatatatggttcatatgatgactacaaattgttagatagtttgtga

SEQ ID NO: 143842 - DNA, 678 bp, Zea Mays
gcctgtaagaatgactgcatcctgttccatgataacagtaaataagctgtaactgaatgtccccggtatgaaacctcacgtcagatgaagaagaaataagggtgaggacgacgaaaagactgagtcctagaggaagataccactgcttcgacaacactatcgctatacagccggtagaagctctacaaaaactgccttttaattgatagttagatctcgtacttgatttcctgacctctcgatttgcacataattatttgacttgggccgggctggcccccatccaatgctgtactactgcagcagaccacagacaagtgtgcggaggagtgagtggtcgtcccctcaggcattcaagcaacgctgcagtgcagtgcagctgccaccgctttggaacgcccttttccttttggtcatttcggttggcaagtcgtcgggtaaagctacccaaccgtgtgctcctccatctgcactttgttccgtctctgcttttacatgtcggagcgctggtgcagcggttcaaagtggtcttcatctcatccaaatcgaacgaagaacttcacgaacttttctaggaagaaaaacgtggagtgaatcgggactagatagaaacaccatctactgaaagtctcaatgaagatcgagtgagatctctctgagtagaggccaaaagaaaaa

SEQ ID NO: 143843 - DNA, 1647 bp, Zea Mays
cccagccctgtcggctcggctgcctccgcctccgctccgcgccgcgcatataaccggaccccagttccgtgacggcctcagtcagtccccgaggaggaggaacagctagccatggtggcctcgcggatcttgctcccgctgctgctctccctcttcctatgctcgcattgctgtaccggagcggcggcggcgaagcggcagctgctgcaggcgcagtcgcaggtgaagttcgacttctccccgttcctgatcgagtacaagaacgggcgcgtgaagcggctgatgggcaccaacgtggtgtccgcgtcgtcggacgcgctgacgggcgtcacctcccgcgacgtgaccatcgacgcttcgacgggcgtcgccgcgcggctctacctcccgagcttccgcgccagcgcccgggtgcccgtgctcgtctacttccacggcggcgcgttcgtggtggagtcggcgttcacgcccatctaccacgcctacctcaacacgctggccgccagggcgggcgtggtggccgtgtcggtgaactaccggctggcgccggagcacccgctcccggcggcgtacgacgactcctgggcggcgctcaggtgggtgctggcgagcgcggccgggtcggacccgtggctggcccagtacggcgacctgttccgcctgttcctggccggcgacagcgccggcggcaacatcgcgcacaacctggcactgcgcgcgggggaggaaggcctggacggcggcgcgcggatcaagggcgtggcgctgctggacccctacttccagggccggagccccgtgggcgccgagtccgcggacccggcgtacctccagtccgcggcgcgcacctggagcttcatctgcgcggggaggtacccgatcaaccacccctacgcggacccgctcctgctgccggcctcctcgtggcagcacctcggcgcctcccgcgtgctggtcaccgtgtcggggcaggaccgcctcagcccctggcagcgcgggtactacgccgcgctccagggcagcggctggcccggcgaggccgagctgtacgagacccccggcgagggccacgtctacttcctcaccaagcttggctcgccgcaggcgctcgccgagatggccaagctcgtcgccttcattaaccgcgactagcagccgccggagtaaatccggtacatgcaggccgctgcagtgccgcgacaacatcagcatacctatagtaactagcgagagcgaggtgattggtagtggtaattacatttttttttgggtccttgatgatgattactgtgcgtcggaagaaaagaacggttcctctctccagaaacctcgtccggacggataggaggggaccggtgtgttcgcttgcgcggcgttgcgtgtcattgactgcagtctacaggctaccgtgccgtgcactgttaactgcgtgtagcgcggtactgccagactgccagttacagtagtcttcagagtataatattttttagtatagaagcgtcactctactaccgacccaatgcatcgtgtaacttttgtggtactagtgctatatggtggtgattttgtcggagtggtcatttttttcccctgtggcaatcacatgcgccggccaccgcggtccgcggcggagaatgtgtgtctcgt

SEQ ID NO: 143844 - DNA, 1127 bp, Zea Mays
cgaaagcccaccaccacgatccgcgccacaaaatagtgcggtgcgcccagccctgtcggctcggctgcctccgcctccgctccgcgccgcgcatataaccggaccccagttccgtgacggcctcagtcagtccccgaggaggaggaacagctaggtgcggaaaggcagctctcagtctcacactctgccaatcccagcctgagttctgctctgctctgcttctagccatggtggcctcgcggatcttgctcccgctgctgctctccctcttcctatgctcgcattgctgtaccggagcggcggcggcgaagcggcagctgctgcaggcgcagtcgcaggtgaagttcgacttctccccgttcctgatcgagtacaagaacgggcgcgtgaagcggctgatgggcaccaacgtggtgtccgcgtcgtcggacgcgctgacgggcgtcacctcccgcgacgtgaccatcgacgcttcgacgggcgtcgccgcgcggctctacctcccgagcttccgcgccagcgcccgggtgcccgtgctcgtctacttccacggcggcgcgttcgtggtggagtcggcgttcacgcccatctaccacgcctacctcaacacgctggccgccagggcgggcgtggtggccgtgtcggtgaactaccggctggcgccggagcacccgctcccggcggcgtacgacgactcctgggcggcgctcaggtgggtgctggcgagcgcggccgggtcggacccgtggctggcccagtacggcgacctgttccgcctgttcctggccggcgacagcgccggcggcaacatcgcgcacaacctggcactgcgcgcgggggaggaaggcctggacggcggcgcgcggatcaagggcgtggcgctgctggacccctacttccagggccggagccccgtgggcgccgagtccgcggacccggcgtacctccagtccgcggcgcgcacctggagcttcatctgcgcggggaggtacccgatcaaccacccctacgcggacccgctcctgctgccggcctcctcgtggcagcacctcggcgcctcccgcgtgctggtcaccgtgtcggggcaggaccgcctcagcccctggcagcgcgggtactacgccgcg

SEQ ID NO: 143845 - DNA, 1171 bp, Zea Mays
agaataggataggatagcccctgttcttctagcctgctagtctgctacactccacgtctctacctctaccgcacattttgctacgctccagctccatcgactatcgagtgcttgctggacgccggggccgggcaatggatccgggcagcgcggagatcgttttcgactgcgatttcttccggatatacagcgacggtcgcgtcgagcgtttcgccggcatggaaaccgtgcccgcgggcttcgacgccgacaccggcgtcacctcaaaagacgtggtcgtcgacgccgccaccggcatcgcgacgcggctctacctgccagccatccctacggccccgtcatctccccagtcggacggcaacggcaacggcaacggcagcgccacggcgaagcttcccatcctcgtcatcttccacggcggcggcttcgtcatcggctcaccggctgatcctggtttccaccgctacatgaactcgctggtcgctagcgcccgcgtcgtcgctgtctccgtcggctaccgcctcgcgcccgaaaacccgctccctgcagcctacgaggactcctggaccgcgctcaactgggctgtttccggcgcggacccgtggctgtccgcccacggtgacctcggccgcgtcttcgtggccggttacagcgccgggtcgaacatcgcccacaacatggccatcgccgcgggcgtcagaggcttgcgcgccgcggaaccaccacgagtagaaggcgtgatcctgctccacccttcgtttgccggtgaacagaggatggaagaagaggatgacagattctggcaagttaataagaggaggtggaaggccatcttccccggtgcgagagacgggctggacgatccgagaatcaacccggtcgtcgctggcgcgccgagcttggcgaagctggtgggcgagcggctgctcgtgtgcacggcgtcggaggacccgagggcaccgaggggccgggcatactgcgaggcggtgagggccagctgttggccgggaaaggtggagagcttcgaatcacaaaacgagggacacgggttcttcgtttccggccacggcagcacccaggccattgcgctgatggatcgagtggttggtttcattgttggccattaacttcgattgttcaaaataaatgaaattaagggttgtttgctata

SEQ ID NO: 143846 - DNA, 99 bp, Zea Mays
acatataatcgtatatacatatgtacaatctatattcaatattaaaaacacatgagcatgatgttctactgcttaaacggcttcacctagtttctcccg

SEQ ID NO: 143847 - DNA, 676 bp, Zea Mays
cggctggcggccgccgctcacgaagtcacgagcatcgcagcaggctgcaggcgtgaatggtggcgctacagctcatgggtgaagaagacaatggacgggacatcgaagaactcgaccgccggccaccggaccgcgggagcgtcaaagatctcacgcggcggccatcggatctcgagcacagcaagggcatcgacagccaagggccttctcgtcttcgtaccttgccagatccatcgattgttgcggcatctcgtccaccagctgctgcacccaagcttgtccaacagcgtgttaccaagacgaagaaagataacagtcgtccccctatttcttcaactacaacaatcagtggtgctgcacctagccgccggccccttatttctcaatctcgtactcctgctcatcctggtcgtaaacttgtccaatcaattgtgaagttgaacgttaagcttgtagctaaagcaagtctgtccattcaacaagtcaagtgatgccatgctgttagcagcttaggacttcagtcatctatcttttgactatttaccaaccttttgggtcttaatgtcatagaaggcttaacaacctatgatgaccatgtaataaaacatataatgctatattcggtactatcatagtgttgccactttatgcaattacctatggtgatgttgaatgg

SEQ ID NO: 143848 - DNA, 1464 bp, Zea Mays
atgaggagcatctccgcctgcttcttcttcgttcttctcatcgtctgcttgttgggatcgcacgcaaattcgtcgcaggaggctaggctaagagaatttatcctgtccagaaggagcagtggcagcgcgttcagcgcacacgacgagtcggcctccacggccactagccgcctcagatcagagtactccggtacggaccagagcgcgcagaaggcggccgacaagatcacagagctgcccgggcagccgggcggcgtcggcttcgaccagtacagcgggtacgtgaccgtcgacgaggagagcggccgtgcgctcttctactacttcgtggaagcggcgcacgacgccccggcaaagccgttgctcctgtggcttaacggaggccctggttgctcgtcggtaggctatggagcaatgatagaaatcggcccgttccgcataaccagcgacaacaaaaccctgagcagaaacgagaacgcctggaacagcgaggccaacgtgctgttcctggagtcacctgccggtgttggattctcctactccaacacgtcttcagactatggcaagagcggtgaccaaaggaccgcggacgatgcattcgttttcctcatcaattggctcgagaggttccctgagtacaaagcacgcgccttttacatctccggggagagctatgccggacactacgttccgcagctcgcaacagccatccttagtcacagtataaagagtgaaagcggcatcataaaccttcgggctatattggttggcaatgcgtacctggacgacaacaagaacacgaagggacagattgactacttgtggagccacggagtgatatcagatgaggtgtgggccaacattacaaagaactgcaagttcagtcttgcggacggtgacgcgtgctccgatgccatggcagcatatgattctgggtatattagtggatacaatatatatgctcctgtttgcatcgaccaacccaatggaaactactaccccagcagcaatgttccgggaattgacccatgcagcaactactacattcaggcttacatgaacaatcccttggtgcagatggctttccacgcaagaacgacagagtggtcaggctgcacaaacttgcactggaaagatgctccagtgtccatgacgccgaccatcaaatggcttctgggacttggcctaccggtgtggctatacagtggagactttgatgccgtctgcccactcaccgccacaaggtactccatcgctgacctcgagctctcggtcatggagccatggcgcccgtggacagcaaccagagaggttggaggctatgttcagcagtacacgggaggtcttgtgcttatttcagtgaggggagctggtcatcaagttccttatttccggcctgagagagcactggtgctgctcagatccttcttgaaaggaacgctcccaccttatgtagtggactag

SEQ ID NO: 143849 - DNA, 2017 bp, Zea Mays
ctttattttggtgtgctcagtgctcacgtttctgagttctgtttacaccctcgcagctagctgggatcttctccctgcactgcacctgcaaagatgaggaggagcaacaccaccaccttcgtcctcctctccgtcgcaatcctactgcagggcacgtcccacgtcgttgcttcgtcgcaggaggctcagctcagcaagctcatggcgtccggaagaagcaggctcaggctcagcctcagcccaaacgggcctgccgagaccgacacatgctcagactccggcacctacgcgccactgcccgagcgctgcaagcgcccgccgagcggtgggaaggaggcggacaggatcaaggagctgcccggccagccgccgcgcgccaggttcggccagtactccgggtacgtgacggtgaacgaggagcgcggtcgcgagctcttctactacttcgtcgagtctcccgccgacgcggcctccaagccgctcatcctgtggctcaatggagggccggggtgctcgtcgctgggatacggggcgatgatggagctcggcccgttccgtgtcaaccccgacggcgagacgctgagcgagaacaagcacgcctggaacagtctgtgcagtggcaaacgtgatcttcctggagtcgccggcgggcgtcgggttctccttctcgagggacgccgccgactacaagaccgccggcgacaggaggaccgccgaggacacgtacatcttcctggtgaattggctggagaggttccccgactacaagggccgcgagctgtacgtggcgggggagagctacggcggccacttcgtcccgcaggccgccaccgtcgtcacgctgatgaaccgccgcctccccgcccggcagacgcccatcaacctccgcggcatcttccttggcaacccgttgctggatctgtacctttacgagaaggggaagctggagttcatgtggagccacggcgtgatctccgacgaggtgtgggcgagcaccctccacaactgcagcttcctccacgacctgtgctcctccaacgcatcggagcacacgttcgagggagggaggatggactgcttcaacctctacgctccggtctgcctccagtcgcccaacggaacctactactccagcagccacttacctggctacgatccgtgcagcgaccattacgtcagatcttacctcaatagcgtcgaggtgcaagaggccctgcacgctcggatcagaaactggtcagcctgcatgccgaacttggtctggaacgattcccctgctttcatggtgccaaccatcagatacctggtcgattgtgggctcagagtatggatctatagtggcgatttcgattccatatgctcgcttaccgcgacaaggtactccgtcaaggatctcaatctagcagtcaccaaaaagtggggtccctggtacacccctaacggcgaggttggaggctttgttcagcagtaccaaggaggtttcacgctggcgtcggtgagggcggctggtcatatggtccctacgttccagccggagagagcacttgttctgctcagggctttcctgagaaacacgctcccgccggctgacatcgtcacgaactgaagaacgtgcactccgtcagtccgtcgtcgggatagttgtctccatccacgaccatctgccattggggaaaacttccgccgccggacatcatctcccgcgtcctcgggttgtcgcggcgagttgcggcctgcagatccgatgtagctctccttcccgaattcgttgcgtcgacgctgccgtcgcaacctccaacaccgacgacgacgacgatggatctcccgccgcagcctcccgccttgcctccacgaagaaaaggccgcgcgagggcggaaagcaaaaaatagggaaacaacggcagtatgttggagaggagatgacgcccttttctaaaaaaaaaaacgttttgtggttgttttatcagctgtcttggaattgttcaaaggacaatgataaagtacaaaactgttcagg

SEQ ID NO: 143850 - DNA, 1772 bp, Zea Mays
ctttattttggtgtgctcagtgctcacgtttctgagttctgtttacaccctcgcagctagctgggatcttctccctgcactgcacctgcaaagatgaggaggagcaacaccaccaccttcgtcctcctctccgtcgcaatcctactgcagggcacgtcccacgtcgttgcttcgtcgcaggaggctcagctcagcaagctcatggcgtccggaagaagcaggctcaggctcagcctcagcccaaacgggcctgccgagaccgacacatgctcagactccggcacctacgcgccactgcccgagcgctgcaagcgcccgccgagcggtgggaaggaggcggacaggatcaaggagctgcccggccagccgccgcgcgccaggttcggccagtactccgggtacgtgacggtgaacgaggagcgcggtcgcgagctcttctactacttcgtcgagtctcccgccgacgcggcctccaagccgctcatcctgtggctcaatggagggccggggtgctcgtcgctgggatacggggcgatgatggagctcggcccgttccgtgtcaaccccgacggcgagacgctgagcgagaacaagcacgcctggaacagtctggcaaacgtgatcttcctggagtcgccggcgggcgtcgggttctccttctcgagggacgccgccgactacaagaccgccggcgacaggaggaccgccgaggacacgtacatcttcctggtgaattggctggagaggttccccgactacaagggccgcgagctgtacgtggcgggggagagctacggcggccacttcgtcccgcaggccgccaccgtcgtcacgctgatgaaccgccgcctccccgcccggcagacgcccatcaacctccgcggcatcttccttggcaacccgttgctggatctgtacctttacgagaaggggaagctggagttcatgtggagccacggcgtgatctccgacgaggtgtgggcgagcaccctccacaactgcagcttcctccacgacctgtgctcctccaacgcatcggagcacacgttcgagggagggaggatggactgcttcaacctctacgctccggtctgcctccagtcgcccaacggaacctactactccagcagccacttacctggctacgatccgtgcagcgaccattacgtcagatcttacctcaatagcgtcgaggtgcaagaggccctgcacgctcggatcagaaactggtcagcctgcatgccgaacttggtctggaacgattcccctgctttcatggtgccaaccatcagatacctggtcgattgtgggctcagagtatggatctatagtggcgatttcgattccatatgctcgcttaccgcgacaaggtactccgtcaaggatctcaatctagcagtcaccaaaaagtggggtccctggtacacccctaacggcgaggttggaggctttgttcagcagtaccaaggaggtttcacgctggcgtcggtgagggcggctggtcatatggtccctacgttccagccggagagagcacttgttctgctcagggctttcctgagaaacacgctcccgccggctgacatcgtcacgaactgaagaacgtacgaaagccttcacattttccactttgtgaacaagggcgttgtggtcgaagtcttcagtgtctagctctacctattccaacactagcatagacgtacagtgtacatttgttcggaacagcactcgttgacaatcaaaaaatcgagaggtagtgccgttcatcaggt

SEQ ID NO: 143851 - DNA, 1787 bp, Zea Mays
ctttattttggtgtgctcagtgctcacgtttctgagttctgtttacaccctcgcagctagctgggatcttctccctgcactgcacctgcaaagatgaggaggagcaacaccaccaccttcgtcctcctctccgtcgcaatcctactgcagggcacgtcccacgtcgttgcttcgtcgcaggaggctcagctcagcaagctcatggcgtccggaagaagcaggctcaggctcagcctcagcccaaacgggcctgccgagaccgacacatgctcagactccggcacctacgcgccactgcccgagcgctgcaagcgcccgccgagcggtgggaaggaggcggacaggatcaaggagctgcccggccagccgccgcgcgccaggttcggccagtactccgggtacgtgacggtgaacgaggagcgcggtcgcgagctcttctactacttcgtcgagtctcccgccgacgcggcctccaagccgctcatcctgtggctcaatggagttttttctggcgcagggccggggtgctcgtcgctgggatacggggcgatgatggagctcggcccgttccgtgtcaaccccgacggcgagacgctgagcgagaacaagcacgcctggaacagtctggcaaacgtgatcttcctggagtcgccggcgggcgtcgggttctccttctcgagggacgccgccgactacaagaccgccggcgacaggaggaccgccgaggacacgtacatcttcctggtgaattggctggagaggttccccgactacaagggccgcgagctgtacgtggcgggggagagctacggcggccacttcgtcccgcaggccgccaccgtcgtcacgctgatgaaccgccgcctccccgcccggcagacgcccatcaacctccgcggcatcttccttggcaacccgttgctggatctgtacctttacgagaaggggaagctggagttcatgtggagccacggcgtgatctccgacgaggtgtgggcgagcaccctccacaactgcagcttcctccacgacctgtgctcctccaacgcatcggagcacacgttcgagggagggaggatggactgcttcaacctctacgctccggtctgcctccagtcgcccaacggaacctactactccagcagccacttacctggctacgatccgtgcagcgaccattacgtcagatcttacctcaatagcgtcgaggtgcaagaggccctgcacgctcggatcagaaactggtcagcctgcatgccgaacttggtctggaacgattcccctgctttcatggtgccaaccatcagatacctggtcgattgtgggctcagagtatggatctatagtggcgatttcgattccatatgctcgcttaccgcgacaaggtactccgtcaaggatctcaatctagcagtcaccaaaaagtggggtccctggtacacccctaacggcgaggttggaggctttgttcagcagtaccaaggaggtttcacgctggcgtcggtgagggcggctggtcatatggtccctacgttccagccggagagagcacttgttctgctcagggctttcctgagaaacacgctcccgccggctgacatcgtcacgaactgaagaacgtacgaaagccttcacattttccactttgtgaacaagggcgttgtggtcgaagtcttcagtgtctagctctacctattccaacactagcatagacgtacagtgtacatttgttcggaacagcactcgttgacaatcaaaaaatcgagaggtagtgccgttcatcaggt

SEQ ID NO: 143852 - DNA, 1188 bp, Zea Mays
aagcaactgtgcatctacattatattatttttttcctcaagaacacatgaagcttgagcattttttctttgtacatagaaatcaaccgaatgaagtaccgctctctttcatatataataatgttcttgctactccgctaagaacaatatgcaccccggatttgatctcagcacgattcacaaaatcaattatctaacatggagatatacatcagttagattacaaactcgatctatggacagtttcatagaacacatctgctgtgtgcaacaaggcacaagggtgtgtgtaaaaaacaatatagcaccctattatatttatatatatttatgctgtagcagtaataatatgacggtttattcatttcatccttactaggaaaatgctcagctccggcgcgccgccggcgcctccaccgcccccgttattatcggcgccgttcccgccctcctcggggttgatcatgtagaaggcctccgagtccttggatccgacgacgcgctcgacgcgggcgcgcacgtacgtgagctccccgtcgggccccgcgggcacgccgccctccttctcgggggcggccgggagcacgccggcgcccatggacacgccgcgcaggaggcgcagcacgtggcgctcgtcgtcggaggcctccttcctgcggatggagtatccggccttgcggccgttgcagtagacggcccagacgtactcctccacgaggcggcggcgcgcgctgcgggtgtcgctctccagcgccagcttgagcgccccggacgagatctcccggtgcagcgcgctcgtcagcatgggcagctcgatgaggaacagcggcggcgcgcgcgtgtcctcgtggatggccaggctcacgcggccccggcgcggcccgaacagcgtcaccgtcgtcgcgtggtcggccagcagcgcccggttgttgtgcttgcccagcagcgccaccatcttgcacccggacgagagcatgggcatgagcttgaacatcttgaagatgcccccgccgccgccgccgctgtccgagatcttggtccggcgcccgttggtggacggccggagcagcgcccggaaagtggggccgtcgatgaaagacggcattggagagggaggtcgatcgagctctggtgctgtggtgctggagctgcgcagcgcaggcgcagcacggtcttattacttttctct

SEQ ID NO: 143853 - DNA, 2401 bp, Zea Mays
tctcgtagttataatcttagatatggacatgtgtgaatgtgtcatatgctcttattgctatcttattataataagggtataaatctgtaagttaatacatatttggttatttaatttaatattaaaagtaagaacctagaacgatgatatgataataatattataaaggttttgggtgtgtagtgttaaacacttaaaatatgatttttcagttatatatatttatgtacatagatcttttatttagttgtgtagctcgcgagcctaacgagctgactcgagcttcctaacgagccgagtcgagccagatgtttagctcgttagtataacgagtcaagccgagctagcttattacagtaacgagacataagcctagccgcactcttcttctaatcaatcacaacacgacatatgcgtatgggcacaagcaagcaaatggcaaatccaatcattctattgtgatgggttgccagttgtcacgctatctctattatattactgcttggtccccgcggcaacggctccaacaactagggaaatcgacggtgaggatcgttccaccgcacatccaagccgacaacggcaacgccacccgcacgtcccgcgcggtccgtcggtcgcccccaggaaaccactgaagtttcagccccaaacagtccaatcacgctaattaattactttccccccaaaaaaaagccccccaccgcctcgacctcgattcctccgcccccatcgccgtcgtctcctcctccgcctccctgtctgtccgctccgcacctcccctaaaaaacccccccggccattgccgcaccgagctccccttcctcaaatgccccaggcccggacgcctcgacgcccagctccgtgctcgcatggctagcggcgtcctccatcgctccgcctccctatgtctccgcccggccgccggctcctccgccgactccggccggggccacggcgcggttatgatcggtgattcgaggacgcgcgttgctgctctgcggctgggaggatctagccggagagagttattatctgtcacaatggcctccagagatcacactggcttgacccgacaacttcttgattttcaacatgatacaatagatgaggtaggcgcaggacatgacccattcattgatttgaaagcgagattcatggactttaaacagagaaactatgtggaaaaattttcaaattaccaaacccttgctgagcagcaaacaccaaagttcatggtggttgcttgtgctgactccagggtctgccctaccgctgttttggggtttcagcctggggaagcatttacagttcgtaatgtggcaaatttggtaccaccatatgagcatggggggacagagactagtgcagcactagagtttgctgtcaataccctccaggtagaaaatgtactggtgataggccacagtaggtgtgggggcatccaggcactaatgagcatgaaagatgattcgacctccggaagcttcattaaaaactgggtttcaattgggaagagcgcaaggttaagcacgaaagctgcagctggaaatatgagttttgacatacagtgcaaacattgtgaaaaggaatcaataaatagttctctgttgaacttgttaacatacccatggattgagaagagggtgaatgaaggcactttgaatcttcatggaggctactacaacttcgtcgattgcacatttgagaaatggacattgttgtaccgtgaagggttggaaggtggaagcaagtatgccataaagaaccggtccacctggtgttgaccaacgaaggtcgtgtttacttgggtaaatttcactctgccccccgctgttcagcatggtttcgctttgccactacgttgtccatttcccattgcacctttgctccattgtggcatcgatgttctccgggtcccggtatcaaataactgtggcaaggctgttggcatgccagcttgaactgcgtgttgtagtgtcgcatacacatgcgcaggcacgtctgcatcgtagcagttatttgatacaggaactttttgatactgtagaagcacaataccacaatggagtgaggtgcaacgcgcgatggacaatatggttgcaaggtgaaagtctgtggaactgccgggggcaaagtgaattttatccaactatctgtaatatgtgtgctgttttccggttgaaactattaagaaaaaaataggaataagctgcaggatcggtcgtaatgcgtgtaattgtcgccacatttggcattaccttgctattgtaacatttgtaccatttgttgtatcattataactgagatatatacggtctcgtcaaatttgcttggtgacaatgttgtttgtttggaatggaagggtcggcaatggaaattccgtgatattctcacatgt

SEQ ID NO: 143854 - DNA, 1721 bp, Zea Mays
gttgtcttccctatagagccaatcgcaagccttgctgccatggaagttgggaggggagcacgtgcccaggtgcccgtccaggatccaccacaaccgccagtgccttttacaggtcatgccgcggacggcactgcttcgccttgctgcagcttcgacgcgcgcgtcctcggctcccgcggcgcggcggctgtactcgtcctcacactcacacggacacggcagcgaggagcacgcgatcactcgggaggatgagcagcttccaccgccgccccacgggccggaccccggcgtgcggcggctgcctcgtcgccgtggagagcatcggtgagcatggatagatagagagagttattatctgtcacaatggcctccagagatcacactggcttgacccgacaacttcttgattttcaacatgatacaatagatgaggtaggcgcaggacatgacccattcattgatttgaaagcgagattcatggactttaaacagagaaactatgtggaaaaattttcaaattaccaaacccttgctgagcagcaaacaccaaagttcatggtggttgcttgtgctgactccagggtctgccctaccgctgttttggggtttcagcctggggaagcatttacagttcgtaatgtggcaaatttggtaccaccatatgagcatggggggacagagactagtgcagcactagagtttgctgtcaataccctccaggtagaaaatgtactggtgataggccacagtaggtgtgggggcatccaggcactaatgagcatgaaagatgattcgacctccggaagcttcattaaaaactgggtttcaattgggaagagcgcaaggttaagcacgaaagctgcagctggaaatatgagttttgacatacagtgcaaacattgtgaaaaggaatcaataaatagttctctgttgaacttgttaacatacccatggattgagaagagggtgaatgaaggcactttgaatcttcatggaggctactacaacttcgtcgattgcacatttgagaaatggacattgttgtaccgtgaagggttggaaggtggaagcaagtatgccataaagaaccggtccacctggtgttgaccaacgaaggtcgtgtttacttgggtaaatttcactctgccccccgctgttcagcatggtttcgctttgccactacgttgtccatttcccattgcacctttgctccattgtggcatcgatgttctccgggtcccggtatcaaataactgtggcaaggctgttggcatgccagcttgaactgcgtgttgtagtgtcgcatacacatgcgcaggcacgtctgcatcgtagcagttatttgatacaggaactttttgatactgtagaagcacaataccacaatggagtgaggtgcaacgcgcgatggacaatatggttgcaaggtgaaagtctgtggaactgccgggggcaaagtgaattttatccaactatctgtaatatgtgtgctgttttccggttgaaactattaagaaaaaaataggaataagctgcaggatcggtcgtaatgcgtgtaattgtcgccacatttggcattaccttgctattgtaacatttgtaccatttgttgtatcattataactgagatatatacggtctcgtcaaatttgcttggtgacaatgttgtttgtttggaatggaagggtcggcaatggaaattccgtgatattctcacatgt

SEQ ID NO: 143855 - DNA, 1704 bp, Zea Mays
gttgtcttccctatagagccaatcgcaagccttgctgccatggaagttgggaggggagcacgtgcccaggtgcccgtccaggatccaccacaaccgccagtgccttttacaggtcatgccgcggacggcactgcttcgccttgctgcagcttcgacgcgcgcgtcctcggctcccgcggcgcggcggctgtactcgtcctcacactcacacggacacggcagcgaggagcacgcgatcactcgggaggatgagcagcttccaccgccgccccacgggccggaccccggcgtgcggcggctgcctcgtcgccgtggagagcatcggagagagttattatctgtcacaatggcctccagagatcacactggcttgacccgacaacttcttgattttcaacatgatacaatagatgaggtaggcgcaggacatgacccattcattgatttgaaagcgagattcatggactttaaacagagaaactatgtggaaaaattttcaaattaccaaacccttgctgagcagcaaacaccaaagttcatggtggttgcttgtgctgactccagggtctgccctaccgctgttttggggtttcagcctggggaagcatttacagttcgtaatgtggcaaatttggtaccaccatatgagcatggggggacagagactagtgcagcactagagtttgctgtcaataccctccaggtagaaaatgtactggtgataggccacagtaggtgtgggggcatccaggcactaatgagcatgaaagatgattcgacctccggaagcttcattaaaaactgggtttcaattgggaagagcgcaaggttaagcacgaaagctgcagctggaaatatgagttttgacatacagtgcaaacattgtgaaaaggaatcaataaatagttctctgttgaacttgttaacatacccatggattgagaagagggtgaatgaaggcactttgaatcttcatggaggctactacaacttcgtcgattgcacatttgagaaatggacattgttgtaccgtgaagggttggaaggtggaagcaagtatgccataaagaaccggtccacctggtgttgaccaacgaaggtcgtgtttacttgggtaaatttcactctgccccccgctgttcagcatggtttcgctttgccactacgttgtccatttcccattgcacctttgctccattgtggcatcgatgttctccgggtcccggtatcaaataactgtggcaaggctgttggcatgccagcttgaactgcgtgttgtagtgtcgcatacacatgcgcaggcacgtctgcatcgtagcagttatttgatacaggaactttttgatactgtagaagcacaataccacaatggagtgaggtgcaacgcgcgatggacaatatggttgcaaggtgaaagtctgtggaactgccgggggcaaagtgaattttatccaactatctgtaatatgtgtgctgttttccggttgaaactattaagaaaaaaataggaataagctgcaggatcggtcgtaatgcgtgtaattgtcgccacatttggcattaccttgctattgtaacatttgtaccatttgttgtatcattataactgagatatatacggtctcgtcaaatttgcttggtgacaatgttgtttgtttggaatggaagggtcggcaatggaaattccgtgatattctcacatgt

SEQ ID NO: 143856 - DNA, 465 bp, Zea Mays
atgagccaagggattatgaacatcagcagcaagggattaggagtggatcataggagccaagggattatgaacatcagcagcaagggattaggagtggtcagtgggattattcaatatgagtgggattatgaacatcagcagccaagggatcatatgagctgctccatataccaagcagtttatcacacattcactggatctggagggcgggctggcggtcgacgggcgacagcatacctgggtcctggagggcggagggaggacattcactggatctggagggcgggctggcggccgacgggcgacagcatacctgggtcctggagggcggagggaggactaaggagggaggagggggcccaacgggcggcagcatacctggagcctggagggcagccgacggcgtctggcgcgatggcggctcctggcctggagcgcgtgatggcggctgtctgggcgcgatag

SEQ ID NO: 143857 - DNA, 1530 bp, Zea Mays
ctctcccatcgctttcttatcccgcccccctaccgaagtccagagacctctctcatctcgcagctgccatcgccacttaccgccgcccgtgttcttcatatctccatctctcactatcgcggccacatctttccagcttgtaccgctcgattgctggtgttgtctctctttctagcgaccaagctcctcatgtcgcttggcaaaacagacatgagtcaggagcgcctgtaccaccaagaccgcatggacgtgccgcccgtccacttcagcacgccgccgccgccgccatgccagcagcagcagcagcacggcggacacggtgagcaacagaagctggagcgcttctccgatgaggttgatagccgcttgagcgccgagcagaaggagcccgccagtggtggggcactggtggtgtcggtgtcgggtggcggcgacggggcgagcatcgagttgtccaagaagcggaggggccgccccccggggtccaagaacaagccgaagccacccgtggtgatcacgcgggaggcggaacccgccgccgccatgcggccccacgtgatcgagatcccttgcggctgcgacgtggccgacgcgctcgcgcgcttcgcggcacggcggaacctcgggatctgcgtgctcgcgggcacgggcgccgtcgctaacgtgtcgctccgccatccgatgccctgcggcgggggcggcgccccgaccgccatcatgttgcacgggcagtacgagatcctctccatctccgccacgttccttccccccgccatctccgccgtggcgccgcaggccgccgccgccgccgcgtgcctctctatctcgctggctgggccgcacgggcagatcgtcggcggcgccgtggcgggcccgctgtacgccgcgtccaccgtcgtcgtcgtcgcggccgccttcacgaaccccaccttccaccgcctcccagcggacgacgacgcgtctgtctccgtctccgtctcgctctccgccggcagcggcgacccggcggacgagcaccgaggtggccaccagcaccccgtccccgtggagccgccgccgcgagagcgtcatcgccctcacgtcgtacgacgcaagcccgcgccgcaccttgcctccgcagcgccgtctgtggagccgtgcggcccaccggctgcacccatctacgccgcttgccacccgcagccgcaagacgtgatgtggccgccgccgaaccgcgcgccgcatccgccgccgccgccttactgagcgcgcgcccggtgatcacgcgtctaccactgcattcactacatgtaagcaggttagtgactcgacggtgcgcgctcccgcgctccatctacattgaccttagctgctcctagggtttaacactctctttgctcgttgttctacattacaacaagatcgcacactgctgctattggtttctttcaaactgctccgtagtatttgtaagttgtaacaagcagcgcgtgagtttttgtgatctttttcggtgattgaaatctaattaaccggactgggacagtgaaa

SEQ ID NO: 143858 - DNA, 1132 bp, Zea Mays
atggaggaagccaagaaaaatggtatccagcagctagctgaagaaacaactctggtgcagtttatatttgggggttatctgcgatctaagataaaatgtacgaagtgtcaggtcatttcaaaacacagtgagcgtattttggatttaactgttgaaatagatggggatatcagtacccttgatggtgcacttcgtcggtttacatcttcagaaattttagacggtgataataggtaccattgtagcagatgtaattcgtacgagcgtgcccaaaagaagttgactatattagaggccccaaatatattgacaattgcactgaaaagatatcaggtgaaacctgtgtctgtccaaaaagtcctgtcaagatgtgcatacatgctgctctatgcaagatgttcaccgcgtgccccaacctctgcacgcgctaagaaacccaagcagatggcacgttcaggatcattcccttcgggaggaggcaggtaccggagcaggcaccaaggtgggcaactgtctaaggacgatgcggtccacaaccttacatacacattgggtacatctgacacgtcatcgtacccggtagcaccctgctttagcggaagcaacagctcctcgctgttcagcagctctgatgcagggtcaagctgcactttcagcagcgacagcactgacagtgccgggaaatccagcatggagtatgaccgcatttttggaacctcgggctatatgtgcccggtggtaagctcagcggttgtgcccgagggagacaatcagagttacttgcggcaagggtctagctggaaccctagctcttcgggtcatgacatggatgaggcaggtaagtttgcgcggcagtaccagggagggtatcaggctggcggaggggctcccgtaggcggttgggagaccccatccttctcttacgccgatcaaggtaaatatcagggcagtagtagtcgtcgtaaccgtagtttcggtagtagctgtaaattaacacagcagcggaggagtacagggcgggcgtttttttatataaggtcgattagggagaggatacaagggggcttgggctcgggcttgggttcgtagagagattaattattcatcatgtatgattacgccattgcaattg

SEQ ID NO: 143859 - DNA, 681 bp, Zea Mays
atgccaggttctaacgatgtgccgccgggattaggaccacccaccacctccaccatcgccacaactattgatgcgagggctactgccatcggcccaatttcacaggcggacttcatggcattccaacaactaatggtgcagcagttcgccgccctcaccgccgccatcaatggcatgtccagcaagacactgcaaccaccgtcgccttcagcttctgccaccaccagtgctgctactttcccctatgacatgtcaggctatggtggctacccccttcccaccaccgccacgccatccactaccaccaccattgttcccttcccatctgccacgacaccccttccatcgccgatctccgtcttggtgccacctgcgtcaaccatgttcgtacccatccaccagattgccttcccacactccccatccccgatccacagcttccttgaggatgctctttcctgcacaccatcaccctaccgtgggcgctgtcaggtactcggggacagggtacccgaagtatgtggagcgaccgaccaagtccccgccgagcaagcttgcgaggcagagtggccgaccaagttccaggttcattacgtgaatattaccacgcccccccctgctagcagccctaaagcctggggacggcggcgcccagcgccagggtctgttcctacttcctaa

SEQ ID NO: 143860 - DNA, 657 bp, Zea Mays
gggcgagagggggggcgccccgtcgaaccctaaatccctcacccccattcctcaccgcgggcggcggcgcgcgcttgcggggcaaggctgctgctatgctcggcgaggatccactgaagtgaggttggactcagagagtccgaccttccggggatggaggtgcccaaggcggtggcgctcgtggccgccctggcgctcgtagcgctgggagcgctggccaccaggtggctgcagcgcatggaagcgcggaacgaggaggtacgccgcctcgcgttgctcgcggcggcggaagaggagaccatcgcgagggaggaggcctactactacgggcagtacggcgggtttgtgcgctcgtccgacttgccggaggcaccctcgctgtgggcggcgcaggaggtgcctcctgcgccgaaggaggtgatggctgaggcggcggcggcggcggcggcgacggtggcctcccctacggcggggaagggcgtctgtgcgatgtgctccaagccaacgacgctccggtgcaagcgatgcaagagtgtcaagtactgcaccttaaaatgtcagatagatcactggagaaatggccacaaagatcaatgccatcctctaggtcatggtgccacacaagatgatacacctgaaaatgttatggctggagta

SEQ ID NO: 143861 - DNA, 2292 bp, Zea Mays
ccaagcccagcgaggccaccagctgtccagctccacctcgtcgactcctccccgcacaagacaaaaaaaccctcgccttggagggtggaggcgcgtgagcccgacacccagagcgaaaaaagcaaggggtctgaccgccggcgatggcgtccatctccggagcggcggcggcgccatcttccgctgcgtgccggctgcggctgcgtaggcacatcctgctgcggccctcgcacctccgcctccgcgcgccccactccatcgccgacctctcccgctcctccagctcctctagttccgccccgacccgggcccagccgctgggctccaggccggagaacggcggcggcgtccgcgcggtggagaaggacccgatcaagctgtgggagcgctacgtcgagtggctctaccagcacaaggagctcggcctcttcgtcgacgtcagccggatggggttcacggaggacttcctgcgccagatggagccgcggatgcagcgggccttcgccgccatgcgggagctcgagaagggcgccatcgccaacccggacgaggctcgcatggtgggccactactggctccgcgacccggccctcgcgcccaactccttcctccgcagcaagatcgagaccacgctcgacaggatcctcgccttctcccaagatgtcgtctctggcaagattcaatccccatctggtcgtttcacttcaattctctctataggaattggagggtcagctttgggccctcaatttgttgctgaggcacttgcacctgataaccctccactgaagataagatttattgacaacaccgatcctgctgggattgatcatcaaattgctcaactaggacctgaactggcaactactcttgtaattgtcatttctaagagcggaggcacacctgaaacccgcaatggtctactagaagtacagaaagccttcagagatgcagggctgcaattctcgaaacagggtgttgcaattactcaagaaaattctctgttggataacactgctagaatagagggatggttagctcggtttcctatgtttgattgggttggtggtaggacttcagaaatgtcagctgtgggtttacttccagctgcattgcagggtattgatatcaaggaaatgctagctggtgcagctttaatggatgaggaaacccggaacactgtggttaaagaaaatccagcagcattgcttgcattatgttggtattgggcatcagaagggataggcaataaggatatggttgtacttccttacaaggatagtttgttgcttttgagtagatatttgcaacaacttgtcatggaatctcttgggaaagaatttgatctggatggcaaccgggtaaatcaagggctatctgtatatggaaacaaaggaagcactgaccagcacgcttacattcagcagctgagagaaggtgtacacaacttctttgttacttttatcgaggtcttgcgtgacaggcctgctggtcatgattgggagcttgaacctggagtcacatgtggtgactatttgtttgggatgttgcagggaacacgttctgctctttatgcaaatgaccgtgaatctatctctgttactgtgcaagaggtaactcctagagctgttggagcactggttgcactttatgaacgtgctgtggggctttatgcttctttggtaaatatcaatgcctatcatcaacctggtgttgaggctgggaaaaaggcagcaggagaagtgttggcccttcagaaaagggtgctgactgtattaaatgaggcaacctgcaaggacccttgtgagccattgactatagatgaaattgcagatcgctgccattgccctgaagatattgagatgatctacaaaatagtccagcacatggctgctaacgacagagcaatcatagcagaaggcagctgtggctctcctcgcagcgttaaggtgtacctcggtgaatgcaatgtagacgaagacttgcaggccgcgtaggttccgagcctggatccgtgtaaaattgttggaataaatcaggcgcaacaagatagcgatgcaatgcatgggtgttggcggatcctgctgtgcagtttgtttcttgtttggtgtttcttgcacgcgaatacgcgattgccgcaacgacgtattttagaatttgaatttttttggaacccttgaaaatacaaaataaagaagataaggtggtgtccgtcgtattttttgctttttaactacgctctttctggtttaaattcagaaaatagaacttatcttggtgccatcattattg

SEQ ID NO: 143862 - DNA, 2277 bp, Zea Mays
ccccaaataacaccaaggcaccaagcccagcgaggccaccagctgtccagctccacctcgtcgactcctccccgcacaagacaaaaaaaccctcgccttggagggtggaggcgcgtgagcccgacacccagagcgaaaaaagcaaggggtctgaccgccggcgatggcgtccatctccggagcggcggcggcgccatcttccgctgcgtgccggctgcggctgcgtaggcacatcctgctgcggccctcgcacctccgcctccgcgcgccccactccatcgccgacctctcccgctcctccagctcctctagttccgccccgacccgggcccagccgctgggctccaggccggagaacggcggcggcgtccgcgcggtggagaaggacccgatcaagctgtgggagcgctacgtcgagtggctctaccagcacaaggagctcggcctcttcgtcgacgtcagccggatggggttcacggaggacttcctgcgccagatggagccgcggatgcagcgggccttcgccgccatgcgggagctcgagaagggcgccatcgccaacccggacgaggctcgcatggtgggccactactggctccgcgacccggccctcgcgcccaactccttcctccgcagcaagatcgagaccacgctcgacaggatcctcgccttctcccaagatgtcgtctctggcaagattcaatccccatctggtcgtttcacttcaattctctctataggaattggagggtcagctttgggccctcaatttgttgctgaggcacttgcacctgataaccctccactgaagataagatttattgacaacaccgatcctgctgggattgatcatcaaattgctcaactaggacctgaactggcaactactcttgtaattgtcatttctaagagcggaggcacacctgaaacccgcaatggtctactagaagtacagaaagccttcagagatgcagggctgcaattctcgaaacagggtgttgcaattactcaagaaaattctctgttggataacactgctagaatagagggatggttagctcggtttcctatgtttgattgggttggtggtaggacttcagaaatgtcagctgtgggtttacttccagctgcattgcagggtattgatatcaaggaaatgctagctggtgcagctttaatggatgaggaaacccggaacactgtggttaaagaaaatccagcagcattgcttgcattatgttggtattgggcatcagaagggataggcaataaggatatggttgtacttccttacaaggatagtttgttgcttttgagtagatatttgcaacaacttgtcatggaatctcttgggaaagaatttgatctggatggcaaccgggtaaatcaagggctatctgtatatggaaacaaaggaagcactgaccagcacgcttacattcagcagctgagagaaggtgtacacaacttctttgttacttttatcgaggtcttgcgtgacaggcctgctggtcatgattgggagcttgaacctggagtcacatgtggtgactatttgtttgggatgttgcagggaacacgttctgctctttatgcaaatgaccgtgaatctatctctgttactgtgcaagaggtaactcctagagctgttggagcactggttgcactttatgaacgtgctgtggggctttatgcttctttggtaaatatcaatgcctatcatcaacctggtgttgaggctgggaaaaaggcagcaggagaagtgttggcccttcagaaaagggtgctgactgtattaaatgaggcaacctgcaaggacccttgtgagccattgactatagatgaaattgcagatcgctgccattgccctgaagataaacacaacgcttttcccccctctataacacatgcccaacgtttgcttcctcagattgagatgatctacaaaatagtccagcacatggctgctaacgacagagcaatcatagcagaaggcagctgtggctctcctcgcagcgttaaggtgtacctcggtgaatgcaatgtagacgaagacttgcaggccgcgtaggttccgagcctggatccgtgtaaaattgttggaataaatcaggcgcaacaagatagcgatgcaatgcatgggtgttggcggatcctgctgtgcagtttgtttcttgtttggtgtttcttgcacgcgaatacgcgattgccgcaacgacgtattttagaatttgaatttttttggaacccttgaaaatacaaaataaagaagataag

SEQ ID NO: 143863 - DNA, 684 bp, Zea Mays
atgtacacggtgggtgaaggccctgtcgatgtccacggcgcgctcttcgccggccacggtggcggcgacggccaaggcgatctccgagggcctgaaatccaagcagtgcgtccctctggcgatgcacaggatgagctccgcggatcggaggacggcgcgtctgctcggcgcggcgccgcctcggagccggtggaggaagtagtcgacgtacgacaagggggtgaccgcttgcatcctccacttgagcgtgctgaggaccaggagctccatcctctggatcgtcttcgcctcgaacacgtaccgcgcgtccccggcctgcaggtccagggacgaagggacgtaggtctcctccatcttggcggccagggacaagcacgccacggacagcagctgtgtcatccaagccttgccttccggaagctggtagagcgagaggaagcggtccaggtagttgacggccaagcaggcagtgagagggccgaaaccgtagcacgtgtgaaccttccaaatccagtcgatggcgtccgtccggacgcggagatccatccccccgctgcgcagcctctcggcgtagtcctcccgcggcatgtgcgctgcctcagactccaggaaaccggcgacgcattcctcggacggcacggggaactccgcgccgccgccgggctccccgctccgcgccagtag

SEQ ID NO: 143864 - DNA, 399 bp, Zea Mays
atgtcatacaaatccgcacacgcacaacacgatgcaaacactagcaccgcaacacacacagagagcgggtacacaatcgctctgttcgatcaatcagttctggcgagcacgtacaagacaacactgtccattgcattgaggtcctccatgtcacgcctgcaggttgcggaacccgctcagcgcttcctgcaggtgcgcaaccgcgccgtcgtagttgacgaagcccatgaaccagaactcgtgactgtccaccgacaccagctggatgaacttctccgcgggcttggtcttgttggccgacgggctcgccgcccgcagccgttgaagaggaatcgccacctgcggcgtcgtcagctcgactttgcagcacacgggagcgcgcgtgggtgggggctgtga

SEQ ID NO: 143865 - DNA, 1221 bp, Zea Mays
atggtgaccatcgccagtagtatggatttgagtaaagtcgtcacctcagtcgaatccggtcagggcggtatcctgggccatattggtttgatatttggcttcggtgttatgctcggtcgcttgctggccgatgcgggtggtcaacagcgaatagcgctgaccatgctgaattatttcgggaaaaataaacttgactgggcagtggtctgttcggcgtttattgtcggtatcgcactttttttcgaagtcggtttaattcttctggtacctattttattcgctattgcccgtgaagcaaaaatatcaccgatgtttatgtgtgtgccgatgctttctggtttgctggtcgcacacggttttttgccgccgcaccccggcccgactgttatcgccagggaatatggcgctgatgtaggattggtactgatatacggtatcattgtcggcattccaacctttattctttgcggcccggtattgaataaattctgccagcgcattattccggacgcctttaaaaaagaggggaatatagcctctctcggcgcgacccgccgattcagcgaaagcgaaatgccaggctttgggatcagttttctcacggcaatgctgccggtgatcctgatggcggttgtcaccatcatccagatgactcatgccaaaagtgccgcggattcaggcttattttacaacgtgatactgttcttaggtaattcaacgatcgccatgctgatttcactgctattcgcgatctataccatgggcctggggcgcgggaaaacaatccctgacctgatggattcttgcggaaaagctatcgcgggtattgccggtctgctgctgattatcggtggtggtggtgcattcaagcaagttctcatcgactctggcgttggtcagtatatttccaccctggtttcgggtatggatattaacccgatcctgatggcctggggcgtggccgcattcctgcgtatttgtctgggttcagccaccgtcgcggcgatctctaccgccggtctggtcatcccattgttggcagtacatcccaataccaacctggccttgattacgctggctaccggtgccggatcctgtatttgttctcacgttaacgatgccagtttctggatgattaaagacttttttggcctgaccaccaaagaaacgctgttatcctgggacgctgatgtccacactcttatccatcagtggggctga

SEQ ID NO: 143866 - DNA, 1550 bp, Zea Mays
aatccgctccgggcgtcatcgttgtatccaaagcgccgtgctagattccacacctagacaggacgccgcacacggcagccaccctcgtgtgcgtgactgcgtctcgcgcgggcaagagtgcgcaggcagagccatggacgtagaagcgcgtaagtccgacgcgccgcccgcgcgcggcaaggcgatgcaccgctttctcgtagcgctcaactgcgggatgctggcggtgggagccatcggcgggccgctcctgagccggctctacttcagcaagggcgggcaccggcagtggctgtccgcgtggctggagaccggcgggtggccgctgctggtgattcccgtggcggcgtcgttcgtggcccgccgcgcgcgcgacaggggcgccccggtcctgctcgcgccgccgcggatcctgctggccgccgcgggcctcggcgtggccacgggcgcggacgacttcatctacgccttcgggctcgcgtacctcccggtgtccacgtccgcgatcctgatctcgacgcagctggcgttcacggtgttcttcgcgttcctcgtggtgcggcagcgcctgacggccgcgtccgtgaacgccgtggcgctgctgacggtgggcgccgtggtgctgggcctgcacgtctcgtcggaccggcccccgggcgtcaccaggggccagtactggctgggcttcgtgctgacgctcggcgccgcggcgctctacggcctcgtcctgccgctcgtggagctcgcctacaggcgcgccgcgggcgccggcggccgcgccgtgacgtacgcgctggtggtggagatgcagctggtgatgggcttcttcgccaccgcgttctgcaccgtcggcatggtcgtcaacaaggatttccaggcgatcccgcgggaggcgaggcggtacaagcttggggaggcgcggtactacgcggtgctggcgtggtcggcggtgctgtggcagtgcttcttcctgggcgcggtgggcgtcatcttctgcgtgcacacgctgctggcgggcatcctcatcgcggtgttcatcccggtgacggaggtggcggccgtcatcttcctgcgcgagaggttcagtagcgagaaaggcgtggcgctggtgctctcgctctggggcctcgcgtcctactcctacggcgagtggagcgaggccagggccaagaagaggaagaccaggacggaggagggcgccgcagccgcggaggccctgcagcaggcgaacccgtgatgctgctgcggactttggcctggcctcttcgatcttccccgttgtgtgtatatcagtatatgttgtgattgtgatcgctgctgtgtgctacgtggatagcgtcctgaatcgtcgtcacctgcagctgtcgcttctggtgtgggtgctcttctgttcggcggtggacgttggccaatactgtgctgcatggtgtgtagatgtaccttggcagtaccacgttcggttcggacagtaagtctggaccggcgcactttgtgggccgatcccagtacaggactgatctaatctgaacgaatataaaaaaaagaagaaa

SEQ ID NO: 143867 - DNA, 333 bp, Zea Mays
atggccgcttggacaagaaaggccaccgccaaggccatggcgagctgcgtgacgacgggtgccgttcgtgacgacgatggtaacaagcagaggatcccgaaagggtacatccccctggtgctggttcgcgacggcgagggagaaggtggctcggagactaggatcctggtgcgcgtgagagacctcagggagccctgcatggcggtgctgctggagatggccgaggaacagttcgggtacgggcagcagggggtgctcaaggtcccttgcgacgcgcaacgctttcaccatgtggttgccatggcacgcaagtccaaggttgctagtgcataa

SEQ ID NO: 143868 - DNA, 1418 bp, Zea Mays
gaccaaattaacacataggcatagttcattaatcattagtttaattcataggtcatagacacctcacatatatataacatgttcatcaattattctataaatgatatgtatatagtttcgttttattagaatatggtagctcgtttagctcgcgagctggctcgttaacgaaccgagctggctcgttaacgaaccgagctaggatgtcagctcagctcgtaacaaaattcaaacgagccgagccgagctgaccacgaaacgagcgagccagcgagccacgagcattttgtccagccctagtttcatctactctgtttcacactatttgttaggtcctttagtgttcaattaactacagttgcactttcaaccacttccattttttcttgtttaaaacctgttatttgattttgttaacaactgctcagtcacttgactggtttgggctatctaatcactttactgaatttgaacaatgtctaagcagtgtgcgctccataatacatgctattaaattgttggtaacctgttatcaattgcattgagggcctgactgcctgaggcatctttgttgtccatgcacctttacatgtattgaatcaaacttcacgcactaggttgatggcaaggttgaatttgtattacttagtcactagggggtgtcgactctccagaaataaattctccctgatgcatattttttgcttctttgcagctgagataacattgtttgatggttatattgtcgtttacaagtttgtacatgaccttcacttttttgtcaccgctggagatgatgagaatgagctcatcttagcaagtgtactacatggtttttctgattctgttggtcttctactcaggggtgatgttgagaagcggactgcgcttgagaacttggatttgatacttctctgcattgatgaaattgtggatgggggaatcatcctggaaacagatgcaaacaccattgctggtaaggttgcaaccaatgctgttgatggttctgtgcccttttctgagcagacgatatctcaggcactagccacagctagggagcaccttgcaagatctctactgaaatgaacaaccagcaatatgtatgacatatatgtgtgttaaaggttgggctactgaatgttaagggtctttgtagtcgttattcatcccaaagtgctgctgtgacagagcctagttgaatatccgagggattggtcacatgctcgttattttttttgaaccagtgagtttgtagctgccatatttcaggtaaaacataaaataaagagttgtaattgggtgtaatataattttcaccatacaaaaaaaatcatctcaactatcaaaccatggtaaaaggttcaaaattatctatcaaatgattatccctccagaaaagcaaaatacaaagactcaag

SEQ ID NO: 143869 - DNA, 1301 bp, Zea Mays
gattagcaatcactgctgcgcccgataggtggcagcgagccagcgagccagcgacccacccgactctgttccaacgagccttccctcccaaacttgcacgctgcccccgcgctcgcctccgcccccgatccagatccaggtactcttcctttcgccgcggctgagaagcaactctccctctctgtcctcttcctgtcgccgcactcattttctcttgccggtaaggagtggagatccgcgtccatcttctattgattaggataccggtatggagtggagatccacacggcctttgtgttctataagtccatgtctcgcggatctgcttgctgcatgctccgctgctgctcgtgaaccttagttgatgagcttactatcttcctcttgtgtgaagggtggaatagggaacggccatacaccatggcggatttctccaaggaatcttgcccttctgtgaagaacattttacttctggattctgaaggaaagcgtgttgctgtaaagtatttctcagatgattggccgactaatgcatcaaagttagcctacgaaaagtctgtttttactaaaactctaaagacaaatgcacggacagaagctgagataacattgtttgatggttatattgtcgtttacaagtttgtacatgaccttcacttttttgtcaccgctggagatgatgagaatgagctcatcttagcaagtgtactacatggtttttctgattctgttggtcttctactcaggggtgatgttgagaagcggactgcgcttgagaacttggatttgatacttctctgcattgatgaaattgtggatgggggaatcatcctggaaacagatgcaaacaccattgctggtaaggttgcaaccaatgctgttgatggttctgtgcccttttctgagcagacgatatctcaggcactagccacagctagggagcaccttgcaagatctctactgaaatgaacaaccagcaatatgtatgacatatatgtgtgttaaaggttgggctactgaatgttaagggtctttgtagtcgttattcatcccaaagtgctgctgtgacagagcctagttgaatatccgagggattggtcacatgctcgttattttttttgaaccagtgagtttgtagctgccatatttcaggtaaaacataaaataaagagttgtaattgggtgtaatataattttcaccatacaaaaaaaatcatctcaactatcaaaccatggtaaaaggttcaaaattatctatcaaatgattatccctccagaaaagcaaaatacaaagactcaag

SEQ ID NO: 143870 - DNA, 1173 bp, Zea Mays
gattagcaatcactgctgcgcccgataggtggcagcgagccagcgagccagcgacccacccgactctgttccaacgagccttccctcccaaacttgcacgctgcccccgcgctcgcctccgcccccgatccagatccaggtactcttcctttcgccgcggctgagaagcaactctccctctctgtcctcttcctgtcgccgcactcattttctcttgccggtaaggagtggagatccgcgtccatcttctattgattaggataccgggtggaatagggaacggccatacaccatggcggatttctccaaggaatcttgcccttctgtgaagaacattttacttctggattctgaaggaaagcgtgttgctgtaaagtatttctcagatgattggccgactaatgcatcaaagttagcctacgaaaagtctgtttttactaaaactctaaagacaaatgcacggacagaagctgagataacattgtttgatggttatattgtcgtttacaagtttgtacatgaccttcacttttttgtcaccgctggagatgatgagaatgagctcatcttagcaagtgtactacatggtttttctgattctgttggtcttctactcaggggtgatgttgagaagcggactgcgcttgagaacttggatttgatacttctctgcattgatgaaattgtggatgggggaatcatcctggaaacagatgcaaacaccattgctggtaaggttgcaaccaatgctgttgatggttctgtgcccttttctgagcagacgatatctcaggcactagccacagctagggagcaccttgcaagatctctactgaaatgaacaaccagcaatatgtatgacatatatgtgtgttaaaggttgggctactgaatgttaagggtctttgtagtcgttattcatcccaaagtgctgctgtgacagagcctagttgaatatccgagggattggtcacatgctcgttattttttttgaaccagtgagtttgtagctgccatatttcaggtaaaacataaaataaagagttgtaattgggtgtaatataattttcaccatacaaaaaaaatcatctcaactatcaaaccatggtaaaaggttcaaaattatctatcaaatgattatccctccagaaaagcaaaatacaaagactcaag

SEQ ID NO: 143871 - DNA, 1127 bp, Zea Mays
gattagcaatcactgctgcgcccgataggtggcagcgagccagcgagccagcgacccacccgactctgttccaacgagccttccctcccaaacttgcacgctgcccccgcgctcgcctccgcccccgatccagatccaggtactcttcctttcgccgcggctgagaagcaactctccctctctgtcctcttcctgtcgccgcactcattttctcttgccgggtggaatagggaacggccatacaccatggcggatttctccaaggaatcttgcccttctgtgaagaacattttacttctggattctgaaggaaagcgtgttgctgtaaagtatttctcagatgattggccgactaatgcatcaaagttagcctacgaaaagtctgtttttactaaaactctaaagacaaatgcacggacagaagctgagataacattgtttgatggttatattgtcgtttacaagtttgtacatgaccttcacttttttgtcaccgctggagatgatgagaatgagctcatcttagcaagtgtactacatggtttttctgattctgttggtcttctactcaggggtgatgttgagaagcggactgcgcttgagaacttggatttgatacttctctgcattgatgaaattgtggatgggggaatcatcctggaaacagatgcaaacaccattgctggtaaggttgcaaccaatgctgttgatggttctgtgcccttttctgagcagacgatatctcaggcactagccacagctagggagcaccttgcaagatctctactgaaatgaacaaccagcaatatgtatgacatatatgtgtgttaaaggttgggctactgaatgttaagggtctttgtagtcgttattcatcccaaagtgctgctgtgacagagcctagttgaatatccgagggattggtcacatgctcgttattttttttgaaccagtgagtttgtagctgccatatttcaggtaaaacataaaataaagagttgtaattgggtgtaatataattttcaccatacaaaaaaaatcatctcaactatcaaaccatggtaaaaggttcaaaattatctatcaaatgattatccctccagaaaagcaaaatacaaagactcaag

SEQ ID NO: 143872 - DNA, 1065 bp, Zea Mays
gattagcaatcactgctgcgcccgataggtggcagcgagccagcgagccagcgacccacccgactctgttccaacgagccttccctcccaaacttgcacgctgcccccgcgctcgcctccgcccccgatccagatccagggtggaatagggaacggccatacaccatggcggatttctccaagtgatatgtctgtttcacaggaatcttgcccttctgtgaagaacattttacttctggattctgaaggaaagcgtgttgctgtaaagtatttctcagatgattggccgactaatgcatcaaagttagcctacgaaaagtctgtttttactaaaactctaaagacaaatgcacggacagaagctgagataacattgtttgatggttatattgtcgtttacaagtttgtacatgaccttcacttttttgtcaccgctggagatgatgagaatgagctcatcttagcaagtgtactacatggtttttctgattctgttggtcttctactcaggggtgatgttgagaagcggactgcgcttgagaacttggatttgatacttctctgcattgatgaaattgtggatgggggaatcatcctggaaacagatgcaaacaccattgctggtaaggttgcaaccaatgctgttgatggttctgtgcccttttctgagcagacgatatctcaggcactagccacagctagggagcaccttgcaagatctctactgaaatgaacaaccagcaatatgtatgacatatatgtgtgttaaaggttgggctactgaatgttaagggtctttgtagtcgttattcatcccaaagtgctgctgtgacagagcctagttgaatatccgagggattggtcacatgctcgttattttttttgaaccagtgagtttgtagctgccatatttcaggtaaaacataaaataaagagttgtaattgggtgtaatataattttcaccatacaaaaaaaatcatctcaactatcaaaccatggtaaaaggttcaaaattatctatcaaatgattatccctccagaaaagcaaaatacaaagactcaag

SEQ ID NO: 143873 - DNA, 1036 bp, Zea Mays
gattagcaatcactgctgcgcccgataggtggcagcgagccagcgagccagcgacccacccgactctgttccaacgagccttccctcccaaacttgcacgctgcccccgcgctcgcctccgcccccgatccagatccagggaacggccatacaccatggcggatttctccaaggaatcttgcccttctgtgaagaacattttacttctggattctgaaggaaagcgtgttgctgtaaagtatttctcagatgattggccgactaatgcatcaaagttagcctacgaaaagtctgtttttactaaaactctaaagacaaatgcacggacagaagctgagataacattgtttgatggttatattgtcgtttacaagtttgtacatgaccttcacttttttgtcaccgctggagatgatgagaatgagctcatcttagcaagtgtactacatggtttttctgattctgttggtcttctactcaggggtgatgttgagaagcggactgcgcttgagaacttggatttgatacttctctgcattgatgaaattgtggatgggggaatcatcctggaaacagatgcaaacaccattgctggtaaggttgcaaccaatgctgttgatggttctgtgcccttttctgagcagacgatatctcaggcactagccacagctagggagcaccttgcaagatctctactgaaatgaacaaccagcaatatgtatgacatatatgtgtgttaaaggttgggctactgaatgttaagggtctttgtagtcgttattcatcccaaagtgctgctgtgacagagcctagttgaatatccgagggattggtcacatgctcgttattttttttgaaccagtgagtttgtagctgccatatttcaggtaaaacataaaataaagagttgtaattgggtgtaatataattttcaccatacaaaaaaaatcatctcaactatcaaaccatggtaaaaggttcaaaattatctatcaaatgattatccctccagaaaagcaaaatacaaagactcaag

SEQ ID NO: 143874 - DNA, 889 bp, Zea Mays
cttgattagcaatcactgctgcgcccgataggtggcagcgagccagcgagccagcgacccacccgactctgttccaacgagccttccctcccaaacttgcacgctgcccccgcgctcgcctccgcccccgatccagatccagggtggaatagggaacggccatacaccatggcggatttctccaagctgagataacattgtttgatggttatattgtcgtttacaagtttgtacatgaccttcacttttttgtcaccgctggagatgatgagaatgagctcatcttagcaagtgtactacatggtttttctgattctgttggtcttctactcaggggtgatgttgagaagcggactgcgcttgagaacttggatttgatacttctctgcattgatgaaattgtggatgggggaatcatcctggaaacagatgcaaacaccattgctggtaaggttgcaaccaatgctgttgatggttctgtgcccttttctgagcagacgatatctcaggcactagccacagctagggagcaccttgcaagatctctactgaaatgaacaaccagcaatatgtatgacatatatgtgtgttaaaggttgggctactgaatgttaagggtctttgtagtcgttattcatcccaaagtgctgctgtgacagagcctagttgaatatccgagggattggtcacatgctcgttattttttttgaaccagtgagtttgtagctgccatatttcaggtaaaacataaaataaagagttgtaattgggtgtaatataattttcaccatacaaaaaaaatcatctcaactatcaaaccatggtaaaaggttcaaaattatctatcaaatgattatccctccagaaaagcaaaatacaaagactcaag

SEQ ID NO: 143875 - DNA, 1656 bp, Zea Mays
atcccctgatacacaacccaaaataattgactttcttgagtgagtagtcgatgttgggtatgaatgcatcagtatccaggaaagcagcaacgtttctcctgttgaccttgctactcaacgacaagcaatcttcgctagcaagcggtggacgaggacaggttgacgtttcttcgaaccatgcgctaaaccccagatcttttctactagtagtacgatctgaagaaccaagttgatcccgtcaaaccaatccgaggaacgagatcattcctcaagtcagttgctgcctgctgggcacgagaaaggaagccaggcaagctgccttcaaattcccaacctcttggcattggcagtggcagttgacgccctccccgtctcctcgatcagcgtccgaccgccatgggtggcctcaagctccggcggctggcatccaccttcctctccccaggccccgcatccccgggctccgcggccgacgcgcaccactcggtgtggcgcgcgacggctcaccaccctagcacggcgccgccgtccgcgcagcacatggacgcgctcctggccttcgggcggggctcgcgcctctccgccgcgtcgctcgccgcggcgctcgtggaccgcctgcgcgccgcggcttcggggcagggcgacgccgccgtggctctcaagtgcctcgtggcgctcagggtcctcctggcgcggggcgcgttcatcctccgcgaccagctcctcgccgcgctcgcccggcacccggcctccgggcgcaacccgctcgcgctgtcgtcgttcccgctcggccggtcctccttcgccgccgcgtcgtgggtccggttctccgcgcggctcctggagctcctcctcctgctcccggacgcctccgcctccgccgacgccgacgccgagtacctcaccgcgctccccaacccgcacctggtcgccgagctcgccgccttcgtgtccgtcgcggacgccgtccgccaggccccgccgcccccgccctcgggcccacagcccaacgcgctcatctgggaggccgtccgcctcgccgacgaggaccgcgtcgcggcggagcggagcatcgtcgcgcgggtccaggagatgggggagcgcctcgacacgctctccctggccgacgccgtggagctggtgtgcgtgctgcggcgggtggaggacggcaccgcgtcggattgcaagtgggcggggctggacgagggcgtcgcgcgcgcggctcggggcctccgcgagcgcgccgaggatgtggtgctgcggaggacggtggaggaacggcgcctggtgcggagggacgccgcgggcagcgcgtccgcgcgcaccatcctgccgatccgcgccgctgctggcgacggcggcgccgtccggttcgggtccacaaggtgggctggcacagtttctgcgccgcgtagacggtaggacaacgtgtacagtgtgcacttcttttttttagttcttctcatggttcactcaacacgtttcaaattcttgtaattgcagatttgcagtcgagatttttttgttgtaaattttttgttgtagtgcttgttgttgtgtttgatacaaatggccatggtgtaaatattgggcgagaacgtgaatggaagcgcttgctacgagatgtctgctcgatcaaaaaaaaaatatttgtgg

SEQ ID NO: 143876 - DNA, 1504 bp, Zea Mays
gcgaaacactcatcactagtaccaatggaaacaacactccccatggtccggggcaatggccgcctcctgcccttgtcccttctcttgctcgctgccgccgatttcacaacggtgcatggccaggggcagcagcctgaagggccgtactactcgcgaagcttcaacccatccatggccatcgtcatcgtcgtgctcatcgccgccttcttcttcctcggcttcttctccgtctacgtccgccactgctacggcgacggctctagcggctactccgcgagcccggcccccggcggtgccgccgcgcgatcgcggcgccagcagcgcgggctcgactcggcggtgctggagtccttcccgaccatggcgtacgccgacgtgaaggcgcacaaggccggcaagggcgcgctcgagtgcgccgtctgcctcagcgagttcgacgacgacgagacgctgcgcctgctgcccaagtgctcccacgtcttccacccggactgcatcgacacgtggctcgcctcgcacgtcacctgccccgtctgccgcaccaacctcgccctcggccccgacgccaacgccccgccgcccgacgacgacacgcctgagctgctgccggctccagaagcgcaggagctaccgtcgcccacgtccgcaccgcctccttctgctgcggtggtcatcgacgtggaggagacagaggaggagaggatcatcagagcggaggccgacgagctgatgcgcatcggcagcgtgaagcgcgcgctgcgctccaagtccggccgcgcgcccgcacggttcccgcgatcgcactcgacagggcactcgctcgcagcgtctgcctgtgccaccaccggcaccgaaaggttcacgctgcgtctgcccgaccacgtgctccgagacctcaccgcggcggggaagctccagcgcaccacgagcttagtcgcgttccgctccagccgcgggggcagcacgcgccgtggcgtcagcgtcaggacaggcgggggaggcggcgaaggcaccagccgtgccgggaggagcatccggctgggccagtcaggacggtggccgtcgttcctggcgcggacgttatccgcgaggcttcccgcctggggatcgcggtcgacgcggaggagcgtccagactgacgggtcgagcaagggcggtaggacagttggcgacgccggcgcaggcgccaagtcttctgaacatgacgaccaggcgtgcgcgcctggacagcgtgtttgactgagtctccttgtcgtggtcaactgtggctgctaggaaattttttgttggcagttaattttaggagagaacgtgcttggttgcgctcctccttcactccttctggacgcgtgttgtattcattttttcttcaacaaaaagcatgtacataaaattagtagttttttctttgaaattaagatacatatatactacctctaagtacaagcacacacgtaccttatctcttatgaataaatattagaattgatgaagtcattttttt

SEQ ID NO: 143877 - DNA, 1854 bp, Zea Mays
ccgccggcagtccatgcgctccagctccacgcctccaccccaagttggcaggctccaccggtccacccaagttgctgctacatactactgaagctggccaaaccttttaccaaacccaacagcgaccaatccaatccacgtatcccctcccaaccagagcagcccaccaccaccgcccacgccgcgcgcacgcggccccctctccgatgcgcgccgccgagccgactccgccgccgccgctgtcgctgccccagccaaggtagctatgtacacggtgcacccgcacgcggcggcgacgtcagtcaccctcaactgcacggaagcaccgctcgagtgcctccccctctgccccggcggcggcaaggcctgctccgagtacgccctgcccccgccgccccctatcccggtgatcccgcgcgcgccggtcgccgaccgccacgcgcccgtccgcctcctcctcatcatctccctgctctccgccttcctcttcctctcgctcgcgctctccacgctcctcctctaccgccgccgccgcctcatcctgcgacgccgccggcgcctcgccgcggccgccgctgagggtgccgacgacggagggttcggcgacgaggaggagggcggaggcggtggaggggtggtgcaccacgtgtggtacatccggacagtggggctcgacgaggccaccattgcgtccatagccgcagtggagtaccgccgcggggtgggccggggcggggactgcgcggtgtgcctcggcgagttcagcgatggggagctggtgcgcctgctcccgcgctgcgcgcacccgttccatgcgccctgtatcgacacctggctccgcgcccacgtcaactgcccaatctgccgttcccccgtcgtcgtcattccctccgatctccccgtcggtgccgcggaggctgaggcaggtggtgacccatcgggagaacaccatgctcacgaggaaatgtcgttgtctcaatctgaatcggagactgagggctcagaggactacgaggactcgtcatccactcaaagtgacggcacaacggcaacagcggaggagaatggaagggccactcccaagcctattaggcgctcggcatccatggattctccattgtttctcgtagctgttcctgaagctcaggatgatgtcatgcagtataattgcaagttgccaaatgctcgagagatgaaggtcttcagggtcaaggagaaggaggcagcaggcacttcttcgacctcttgtcagtcaggccggttcaagattggcaggtccatgtcaagcagtgggcaggggtttttcttctcacggaatggccgctccagtggtgctgtgctgccactgtgagttggtatgtttttaccgtcggttgcagcctcagcaaagccgggagctggtagtgtgtcggtgtctgttgatagaaggcgcagagagctgaggttgctctcagagaaaatctcctttgaggtgtgaattattgatgagaacaattgttgccgataaggattgcttgagtgatacggttatgttagcttcaaagtcccaagtttcctgtatgataactccaagcttggcttgagtgaatttgggggaagctgatgtttggcatctccatagtccatatatacctgttatgtacgagtaatcatgcaagaaggaatggactttcacctgtatcaactctatttgcttaaagaaggaatggaacaaacatactaaattaagaatctgtagctggggaagtggggagaccattacttcctgttggttgtgtatgatattattggatgtcttctttgtatggatagcattgaacatgtattgcatgcaaacttaaattagtaatttgg

SEQ ID NO: 143878 - DNA, 102 bp, Zea Mays
gtgaaatttacgtgctcggactcggagcggagcagtggtcgctgctggtacgttttcgtagatagagatagatatactactaggagtatagtatataaaagc

SEQ ID NO: 143879 - DNA, 797 bp, Zea Mays
accatcacagtacgcacgcacgcaccagcccagcagcagaagcgcccctcggccctcgctcccacaacaagctcaagccagccttctctctctctctgctccaatggcgcgcttccagctcgcagccgtggccatggccatgctcttcgccgcggcggcggcgcaggccccgaccgccaccccgacgccggctcccaaggcgtcccccccgccggcgacgccgccgccgacccccgcgccggtgtctccgcccgtgccgcccccgaccatgcctcctccggcgcccgcgcccgcccccaaggccccggccccggcgcccgaggcccccaccccggcgcccacggccgaggctcccactcccgacgtgagctccccgccgatgcccacggagggccccgctccgacgccctccgcggaggctcccccagcccccagcgccgccgtcgccggcgcctccccctccgccaagtggttcgccgccgccgcagccgtggccgccgccgccgccgccttctactgagagagcgggagatctgcgccgtcccctgctgtaatttatcgctatccgtgctgagccgttgattcctttttttttgttgttcttccctttcatccatattccattcggcattcgattcagtaggactggcatatctgttcgtgttactacagtgtaggatcgtggcttggacagattggtttggctggctggctggttgggtgggcccggtggtgttgtggcttccgttcctccatctgtataataccctgttgattttccttcagcgtcttcttca

SEQ ID NO: 143880 - DNA, 2944 bp, Zea Mays
tcccttccgcgcgcgctccccaaggtgagatcagcatctccgtctcttccccgccgctcctcactcccctaccgccacccctaaaactagccccattcccttaccagcgtccgatcacactcctcggtcccacgcttggatggattccgtcggtacaaatcggcccccgctgcgccccgttgccgccgcagctactcgacgcagcgcgctcctgcgcccccctagccacctcgggctcggcaatcgttttgcggagactaagcttgggatcgcgtcagggtgtggaggaggaggagggtattttggaaaggtacagggatttgatgccttgcggagtaccacgacgaaagttcagagcgggaaggcggggaggagtgtgaccaaggaaatgggacacacttcatctggcaatgaagtgcccttgaaatattcttcaggcaaagccttccccctaggagtgtcacaagttgacgatgggttaaattttgcaatattctcacaacatgcttcttctgtcaccctttgcttgaattttcctgagagaggcaaccaagatgatgtggacattgtagagtttgctttagaccgccagaagaacaaaactggagatatatggcatgtgtcagtggagggtttgcctgcttctggtgttctttatgggtatcgcattaatggtcctcaagggtggcaacaaggtcatagatttgatgacagcgttattcttctggacccctatgcaaaattagtttatggtcgaaagcactttgctgttgaaaaagagaagccaagccagcttttcggaacatatgatttcgatagctcaccttttgactggggtgacaattataagcttcctaatttgcctgagacagatcttgttatatatgaaatgaatgtccgtgccttcactgccgacgagtcaagcaggcttgctccagctattcgtggaagttaccttggtgtcattgataaaattcctcatttgctggaacttggcgttaatgcagtggaactacttcctgtttttgagttcgatgagctggagttgaagaggttccctaacccaagggaccacatggtaaatacatggggatattctacaatcaacttttttgcgcccatgagtcgttatgctagtgctggtggtggacctgtggctgcttccaaagagctcaaacagatggtcaaggcatttcataattctggaattgaggttattttggatgtagtttacaaccatacaaatgaagctgatgatgttaacccttacatgacttcctttcgtggtattgataacaaggtctattacatgttagatctcaacaacagtgcacagctgctgaacttctcgggttgcgggaatacactaaactgcaaccatcctgttgtcaaggagcttgtacttgacagtttaagacattgggttaaggagtatcacatagatggatttcggtttgaccttgcgagtgttctttgtcgtggaccagatggcagtcctcttgatgcacctccacttattaaggaaattgccaaagactctgtattgtctagatgtaagatcattgctgaaccttgggactgtggtggcctttatctagtagggaggttccctaattgggacaggtgggctgaatggaacgggaagtacagagatgatattcgaagatttattaagggagatcctggtatgaagggggtgtttgcaactcgcgtttctggttctgcagatctctaccaggtgaacaatcggaagccttaccatagtgtgaactttgtaattgctcatgatggatttactttatgtgaccttgtttcatataactccaagcacaatgatgcaaatggagaaggtggtcgtgatgggtgcaatgacaactacagctggaactgtggcattgaaggagaaacaaatgatttgaatgtgctaagtcttcgttcaaggcaaatgaagaacttccatgtggcattaatgatttcccagggtactccaatgatgctgatgggagatgaatatggtcacacacgttatggaaacaacaatagctatggacatgatactcacataaataattttcagtggggccagttggaagaaaggaaggatggccatttcaggtttttctcagagatgatcaagtttcggcataaccatcctatattgagacgagacaggtttctcaacaaaaatgatgtcacttggcatgaaaatcgttgggagaaccaggacagcaaatttttggcatttacgatacatgatcacagttctggtggagacatctatttggcattcaatgctcatgagtattttgtggatgctgtaattcccccaccaccacaccataaatcttggagtcgtgtggtggataccaacctggaatcaccaaaggatattgtcccagaaggggtgccattcacaggttcagggtacaggattgctccctactcttccatcttgcttaaggcaaagccttagaatggcggaggcaagtcattctcaagtaagcacgaataatggtgttgtgatccctaactttccaagctcttagccaactgtactgcaagtatagcaaactttggtatgtgaagtcggaccaacccttgcggaaatcaacggaagccatggtttgctaaaggtatactcatggagaattggagatatggcaaacacatacgcaagtaacctccacacatctaagcaagaagagcctttcattaggggatgcatggctcgaggaaactatatttgcatttggttgattcatttttatttgttgcacatgtcagtatgtcacctgtgtgtgtcaagctcttatttgcttaaaaattggacattcctttgttacatatttgtgttgtactgtgttggagctagcgttcctggtatattgcacgggggtgggaggacgggggacgctttgtcgccgtggtcttaggctaccagcaa

SEQ ID NO: 143881 - DNA, 2852 bp, Zea Mays
gcgtccgatcacactcctcggtcccacgcttggatggattccgtcggtacaaatcggcccccgctgcgccccgttgccgccgcagctactcgacgcagcgcgctcctgcgcccccctagccacctcgggctcggcaatcgttttgcggagactaagcttgggatcgcgtcagggtgtggaggaggaggagggtattttggaaaggtacagggatttgatgccttgcggagtaccacgacgaaagttcagagcgggaaggcggggaggagtgtgaccaaggaaatgggacacacttcatctggcaatgaagtgcccttgaaatattcttcaggcaaagccttccccctaggagtgtcacaagttgacgatgggttaaattttgcaatattctcacaacatgcttcttctgtcaccctttgcttgaattttcctgagagaggcaaccaagatgatgtggacattgtagagtttgctttagaccgccagaagaacaaaactggagatatatggcatgtgtcagtggagggtttgcctgcttctggtgttctttatgggtatcgcattaatggtcctcaagggtggcaacaaggtcatagatttgatgacagcgttattcttctggacccctatgcaaaattagtttatggtcgaaagcactttgctgttgaaaaagagaagccaagccagcttttcggaacatatgatttcgatagctcaccttttgactggggtgacaattataagcttcctaatttgcctgagacagatcttgttatatatgaaatgaatgtccgtgccttcactgccgacgagtcaagcaggcttgctccagctattcgtggaagttaccttggtgtcattgataaaattcctcatttgctggaacttggcgttaatgcagtggaactacttcctgtttttgagttcgatgagctggagttgaagaggttccctaacccaagggaccacatggtaaatacatggggatattctacaatcaacttttttgcgcccatgagtcgttatgctagtgctggtggtggacctgtggctgcttccaaagagctcaaacagatggtcaaggcatttcataattctggaattgaggtgattgcagaatacctctttacttgctgttctatcatttaagttccaagtccatggagagacttgtatgatggggtgtcatcaatctctggacgaatttgtgaggaaaacaaattgttgttcttgtaggtctattacatgttagatctcaacaacagtgcacagctgctgaacttctcgggttgcgggaatacactaaactgcaaccatcctgttgtcaaggagcttgtacttgacagtttaagacattgggttaaggagtatcacatagatggatttcggtttgaccttgcgagtgttctttgtcgtggaccagatggcagtcctcttgatgcacctccacttattaaggaaattgccaaagactctgtattgtctagatgtaagatcattgctgaaccttgggactgtggtggcctttatctagtagggaggttccctaattgggacaggtgggctgaatggaacgggaagtacagagatgatattcgaagatttattaagggagatcctggtatgaagggggtgtttgcaactcgcgtttctggttctgcagatctctaccaggtgaacaatcggaagccttaccatagtgtgaactttgtaattgctcatgatggatttactttatgtgaccttgtttcatataactccaagcacaatgatgcaaatggagaaggtggtcgtgatgggtgcaatgacaactacagctggaactgtggcattgaaggagaaacaaatgatttgaatgtgctaagtcttcgttcaaggcaaatgaagaacttccatgtggcattaatgatttcccagggtactccaatgatgctgatgggagatgaatatggtcacacacgttatggaaacaacaatagctatggacatgatactcacataaataattttcagtggggccagttggaagaaaggaaggatggccatttcaggtttttctcagagatgatcaagtttcggcataaccatcctatattgagacgagacaggtttctcaacaaaaatgatgtcacttggcatgaaaatcgttgggagaaccaggacagcaaatttttggcatttacgatacatgatcacagttctggtggagacatctatttggcattcaatgctcatgagtattttgtggatgctgtaattcccccaccaccacaccataaatcttggagtcgtgtggtggataccaacctggaatcaccaaaggatattgtcccagaaggggtgccattcacaggttcagggtacaggattgctccctactcttccatcttgcttaaggcaaagccttagaatggcggaggcaagtcattctcaagtaagcacgaataatggtgttgtgatccctaactttccaagctcttagccaactgtactgcaagtatagcaaactttggtatgtgaagtcggaccaacccttgcggaaatcaacggaagccatggtttgctaaaggtatactcatggagaattggagatatggcaaacacatacgcaagtaacctccacacatctaagcaagaagagcctttcattaggggatgcatggctcgaggaaactatatttgcatttggttgattcatttttatttgttgcacatgtcagtatgtcacctgtgtgtgtcaagctcttatttgcttaaaaattggacattcctttgttacatatttgtgttgtactgtgttggagctagcgttcctggtatattgcacgggggtgggaggacgggggacgctt

SEQ ID NO: 143882 - DNA, 1858 bp, Zea Mays
tcccttccgcgcgcgctccccaaggtgagatcagcatctccgtctcttccccgccgctcctcactcccctaccgccacccctaaaactagccccattcccttaccagcgtccgatcacactcctcggtcccacgcttggatggattccgtcggtacaaatcggcccccgctgcgccccgttgccgccgcagctactcgacgcagcgcgctcctgcgcccccctagccacctcgggctcggcaatcgttttgcggagactaagcttgggatcgcgtcagggtgtggaggaggaggagggtattttggaaaggtacagggatttgatgccttgcggagtaccacgacgaaagttcagagcgggaaggcggggaggagtgtgaccaaggaaatgggacacacttcatctggcaatgaagtgcccttgaaatattcttcaggcaaagccttccccctaggagtgtcacaagttgacgatgggttaaattttgcaatattctcacaacatgcttcttctgtcaccctttgcttgaattttcctgagagaggcaaccaagatgatgtggacattgtagagtttgctttagaccgccagaagaacaaaactggagatatatggcatgtgtcagtggagggtttgcctgcttctggtgttctttatgggtatcgcattaatggtcctcaagggtggcaacaaggtcatagatttgatgacagcgttattcttctggacccctatgcaaaattagtttatggtcgaaagcactttgctgttgaaaaagagaagccaagccagcttttcggaacatatgatttcgatagctcaccttttgactggggtgacaattataagcttcctaatttgcctgagacagatcttgttatatatgaaatgaatgtccgtgccttcactgccgacgagtcaagcaggcttgctccagctattcgtggaagttaccttggtgtcattgataaaattcctcatttgctggaacttggcgttaatgcagtggaactacttcctgtttttgagttcgatgagctggagttgaagaggttccctaacccaagggaccacatggtaaatacatggggatattctacaatcaacttttttgcgcccatgagtcgttatgctagtgctggtggtggacctgtggctgcttccaaagagctcaaacagatggtcaaggcatttcataattctggaattgaggtgattgcagaatacctctttacttgctgttctatcatttaagttccaagtccatggagagacttgtatgatggggtgtcatcaatctctggacgaatttgtgaggaaaacaaattgttgttcttgtaggtctattacatgttagatctcaacaacagtgcacagctgctgaacttctcgggttgcgggaatacactaaactgcaaccatcctgttgtcaaggagcttgtacttgacagtttaagacattgggttaaggagtatcacatagatggatttcggtttgaccttgcgagtgttctttgtcgtggaccagatggcagtcctcttgatgcacctccacttattaaggaaattgccaaagactctgtattgtctagatgtaagatcattgctgaaccttgggactgtggtggcctttatctagtagggaggttccctaattgggacaggtgggctgaatggaacgggaagtacagagatgatattcgaagatttattaagggagatcctggtatgaagggggtgtttgcaactcgcgtttctggttctgcagatctctaccaggtgctcttgtgctatttctttattggcatattggtttagccattgttgacaatattacttggttgattatgccattta

SEQ ID NO: 143883 - DNA, 601 bp, Zea Mays
cctagattcttttcttatccatctccgcgtagcaaagaaactaaccaaatcagagcaaagagattgcacaaaggagggagcaccggagcagcgacaacagcagagagatcgccagggccactcgcctgtctagagagaggaaggcaacaagagatggacgagatcatgaacaaggtgggtgtttactggttagggccaccagccaacaaggagatctcctcggcaggcgatgaccttgaatcactctcgaccagcgccgaggatggagcggaatggctggtgaagaagttgaagggcaagatgcagaagccactggtggacctgcttagcacaacctccctgtgggtatgttcccatgcgagacgaccaactacgaattcccgctgtctctaagctatggtttgacgtcacggtgtcaggtatgctaggcgaggtcacctcacgtggaggtggacaggatcaagaccaaggtgctcgtctcggctagcgtcaccattgtcaaggccgccgctgccaaggtctacttcactacgaggatcaagtggtcgtgcaacgggatgcctatgatgtcgtcaggggcggcatcaccgtcgacgagttt

SEQ ID NO: 143884 - DNA, 270 bp, Zea Mays
ggacccacctccccatccacaccctaacactcgctcctcatggcctccaccatccccttcgtgggagccgcatccatggtcgggccagcctccctcatcatcggcccctactcagtatcatacctcctccccactcccgcctctgcctccttcagtcgtgtcatctccggcgagctctacaccccatcccacgccgcactcgccgggctcgatgccttcgaggcaagcgcctcgcctcctgatcatcaaactcgttgttccctgtccact

SEQ ID NO: 143885 - DNA, 1438 bp, Zea Mays
cgacccggacgcgactagtacactgcctgccaaacagctgagcagagtagagtagagcagagggcgaagtgcagcgcagtgtgccccgtctcggaacagcgcggaccaccagagcgtgcgcgtccgtgccccacccctccctctctatccatggcggtcccccgcgggtgcctcgggctccccctggtcgccgtgctcctcgcgtccctctgccgcggccaggcggcggtgagggagctcaaggtcgggtactacgccgagacgtgcccggaggccgaggacatcgtccgtgagaccatggcgcgcgcgcgcgcacgcgaggcccgcagcgtcgcctccgtcatgcgcctccagttccacgactgcttcgtcaacgggtgcgacggctcggtgctgatggacgccacgccgacgatgcccggcgagaaggatgcgctctccaacatcaactccctgcgctcgttcgaggtcgtcgacgagatcaaggacgcgctggaggagcgctgccccggagtggtctcctgcgccgacatcgtcatcatggccgcccgcgacgccgtcgtcctgaccggtgggcctaactgggaggtgcggctcgggcgcgaggacagcatgacggcgagccaggaggacgcggacaacatcatgccgagcccgcgcgcaaacgcgagcgctctcatccggctcttcgcggggctcaacctcagcgtcaccgacctggtcgcgctctcgggctcgcactccatcggcgaggcccgctgcttctccatcgtcttccgcctctacaaccagtctggatccggccgccccgacccgcacatggacaccgcctaccgccgctcgctcgacgcactctgccccaagggcggcgacgaggaggtcacgggaggcctagacgccaccccacgcgtcttcgacaaccagtacttcgaggacctcgtcgcgctccgcggcttcctcaactccgaccagacgctcttctctgacaacaccaggacccgtcgcgtcgtcgagcggctcagcaaggaccaggacgccttcttcagggccttcatcgaggggatgataaagatgggggagctccaaaaccccaggaaaggggagatacggcgcaactgtcgcgttgctaacaactcgccgtggcaaccaaggacggggatggcgtccggacagtcgacatctgagctccggtgatgaggttggtgtttcagaagaaatcgagccctgatatggtactaatatgttgacatgcattgttgtttttttggtcgtgtgtaagttttgcacctacctatggctgtggtgcccgagctgcgctcattgctgacgtggggaataattgagacattgtgccttagctccaataacgttcaatatatttatcctttatatctgttttttactgtcttatctaaaatatttcattccctataactca

SEQ ID NO: 143886 - DNA, 1324 bp, Zea Mays
cgacccggacgcgactagtacactgcctgccaaacagctgagcagagtagagtagagcagagggcgaagtgcagcgcagtgtgccccgtctcggaacagcgcggaccaccagagcgtgcgcgtccgtgccccacccctccctctctatccatggcggtcccccgcgggtgcctcgggctccccctggtcgccgtgctcctcgcgtccctctgccgcggccaggcggcggtgagggagctcaaggtcgggtactacgccgagacgtgcccggaggccgaggacatcgtccgtgagaccatggcgcgcgcgcgcgcacgcgaggcccgcagcgtcgcctccgtcatgcgcctccagttccacgactgcttcgtcaacgggtgcgacggctcggtgctgatggacgccacgccgacgatgcccggcgagaaggatgcgctctccaacatcaactccctgcgctcgttcgaggtcgtcgacgagatcaaggacgcgctggaggagcgctgccccggagtggtctcctgcgccgacatcgtcatcatggccgcccgcgacgccgtcgtcctgactacacagagagggagagcgccagagacccagacggccagaccagacagatgcgtagtatatgcatttgcccggggaacagagggccaccgcatggcgcacgggcaccaaacgtccaacccagccgggaaaggccaggctcgacccgccgcgcgcacgaaaggcgagcggacccccgtccacgtgccgcggcgagagacgagagtggttctaggcttcggcgtttagcgcggacagctcgtatggtgctcctcggcctcgggtgctgctgccacggcccactgaccactggcgccgcgaatagcaaagctgccggcccctccgtcgccgaggtgggattctgtttctcccagattggacgatggcggggaagagatttccgtggaatggagtactttttcgcgtgcttttcccttgatcctcacgaatgttcgaatcgcggcgtggaaacaagcgagaagcgacgatgcacaatgccgtcagcgctgatgcctgggaggctgggtgggaggaactgcaaggatacggttcgctcttcttgttgacggcaacggctgctatgcaagcgggcgtgcaagagtggttcaacgggattgattggtgcaggagtcatataggagtgctactagtattacgtaatcgtacgtactactagtacaaaacctgtcgatgttccttgaaatgaaatgtaactgtacttgcaattgaaagatcagatggttttcatcaattttcagcaaaaatagatctgttcatc

SEQ ID NO: 143887 - DNA, 83 bp, Zea Mays
atctattttcctttcttttctctctctatctcgtttctatttcttccgatttaatttcaagctcgagcacaccctcacaaatg

SEQ ID NO: 143888 - DNA, 537 bp, Zea Mays
ccttcgtcacagatcgacatcgtccacacagcacgccctgtctgtcacacggcggtgtcgtcgtcgcggattattccttcatccagcgacatcatctggcgtgtgcatccatccgcttctccgttttctacgggacgattcctgcccctgcagcaccaatttgatgcagcctcacgtagtcacgtgattggcggtctccaagaaacccacgagaaggccacggatttctcaggatcaggaagaaaattgattttccgctcctttgctacgttcacttattatcagattttttgttatttggcagattcagacgaagtttgttcttaatcagttatgtgtttgaaagattggtacaaacgcgacctgctgatatggctgataataaatgagagggtcttgatataaaagctttatccgccttacagctcagtttatctcctgatgtttttgtgtgaagtaatgaatgcaaaatctacggcagaattgtggaagaaattggagaaactacatatggaccagagtcttgctaataagttt

SEQ ID NO: 143889 - DNA, 712 bp, Zea Mays
gtcccatcaaacattcgagctccccccgcctggacgcgcctacgacaaggcgactgccgccgccgaggccgccaacgacgaggttgccgccaaatcctccacgacgtatgtcttcactgcgacggacacgctcacctaagacgtccctggatgtcggattcgccggcggaagcgcagcccccgcgatcgtcgaggacgacgtctccgccccatcaaccgcggagccccgtcgatctcgctggaattgtggctccgatcccatccggtctatttgctcgcacacgcaagagtgacccggattaggcccgcccgcctcctcaaccgccacctctgtccacgatttcgtcgtcaaggatgcgagcggtcgtagacctcaccacctacaagtaaggggaaggttcttatcatcattaacattgcatcccactgtggcttaaacaactccaactacactgagctggataagctctttgagagtatatggaccaaggtgtgtccttagtcttgtaatgcttatctgtgttctcatgggcatatgcgttattggtttactttatccaactatcggttgttcattgatttcaacaattcccgttgttggggctgctaattgctaagtacaatttccaatttgtgatctatgcaagctttgaaatcctggttttcccatgcaaccagtttgggggtaggagcctggtaccaatgaggagat

SEQ ID NO: 143890 - DNA, 255 bp, Zea Mays
atggtcagggactggcgagacacgcgtctggtcgtggaggacgtgcacaaggagcggtgctcacgacatgtttggtggtttgggcctcaaaagcacccaacgctacggatggtgggttttgctaagtttgggcctcaagactcggcggaggcggttctggagggaaccggtggcggcacgtggcatgatcgcatagggtgcgtcaaggcgaagcaactccgtgtgaaggatgtggtcgtcggatcgaaaacctag

SEQ ID NO: 143891 - DNA, 1294 bp, Zea Mays
ttttttatatgatactatgaggatggtgataagagtatctaaggggtacatatttgccctaagatcccaaaagatttgcattccccatgctgattttagctagattgtaaatggttgggagacatcctacaagggttttacaacagttacctaaagaagcttgttcgtgaagaacaggaactacgtctcttgttgtggctccttctggtggtcttctcttccttcttcatcttgcctgcctttttgtcacagttgttagggagcttggtttgttcgtcttgctcatcgctatcttgttcttctatggaattgtctcttttctcatgaattttcttttccttgccattaagcaccttcacttgagctggtcctgtggaagcatcagaagctaatgaatcatagtctccatcatcataatccatgttgtcgtttttgcttctaccattgctacagccactgccaacattactccatttgctgccattggctttgagatcatcactgttcactggggagcccaggtacatcgtccacccagattcattactgttgcactcttcagcattgtccccagtaagctgagaggagtccataacaagagagtgcagggacacagaaagagaggccaaggacaacacaaggaaaggaagatgaaattatgagagaactgactgatggaacacacgctaatacttcttcagagcacctcaacaacccaacttcaaagaaggctttcttgttctcactccttgacctgcagcctgagaagagcatcgaagccctctctctctctggtctctctcttcacagggcagacaatgcagggtaggggcagaattccatgaggctaagaactatgcaaggtggttgcttgtgactgtgtggaagcttgtcatggggctgaagaaacgatggcagtgcctttaaattggaaaggcagcctatccttccaactgttcctcataactttctcaactatttctgtaccttctgttgctaccaaaggcagcggggagaacatttgcttgcaatgcagtgttccaggtatttccacctgtagtccatgtggccttggactctcgcctcatggtggggtcctgtcagaggtatacgtgcatgggttgggccatgatttggtaggattggaaggttagaatgaggctggcatagctcaaaaggtttgttgtcgctgctgtgtctgcctgtcatgcaaatgcgtaacttgtttatgacacatgtcttgcgttacaggaccaggagaacatgtcttttgtttgctttagcatccgcgtgc

SEQ ID NO: 143892 - DNA, 168 bp, Zea Mays
atggcgctgggcgtgttgttccacggcgcacagctagcgctggatctggcggtggccgggatgtcgctggcggtggcgctcgggtcctgtccacctgttgaggactgtggcctctacattccagtttgggccattcagatactactcaatatgatcctgtctgaatga

SEQ ID NO: 143893 - DNA, 1329 bp, Zea Mays
atggagagaaggggcattgaaccttacagtgatacacttgctgctctctcagagggtcatagcaatagtttacagttggatttggctgaggagtttttggaaagaatttcagagataaaaccaaagcatataggttcctttaatgctttgctttctggatgtgcgattatgaatgaaccagaaagagctgtccgcatactagctaaaatgaaacatgtgaacatgaagccaactctcaggacatatgaacttttgttttctctgtttggaaatgtaaatgttccttatgaacaaggagatgtgctctctcatgtcgatgtttccaaaaggataagtatcattgagatggacatgtttaacaatggaatccaacacagctttgtgtccatgaagaacttgatacgagcttttggagctgaggggatgatagaggaaatgctgaggtacctgaatatagcagaaaatactctgtggaacataaatcctcatcagaagagtgatctctacagcactgcgttgcatgctctggttgatgtgaaggaaactcacagagcagtaaagatgttcaaaatcatgagatcatgcagtcttccaactaatatttcaatttataataccatgatagagtgctgcaaatggctgccatgcttcaaatcagctagtgctttgctgtctttgatgcttcgagatggtttcaatcctacggttgtgacttttacatcactcctgaaggttgtattagaaaatgataattttgaaggggctctggatctgcttgatatatgcaagattgaaggacttcagcctggcatacagactttcaacacagtactcttacgtgcatatgctagaggtcaaattcatgtccttgaatatattttggagtgtatacatcgatcaaaaatccaacctgatccatcaacactttggtacacgttttgtgcctacgaggagcatgaactgtacaatactgcaattgagtcattgctagtcctcagcatgagaatgatatctgaggatgccggcattcctagtgagaaaagaattgtttttgaagatctaatcctcagtgaagaacctgatgctgaattcaggatcataagggcattccaagcaggcgaagaattccttgcgacagctttactgaacctaagatggtgtgccacaatgggtgccaccgtatcttggtcaccggaggagagtctttgggcaatgaggctggcagcctcgtatgatgctaacaagagaccacatataaacccctcggatgctcccaaatcttggggaaggaatccacttaaccgcccgtattgggaggctaacgggtga

SEQ ID NO: 143894 - DNA, 550 bp, Zea Mays
acacgcttcctccacgccacctcgatctgtgcggcggcaaacccagagatccttgccccgtccgccggcgaaaggcgctcacctcccctcttcgctgtctgcgatgcagaggatactatcgagggccgctcgccggtgcacgaactcctcggcggcgttcaactcacctcacgcgcaggccaatgcagcaagtgttcactctgaagacgccccaacttgttcaaacatgattacagagaacgatgattttacatggaagactagttttgttagacccatgcaatcagaagtcgtcaatgccctccgtagaggtgaccggcagcgagcatcattgattctttcgaactttcatcacactaaggaatcactgaccaaggaagatttttcttatatattggagtattgtgcagaggcacctgatcctttgtttgttatggaaactttggaactcatggaggagaaggccattggcatgagtaaaagtatctacagatatgtcattagagctctgagcagagggggatatgcgaaggaggtacatagtacttct

SEQ ID NO: 143895 - DNA, 876 bp, Zea Mays
cgagttgatctcagctcaacgacgacctcacccctcgaaggtccccagcagcaagcacgcatgctgcaccagcaccagcaccattaccatggaggagtggctagcctccacagctacctctcgaatccggaccaggcattccacgctcactactaccaccacagcaacatcatcgccacgccgctgccgcccactccgtcgttccaccacctctggccttctacggcccaaaccttcgaacaacccgtcgtccacgaagctccggcggccgtcgccgccggcaacagcccagccgggtccggcagtgccgatgacggcggcggcggcggcacggcggaggctgagcggaggcggcggaggatggcctccaaccgggagtccgcccggaggtcgcgcatgcgcaagcagcgccagctcaccgagctgtgggcgcaggtcgtccacctccgcggcgccaaccgccgcctcctcgacgagctgaaccgcgccgtgaggggctgcagcgacatgcgccgcgagaaggcccggctccagaaggagaagaccgatctcggtaccaagctccagcgcctcacccagccgcagaacgccgccctgccaagctcctcctcggagccgcaaccgcaacacgacgccgctactgaataaattcattcttatcttcgcattttagcttccatatatacggtgcttctgttactatagtatacgaaataaaatatgttttcacaggttgtttctccgcttcattttttttgccccctatatgtctacgggtatattctaccttctccgttcccgattataattacaaatcatttcagctttcttgacaatcaaaacaagtttgactaaacctccaaaaatacaaaaaaa

SEQ ID NO: 143896 - DNA, 2741 bp, Zea Mays
ctcccagtccctgtacctccgtataaaccctagtacctcttatccgttcgtcactccccaagcgtcacaccgaatcaccacagtcgagctcgagcaggaacaagccgtgagcgcctgcccccggtgctcaatatctattccacacctcatggcgccggcgctgagcaggaccctggggccgtcgtcggtggccgcgctgcgcccgagcccgtcgtgccggggtctgttacgggccgcgctcgcgccgcagggcaggggcgcctccgcgaggtgcgcggtaggggtgagatgggaggcagccaggcggaggaggatggccggggtgaggtgcgacgccgccgtcgctgagaagcctgccggcgaggaggagacggccggcgagaagtacgagtaccaggctgaggttacccgcttgatggacttaattgtacacagtttatacagccacaaggaagtatttttacgtgagcttgtaagtaacgcgagtgatgcactggataagctgagattcctcagcgtaactgatccttctgtgttggctgatggcggtgagttggagataaggattaaacccgacctagaggcggggacaatcactatcacagatactggcattggaatgactaaagatgagctcaaagactgtcttggaaccattgcacaaagtggcacctcaaagtttttgaaggctctaaaggagaacaaagaccttggtgcagataatggactcattggtcaattcggtgttgggttctattccgctttccttgttgcagagagggttgtggtgtctactaaaagtccaaaggcagataagcagtatgtgtgggaagcagaggctgacagcagctcgtatgttatcaaggaagaaaatgatcctgagaaaatgctttcacgtggaacagaaattactctttatttgagagatgatgacaaatatgagtttgctgaccctaccaggattcaaggcttagttaagaactactcgcagtttgtctcattccccatatatacatggcaggaaaaatcaagaacagttgaggttgaagaggaggaagaatcaaaaggtgaagaggctactgaagaatcaaaaagtgaagaggctactgagggtgaaaagcagaaaaagaagaaaaccataactgagaagtactgggactgggaattggctaatgaaacgaagcccatatggatgaggaatccaaaggaagttgagaaaactgagtacaatgaattctacaagaagacatttaatgagtttctggatccgcttgcttacactcacttcaccactgagggagaggtggaatttcggagtgttctctatgtcccagggatggcgcctcttagtaatgaggagataatgaatccaaagaccaaaaacatccgattgtatgtcaaaagagtgttcatatcagatgattttgatggcgagctgtttcccagatacttgagctttgtgaaaggtgtagttgactcaaatgatctccctctcaatgtttctcgtgagatccttcaagaaagtagaattaattatgcgtaagagacttgttaggaagacatttgacatgattcaagagattgccgagaaggatggcaaagaggactacaacaaattctgggagagctttggcaagttcatgaagcttggttgcatcgaggacacaggaaaccacaagcgtcttgcaccattgctgagattctactcttccaaaaacgagacagatttaataagtctggaccagtatgtagaaaacatgcctgaaaaccagaaggcgatctattatatcgctactgatagtctccagagcgcgaagactgctcctttcttggaaaagctggttcagaaagatattgaggttctttacctcattgagccaattgatgaggttgccattcagaatttacagacatacaaagagaagaagtttgtagatattagcaaagaggatttggaattgggtgatgaagatgaggacaaggagaaagaaagcaagcaggagtatactcttctatgcgactggataaagcagcagcttggcgataaagtcgccaaggtccagatctcgaagcgactcagctcttctccatgtgttcttgtttctggtaaatttggctggtcagccaacatggaaaggctcatgaaggcacagacccttggtgacacatcaagcctggagttcatgagaggtagacgaatttttgagatcaaccctgaccatcctatcatcaaggacctgaacgctgcttgcaaaaacgagcctgaaagtactgaagccaagagggcggcagagttgctatacgaggctgcgctgatctccagtgggtatactcctgacagtccagcggagctgggaggcaagatctacgagatgatgaccatggccctcggcgggagatgggggaggttggagacagaggaggctgaagtcatcgccagcatcgacgacgcggactcgtctgaaggtgccacgaccacgacagaggtagtcgagccctctgaggtcaggacagagagcgacccgtggaaggattagatagttctgtatgcaaggattatgccctggtgtggtgtatgagcactggatgtaacgaaagtacgaaccagagccaggatagaggaatgcagcgtttgataagaacactggtgttaaaagtgtagatctctggtttgggttgtgctgataaatttttgtaggctataaccatccaatgaaaaatgccctctgcgctttcgtgca

SEQ ID NO: 143897 - DNA, 2747 bp, Zea Mays
ctcccagtccctgtacctccgtataaaccctagtacctcttatccgttcgtcactccccaagcgtcacaccgaatcaccacagtcgagctcgagcaggaacaagccgtgagcgcctgcccccggtgctcaatatctattccacacctcatggcgccggcgctgagcaggaccctggggccgtcgtcggtggccgcgctgcgcccgagcccgtcgtgccggggtctgttacgggccgcgctcgcgccgcagggcaggggcgcctccgcgaggtgcgcggtaggggtgagatgggaggcagccaggcggaggaggatggccggggtgaggtgcgacgccgccgtcgctgagaagcctgccggcgaggaggagacggccggcgagaagtacgagtaccaggctgcaggttacccgcttgatggacttaattgtacacagtttatacagccacaaggaagtatttttacgtgagcttgtaagtaacgcgagtgatgcactggataagctgagattcctcagcgtaactgatccttctgtgttggctgatggcggtgagttggagataaggattaaacccgacctagaggcggggacaatcactatcacagatactggcattggaatgactaaagatgagctcaaagactgtcttggaaccattgcacaaagtggcacctcaaagtttttgaaggctctaaaggagaacaaagaccttggtgcagataatggactcattggtcaattcggtgttgggttctattccgctttccttgttgcagagagggttgtggtgtctactaaaagtccaaaggcagataagcagtatgtgtgggaagcagaggctgacagcagctcgtatgttatcaaggaagaaaatgatcctgagaaaatgctttcacgtggaacagaaattactctttatttgagagatgatgacaaatatgagtttgctgaccctaccaggattcaaggcttagttaagaactactcgcagtttgtctcattccccatatatacatggcaggaaaaatcaagaacagttgaggttgaagaggaggaagaatcaaaaggtgaagaggctactgaagaatcaaaaagtgaagaggctactgagggtgaaaagcagaaaaagaagaaaaccataactgagaagtactgggactgggaattggctaatgaaacgaagcccatatggatgaggaatccaaaggaagttgagaaaactgagtacaatgaattctacaagaagacatttaatgagtttctggatccgcttgcttacactcacttcaccactgagggagaggtggaatttcggagtgttctctatgtcccagggatggcgcctcttagtaatgaggagataatgaatccaaagaccaaaaacatccgattgtatgtcaaaagagtgttcatatcagatgattttgatggcgagctgtttcccagatacttgagctttgtgaaaggtgtagttgactcaaatgatctccctctcaatgtttctcgtgagatccttcaagaaagtagaattgtcagaattatgcgtaagagacttgttaggaagacatttgacatgattcaagagattgccgagaaggatggcaaagaggactacaacaaattctgggagagctttggcaagttcatgaagcttggttgcatcgaggacacaggaaaccacaagcgtcttgcaccattgctgagattctactcttccaaaaacgagacagatttaataagtctggaccagtatgtagaaaacatgcctgaaaaccagaaggcgatctattatatcgctactgatagtctccagagcgcgaagactgctcctttcttggaaaagctggttcagaaagatattgaggttctttacctcattgagccaattgatgaggttgccattcagaatttacagacatacaaagagaagaagtttgtagatattagcaaagaggatttggaattgggtgatgaagatgaggacaaggagaaagaaagcaagcaggagtatactcttctatgcgactggataaagcagcagcttggcgataaagtcgccaaggtccagatctcgaagcgactcagctcttctccatgtgttcttgtttctggtaaatttggctggtcagccaacatggaaaggctcatgaaggcacagacccttggtgacacatcaagcctggagttcatgagaggtagacgaatttttgagatcaaccctgaccatcctatcatcaaggacctgaacgctgcttgcaaaaacgagcctgaaagtactgaagccaagagggcggcagagttgctatacgaggctgcgctgatctccagtgggtatactcctgacagtccagcggagctgggaggcaagatctacgagatgatgaccatggccctcggcgggagatgggggaggttggagacagaggaggctgaagtcatcgccagcatcgacgacgcggactcgtctgaaggtgccacgaccacgacagaggtagtcgagccctctgaggtcaggacagagagcgacccgtggaaggattagatagttctgtatgcaaggattatgccctggtgtggtgtatgagcactggatgtaacgaaagtacgaaccagagccaggatagaggaatgcagcgtttgataagaacactggtgttaaaagtgtagatctctggtttgggttgtgctgataaatttttgtaggctataaccatccaatgaaaaatgccctctgcgctttcgtgca

SEQ ID NO: 143898 - DNA, 2688 bp, Zea Mays
ctcccagtccctgtacctccgtataaaccctagtacctcttatccgttcgtcactccccaagcgtcacaccgaatcaccacagtcgagctcgagcaggaacaagccgtgagcgcctgcccccggtgctcaatatctattccacacctcatggcgccggcgctgagcaggaccctggggccgtcgtcggtggccgcgctgcgcccgagcccgtcgtgccggggtctgttacgggccgcgctcgcgccgcagggcaggggcgcctccgcgaggtgcgcggtaggggtgagatgggaggcagccaggcggaggaggatggccggggtgaggtgcgacgccgccgtcgctgagaagcctgccggcgaggaggagacggccggcgagaagtacgagtaccaggctgaggttacccgcttgatggacttaattgtacacagtttatacagccacaaggaagtatttttacgtgagcttgtaagtaacgcgagtgatgcactggataagctgagattcctcagcgtaactgatccttctgtgttggctgatggcggtgagttggagataaggattaaacccgacctagaggcggggacaatcactatcacagatactggcattggaatgactaaagatgagctcaaagactgtcttggaaccattgcacaaagtggcacctcaaagtttttgaaggctctaaaggagaacaaagaccttggtgcagataatggactcattggtcaattcggtgttgggttctattccgctttccttgttgcagagagggttgtggtgtctactaaaagtccaaaggcagataagcagtatgtgtgggaagcagaggctgacagcagctcgtatgttatcaaggaagaaaatgatcctgagaaaatgctttcacgtggaacagaaattactctttatttgagagatgatgacaaatatgagtttgctgaccctaccaggattcaaggcttagttaagaactactcgcagtttgtctcattccccatatatacatggcaggaaaaatcaagaacagttgaggttgaagaggaggaagaatcaaaaggtgaagaggctactgaagaatcaaaaagtgaagaggctactgagggtgaaaagcagaaaaagaagaaaaccataactgagaagtactgggactgggaattggctaatgaaacgaagcccatatggatgaggaatccaaaggaagttgagaaaactgagtacaatgaattctacaagaagacatttaatgagtttctggatccgcttgcttacactcacttcaccactgagggagaggtggaatttcggagtgttctctatgtcccagggatggcgcctcttagtaatgaggagataatgaatccaaagaccaaaaacatccgattgtatgtcaaaagagtgttcatatcagatgattttgatggcgagctgtttcccagatacttgagctttgtgaaaggtgtagttgactcaaatgatctccctctcaatgtttctcgtgagatccttcaagaaagtagaattgtcagaattatgcgtaagagacttgttaggaagacatttgacatgattcaagagattgccgagaaggatggcaaagaggactacaacaaattctgggagagctttggcaagttcatgaagcttggttgcatcgaggacacaggaaaccacaagcgtcttgcaccattgctgagattctactcttccaaaaacgagacagatttaataagtctggaccagtatgtagaaaacatgcctgaaaaccagaaggcgatctattatatcgctactgatagtctccagagcgcgaagactgctcctttcttggaaaagctggttcagaaagatattgaggttctttacctcattgagccaattgatgaggttgccattcagaatttacagacatacaaagagaagaagtttgtagatattagcaaagaggatttggaattgggtgatgaagatgaggacaaggagaaagaaagcaagcaggagtatactcttctatgcgactggataaagcagcagcttggcgataaagtcgccaaggtccagatctcgaagcgactcagctcttctccatgtgttcttgtttctggtaaatttggctggtcagccaacatggaaaggctcatgaaggcacagacccttggtgacacatcaagcctggagttcatgagaggtagacgaatttttgagatcaaccctgaccatcctatcatcaaggacctgaacgctgcttgcaaaaacgagcctgaaagtactgaagccaagagggcggcagagttgctatacgaggctgcgctgatctccagtgggtatactgtaagtgcagcaaacccacgcgcttgttgttggcctatctatgactgtgagtacgacgtgattgtccacctctgttatccagcctgacagtccagcggagctgggaggcaagatctacgagatgatgaccatggccctcggcgggagatgggggaggttggagacagaggaggctgaagtcatcgccagcatcgacgacgcggactcgtctgaaggtgccacgaccacgacagaggtagtcgagccctctgaggtcaggacagagagcgacccgtggaaggattagatagttctgtatgcaaggattatgccctggtgtggtgtatgagcactggatgtaacgaaagtac

SEQ ID NO: 143899 - DNA, 1110 bp, Zea Mays
tcctccgaggaatcaagcttgaattcgttcggagagcagacagaactcattcctattgaccacggaaggagggcggaatgcctagaagacccctacttcgagtggatccactggccgcagtcgtctgttcccttctccgtcgaggagctcgaatacattgcaaaacttgaccctataaaggacgcagagatgctacgcgtggagctacctatgatacgggaggcgtgtctcagggtgctggtgctgtcgacagtgtttctcaaggaagctgcagcgttcggcctctgcctgtctgagataggagacatgatgagcaggcagttcacagcaaaggaagaggaaccaagccagctcgagcttctctgcatggagacgaggaagtgggtcgaggaaagagagttatttcttcccgacgaagccggagttgaagacggcgatgatgacttcacccagttccctctcgacagcgacgccttcgaaccgccagctttctgcaagtttggcagcgtgaagacaagttccaggaatccactatccaagctggacgagtgtgacgaggaagacggagacttgtcggaagaggagggcgagcacggtgacgtcctgaccagtggtgcattgccccagaaggttcctcccatctccaagctgtcgtcgtccatgaaggggcttggcttcatcgggaaatcgaaaccctaccgtacaggtggcgtccccaagggtaaggtgacaggtagaactaactacagtggcaaagccagcgagcatcagtccgggagccggagcgccaacgagctgctcccgcccagcgcgagtttcgtgaagctgtcggacatgagccgcaaggagtggagcgcgttcctcgagaagttccaggagctgctcccgagcgccctccgcacccggaagcacagcgccggcgtcggccagcgcccgatgccgaggctgggcacgtgcagcagtcagcaggttaaggaatcaccaaaagaatggcccccagatctagcacatcgtcccatgtgcgtgctgcccggacttcatgattggttgatcacttcagtgtggggcccatccgagcacgcgatcgtgtttgaccgcttggtgctatga

SEQ ID NO: 143900 - DNA, 95 bp, Zea Mays
gaaatcagtagcagtatattcagctcaaaacataatgttctcaaaacataatgttctcaacataatgttctcaataaagcagtatattctcaagc

SEQ ID NO: 143901 - DNA, 502 bp, Zea Mays
ggccttcccctgccggcgcgcctgttccctggccgaagccacctggtcccaggtccggtcggccggctcagtttttcccagtgccgcgcgtcgtgcttccccttccagccgaccgaagctccagctccagccatggcgcgtccggctccctaggcgcttgaccatctgctcgcctgctttcctgccagtgctgcccagtgcctctctgctagccgcgcgcccctgtcttatttccctgcgcaccgtcgtgtcctcagctagccggctgcgacccctgctcggattttcccctatggccggaacctttttcctggccgcagctcagatctccagggccgcgagctcccctaagctcgccatggcgatttccacggctggcagctgaccttcctgtgtcgcgtcctgactttgcccaatgcccggtcgagctctctgaccgccgcgccgtgaattttcctgcccgcgcgtgtctccttgctcacgcatcgccgtcgagttctct

SEQ ID NO: 143902 - DNA, 2081 bp, Zea Mays
acgggcgcgaacttgacacgcgccccctgccccgccgccgcagttctcacctctcacggccacgccggcacgtccgctcgcgcgcacactgttttttttttcttggtaagggccggcggccgggccgataatcgtaaaggaaggcgaggcaatacacccaccgagagagaagaactaagctttggacacggaagatcgcaagagcctcaaccacactattcaggtggcctaggactctacgagggacgttcgtcgtgcctcggatgagatgggtggcggcggcggaggaggaggaggcgggaagtccgagaaggcgcggcgttcgtcggcgcgggtgaggttgtgggtcgcgcgcgccagcaccgtgctgctctggacgtgcctcgtccagctcgcggcctaccgggagctctgggcgcccagcgtgctctccaggtggcctggctgcctcaaccagccgcacgtcgtgcagaggccatcggagcgtgtggcggacgccggccagacgcaggcagcgcgcgctttggtggtgctcccacccaaaagaatctacaggaacaacggctatctgatggtctcctgcaacggcgggcttaaccagatgcgagcagcaatttgtgacatggtaaccatcgcaaggtatctgaacgttactctcatcgtaccggagttggataaggcttcattttgggctgatcccagcgatttccaagacatatttgacgtggactacttcatagcgtcgctgagagacgaggtccggatcctgaagcagctgcctccgaggctcaagagaagagtggagatgggatccctccggtccctgccaccagtcagctggtccgacatcggctactaccgccgtcagattctgcctctggtaaagaagtacaaggtcgttcacctgaacaggacggatgcccggctcgcgaacaacggcctgcccgtggagatgcagagactgcggtgtcgcgtcaactacaatgccctgagatttacccctgaaatcgaggatctgggcagacgcctggttcgagctcttcgccggaacgggccctttgtggtccttcacttgcggtatgagatggacatgcttgccttctccggatgcacgcacggttgcagcagcatggaggctcaagagctcacgaagatgagatatgcctacccatggtggaaggagaaagtgatcgactcggacgccaagaggaaagacgggctgtgtccgttaacgccggaggagaccgcgctggtgctgcaggcgctcggcattgaccgcggctaccagatctacattgccgcaggcgaaatatacggcgggcagagaagaatggctgcgctcacctcggcttatcccaacgtggttagaaaggagacgctgttgccttgggaagtcggcctgttccagaaccactcctcccagatggctgcgctggactacatggtgtccctggagagcgatgtcttcatacccacctacgacggcaacatggccaaggtcgtagaaggccatcgcaggtacctggggtttcggaagacggtgctgctggaccggaggcgtatcgtcgagctcgtcgacgagtacaggaacggcacgttgcgctggaccgacttctcgtctgccgtcatggcgtcgcacaccagccgcatgggcgaaccgtccaggaggcagacggttcctgacagacccaaggaagaggactacttctacgcgaacccgcacgagtgcctgcaccagccggaagatgtctccgccttgtgatacccgcgctcccgcggtacaatacagtacagtggatgatgcgcgggctttcggagtccagaaccacatgtatatgtaatagactaatagcgcattcgacagcgttgcgttggcagagggtaaacgtaaacggacgaggagggcctcgcgttcggtccggttgaacgagcatgtgagttaggattcggtacacagattcatggaacggtggttcgccgattcttttttctgttcagaataagcagaccctttcgttgttgttcttgtgtacagcagacgaagtcgtgaagataataacaacagcagcagaatcgtcgtg

SEQ ID NO: 143903 - DNA, 2185 bp, Zea Mays
acgggcgcgaacttgacacgcgccccctgccccgccgccgcagttctcacctctcacggccacgccggcacgtccgctcgcgcgcacactgttttttttttcttggtaagggccggcggccgggccgataatcgtaaaggaaggcgaggcaatacacccaccgagagagaagaactaagctttggacacggaagatcgcaagagcctcaaccacactattcaggtggcctaggactctacgagggacgttcgtcgtgcctcggatgagatgggtggcggcggcggaggaggaggaggcgggaagtccgagaaggcgcggcgttcgtcggcgcgggtgaggttgtgggtcgcgcgcgccagcaccgtgctgctctggacgtgcctcgtccagctcgcggcctaccgggagctctgggcgcccagcgtgctctccaggtggcctggctgcctcaaccagccgcacgtcgtgcagaggccatcggagcgtgtggcggacgccggccagacgcaggcagcgcgcgctttggtggtgctcccacccaaaagaatctacaggaacaacggctatctgatggtctcctgcaacggcgggcttaaccagatgcgagcagcaatttgtgacatggtaaccatcgcaaggtatctgaacgttactctcatcgtaccggagttggataaggcttcattttgggctgatcccaggtactattttcctttctttctttctataccgattctcttttctgttccctttctaaaaagaaccgttttcttcggtttattctttcgcagcgatttccaagacatatttgacgtggactacttcatagcgtcgctgagagacgaggtccggatcctgaagcagctgcctccgaggctcaagagaagagtggagatgggatccctccggtccctgccaccagtcagctggtccgacatcggctactaccgccgtcagattctgcctctggtaaagaagtacaaggtcgttcacctgaacaggacggatgcccggctcgcgaacaacggcctgcccgtggagatgcagagactgcggtgtcgcgtcaactacaatgccctgagatttacccctgaaatcgaggatctgggcagacgcctggttcgagctcttcgccggaacgggccctttgtggtccttcacttgcggtatgagatggacatgcttgccttctccggatgcacgcacggttgcagcagcatggaggctcaagagctcacgaagatgagatatgcctacccatggtggaaggagaaagtgatcgactcggacgccaagaggaaagacgggctgtgtccgttaacgccggaggagaccgcgctggtgctgcaggcgctcggcattgaccgcggctaccagatctacattgccgcaggcgaaatatacggcgggcagagaagaatggctgcgctcacctcggcttatcccaacgtggttagaaaggagacgctgttgccttgggaagtcggcctgttccagaaccactcctcccagatggctgcgctggactacatggtgtccctggagagcgatgtcttcatacccacctacgacggcaacatggccaaggtcgtagaaggccatcgcaggtaggtactgtgtgagactgagactcagactgaggtgccacggcatagctctcgataaaaaaacggtgctgctgacgggaacacacgcacgtcctgttcttgcgagcgcaggtacctggggtttcggaagacggtgctgctggaccggaggcgtatcgtcgagctcgtcgacgagtacaggaacggcacgttgcgctggaccgacttctcgtctgccgtcatggcgtcgcacaccagccgcatgggcgaaccgtccaggaggcagacggttcctgacagacccaaggaagaggactacttctacgcgaacccgcacgagtgcctgcaccagccggaagatgtctccgccttgtgatacccgcgctcccgcggtacaatacagtacagtggatgatgcgcgggctttcggagtccagaaccacatgtatatgtaatagactaatagcgcattcgacagcgttgcgttggcagagggtaaacgtaaacggacgaggagggcctcgcgttcggtccggttgaacgagcatgtgagttaggattcggtacacagattcatggaacggtggttcgccgattc

SEQ ID NO: 143904 - DNA, 2872 bp, Zea Mays
gcaaaagagcaaactgccaagtgcaaagcgaaaccatcaaaccggtgccgatgctctgccggcgcccgtgccccggcgtgttcctccgcctcttcgccacttcctgccgccgcagctccctccacccctcgcagccgcacctccggacagctacagctctcccgacgctgcctgtggcgaagaaggtccccttcaatgtgtcggcgcacgggaggtcgtggagtgacccgtaccactggatgcgcgacacctccgacccggacctcgcggtcctcctcgccgctgagaacgcgtacgccgacgcgttcgtaggatcggcaggtggcggcggcctccgcgcgcacctcgccgcggagatgcgcgcccggctgcccgcttctactgccacaccgcctcagctctggggaccttggttgtattatcagtatgttccagagggaaaggagtaccctgttttatctaggaagctgaggccctctagtggtctggtaggaactctgcttgattacctttctggttctgagaaggagcaagtgttgcttgattggaacgaggttgcagaaaaaaatggttatgtccacattgggagttgtcgaatctctccagatcataggtttcttgcatatacagttgatacatctgggggtgaactattttcccttgaagtgaaagatctgctgtctgagcatgtcatctttagttcaccagacaagggagtagttagtttagcatggtctggcaacaatgaaagtttattttacactgtctgtgatgagactctacgtcctaaccaggttttctgtaaaaagttgcaatcggatgaagcagggtttctagttttcacggagaaagatgtaaactgttgtgtggatattacaagcacaaaagattttaagtatatgactgtcaattctaacactaggacatcatctgaggtttttgtaattgaatctgataatctaagagaaggattatggcctatacggaaacgtgttgacaaagttcagtactttttggagcaccacaacgggttcttttacattcttaccaatgctcctgtaaatgataccgaaacgacaactgaaggctactatctggccaggtgtagggctgaaaagtcactggtggatagatggcagattgtgacggtacctgactcggactgcaccattcaggatatggacatttttcatgataatttagttctctttcttcgaaagaatggtactcctcttttttgctccatcagtatgccaattgatgttgatgttcaggagccaaaggaacttgatgatctcaacccatggttttttcccataccgtcagagttatgcagcattgttgctggatccaacaatgatttcatgtcatctacttatcagctagttatttcatcacctgtgataccggacttaactgtggactatgatttgagaaaaaagactttcaccatccttcatcaagaggaagtaactaccatctctgcaaatctaggcggcctgggctttcaatccaatgtttcaagcatccaacaaaacatgcagcttgttaaaacctcacaaaattggagtgatctttccaagctattctcatgtgaaagggttgaagttatatcacatgatggtgtttcaatacctttagtgatcctgtattcatggggagcacattgtcatggagaatcacctgggatcttatacggttatggagcttatggagaggatttggacaaaagctggtgttctgagaggttaagcctcctctctcgaggttgggttcttgcatttgcagatgttaggggtggaggggatttatcatggcatatggcaggaaccaaagctaataaaatgcattcaattcaagattttgctgcatgcggcaggcatctcataaagcaaggctttgttcaccaaaatcgcctttgtgctataggctgtagtgctggtggtctgttggtgggtgccgtcattaatatgcttccagacttattttctgctgcagttctcaaggtcccctttcttgatatctgcaacacaatgttggatcctactttacctctcactgtcttggactatgaagaatttggtgaccctaatagcccagatgagtttgaggcgatcagcagttattctccttatgataacttagcacctgatgtgtgctatcctccagtcctggtgactgcctcgtttaatgatacaagggtaggagtttgggaagctgctaagtgggttgcaaaagtaagagatgtcgcgtgcccatcctgttcccagtcagttattctcaaaactaatatgcaaagtggccattttggtgagggtgggcgtttcacgcactgtgatgaaacagcctttgagtatgcatttctcatgaaggccttgggtttggatgacgtagctatgatgtagcgtactcatgcctgaggattttcacggaacagatttttttgtggctctggaagcaaaaactgagataattaccttttgtgatatgctcagggataagattgtatcctcataattattgattaaaagagctcgcaatggaaggtgatgcacccttgaggtgtgttctgtttggcattggcttttaatagtcaagctgtggatttctacatgcatattatcaacttatgctttcaaaaatagcacacttggatgctgctcatcaacagtgcaaaggtggcagatgagatccttattatggtgttcgatatggggcttttgaccaaaggataaatggttgatcatggatgttgattttgacttctacttcatacggcaggttggtgcatgttgctttcttctctttgggtcatctggcagatgatgtactctttttacgccatccttaaattaagctcaggttccatgtc

SEQ ID NO: 143905 - DNA, 1101 bp, Zea Mays
atggcccccgcccccgtacttgccggcattctgctcgccctcgtcgcaatggctgtcgccgtccacgcacacgcgccagcccactccccggaggcgtccgagtcaacgtcgccgtcggaggcacccgccggggcacctgatgatgccagggagatggagaccccgtggatgtcccccgccgaggccccggcgccctacggcgaaaacgccgcgcccgcggcttccccggaggaagaaggcgcgcccgccatggcaccgggcttcgacgctaacggacctgccgcagcctcgccggaggaagaagacgccaccgccatggcaccggactacgacgccaacggacctgccgcagcctcgccggaggaagaagacgcgcccgccatggcaccggactacgatgctaacggacctgccgcagcctcgccggaggtagaagcgccgacgatggcgccggacctgtctccctccgcgagcgagtcgccggaggaagcgccgacgatggcgccggacctctctccctccgccagcgaggcgccggaggaagaagcgcccacgatggcgccggaccactctccctccgcgagcgaggcgccggaggatgaagcgcccacgatggcgccggacctctctcccgtcgcgagcgagtcgccggaggaaaccccagcgggagccccagaattcgagggcgcctctatcgccgctcccccactggattacgtgcccaccatggcgccggcatttgctcccttcgggatcagcgagtcgccggaggagtctgaggccccagccggcgccccggaggaggaggaagccgaggccgaggccgagagcccatcctccgagacagccgccgccccgctctccgaagactacggcgtgttagaagaggaggtcgtagtactctcgcccgacgggtcggccgcggtcagcagcgaaccggaaaccgaggagagcccggccaaggagactcccgcggccgcggaggctccaggcccctcatccgacggcgaggacagcggcgcgagcacgggcgccccgtgtcgcagcctcgtgtctgccgtcgtcgtcgcggtcatgtgcgccgttgctgctttctgaggt

SEQ ID NO: 143906 - DNA, 1281 bp, Zea Mays
tttcacgggtccacgacagtgccggatagaatcggtccaccactccccgtaccccgaactacctgacctgagagagagaccgtgcctccctcgccgccgccgccgcagcatccctagtcggagaagatggctgagaagccggcaggtcccaccccgaggacgaggatccgaggcggtctcgcggcctcagctccctcctccaggaggctgtcttccgtatctttcaccgcggccccgagcaagatcaagaaggttcctgaccctccaaaggccgtgaggccatcaagagccacacctgccaagaagcggccacaagtggatcaagctcagaagcggagagaagaggtcgctgctctgcaggagcagcttagtggcctgcaaagtaagttgcatgaaaaagatgaagctctaagatccgcagagaacttgatcggccgagttactgcggcgaatgaagcagttgatgggttgaggagccagctctccgagaaggaattgctgattgaatctactggttcagagctgcacggtgcaaagatcatgctagcagagaagcaggcggcactggagaagttagagtgggaggcaaatgtgtcgagtacaaaggtggaagagctccaagctgatgtagcttctatggatactgaagtttctgctctgatgaagctgttcaggaaaataacagagagtgacagagcccctccacccagggatagaaatgacgatttgtctttggaatgcgagccagttcaccttgatgacacgttagacgacattgaccttgagaagatggagaaggagatgtcagcctacgtctcggctttgtctgccgcgaaggagaaccctacagacgagttcatgagagcagtcgccgatgcaagattaagacttcaagccgttgtactctgaccaagactagagcgttgcgttgtactgtgtaaccaacaggagcaagcaagtcgatagtacgtttgctaatcgctgtgttttgccggtggcccccctcagggccttttctgtgttctttctcctaccttgcatctgatcggcggccgctagtgacagtgagctagcttgatgtaacctgtaacgctatgaaccgtggtgtacctgactgaacctccgtaatagtagatggtatcgtgtacggtgtaccttttttttagcaacaagatggtgcggcctgtcttgacggctgaaagttcttgttttgttgtttagcaacaagataattcactatcttgcttttctgtttgtttgttaccccataaaccgaatcag

SEQ ID NO: 143907 - DNA, 1373 bp, Zea Mays
tttcacgggtccacgacagtgccggatagaatcggtccaccactccccgtaccccgaactacctgacctgagagagagaccgtgcctccctcgccgccgccgccgcagcatccctagtcggagaagatggctgagaagccggcaggtcccaccccgaggacgaggatccgaggcggtctcgcggcctcagctccctcctccaggtctcccttcccttgatctgcatttgcaccgccgtttcgtttgaatctttttgaactcgctccagctgttcgtttcgcattctctgatgcaggaggctgtcttccgtatctttcaccgcggccccgagcaagatcaagaaggttcctgaccctccaaaggccgtgaggccatcaagagccacacctgccaagaagcggccacaagtggatcaagctcagaagcggagagaagaggtcgctgctctgcaggagcagcttagtggcctgcaaagtaagttgcatgaaaaagatgaagctctaagatccgcagagaacttgatcggccgagttactgcggcgaatgaagcagttgatgggttgaggagccagctctccgagaaggaattgctgattgaatctactggttcagagctgcacggtgcaaagatcatgctagcagagaagcaggcggcactggagaagttagagtgggaggcaaatgtgtcgagtacaaaggtggaagagctccaagctgatgtagcttctatggatactgaagtttctgctctgatgaagctgttcaggaaaataacagagagtgacagagcccctccacccagggatagaaatgacgatttgtctttggaatgcgagccagttcaccttgatgacacgttagacgacattgaccttgagaagatggagaaggagatgtcagcctacgtctcggctttgtctgccgcgaaggagaaccctacagacgagttcatgagagcagtcgccgatgcaagattaagacttcaagccgttgtactctgaccaagactagagcgttgcgttgtactgtgtaaccaacaggagcaagcaagtcgatagtacgtttgctaatcgctgtgttttgccggtggcccccctcagggccttttctgtgttctttctcctaccttgcatctgatcggcggccgctagtgacagtgagctagcttgatgtaacctgtaacgctatgaaccgtggtgtacctgactgaacctccgtaatagtagatggtatcgtgtacggtgtaccttttttttagcaacaagatggtgcggcctgtcttgacggctgaaagttcttgttttgttgtttagcaacaagataattcactatcttgcttttctgtttgtttgttaccccataaaccgaatcag

SEQ ID NO: 143908 - DNA, 1267 bp, Zea Mays
accgacccggcgccgatgcccataaacttcgagagcgaccaccagctgaaacaccccgtcatctcctactgtctatgccatacggcggccgccgcgacgctccctaggctccgagtccgagctgggaaggaagagcccgcgttgctcgctcgctcgctcgcatgcagctttcccacacggcgccacgcatgcaggagcccgggcgccggcccgtaccgccgttcgcgggcgtcgacctccgccgccccaggggctaccccgctccggcggcgaaggaggcggaggaggagccggccccagctccggcgccgggcggcgacccgtgcccgcggtgcgggtcgcgggacaccaagttctgctactacaacaactacaacacgtcgcagccgcgccacttctgcaagtcgtgccgccgctactggaccaagggcgggtccctccgtaacgtccccgtcgggggcggcacccgcaagagcggctcctcgtcctcggcctcggcctcggcaacgccaacctcgaccggcgccgcacccaagagcccgaggtcgtccaagaactccaagcgtcgccgcgtcggcccggccccggcgccggaccccgcccctgccaccgccaccgccaccgctgacgtcgcgaacacggcaccgtcgacggaagccgcagcagcaacgcgtgccgcctcggagaagccagccgcgacggaacccgcagcggcaacgggtgccgcctcggagaagccggccgcgacggagctcgcagcagcggttgtctccacggagaaacctccggcggccgtcggcggtttcacggacacgtctactacggtgcccgagatcgggctcgcggatgtctgcagcggcggcgtgaaggagcttgtgccggacccgggccacttcgagtggccgtcgggttgcgatctggggtcctactggggcaccagcgtgttcgccgacaccgacccggcgctgttcctgaacctgccgtgagccgtgacaacgccacggcgtccatgctcaactaatcaaccatcacacgacccacgagatagatgagatgtgaaccgagcacgctgagcgtcaagctcttgaaggcttgaagctgtgctgtagtttcctgagcttactagcgatctctgcttgtctctgatctgataatctcttactagtcgccgtttgtgctccgatctagtaacggctaacatggtcggctgttacaagtgcatgaacctgtgcttgatcttgagctaaatcatggtgtttttgaggct

SEQ ID NO: 143909 - DNA, 576 bp, Zea Mays
cataagccatagcatcagccgcacccgagctagccagttgtatagcgacgcccacgcccgaaacacacacgtatgtctcgcgcgctcgcacttgcggtcctcctcctggccgccgccgcggtggcgccgctggcctccgccgacggcgtgaagtccgtccccatccccggcgccaaggaggccgccagcggcgccaagatgttcgacagggaggccgacgccggtcacgacccggtcagcggcctgccggccgacccggcgcccgacgcgcgcccctaaggctacgcaccgtcgtcgttgtcgtcaccgccgtcgccgtcccgacccgtttccgctgaacaccacgcgccttgtacgtgtgcttgtgatgttcggcctctgcgtgcgttttgcattgcttgcgtgcgttttccttcggctgccgtgccgattggtcgtggtggacgcagcgccatggataacggatcttaggtactcacccgtgcttgctgtacctgtacccatttatttggcatttctctctttttttttcaatatgccggaggatatataatttcttcgagaaaaaggaatata

SEQ ID NO: 143910 - DNA, 1052 bp, Zea Mays
atgaagtagcactgtcgcatcaggccgacagccgttcgtacaacctaaaagaagggaagcagagcaatgccaacgcggcgggggcggaccaggaagggcgaacgccggatcgacgcggccatcgaccacttcgtcgtcatgggctacgacgcacgcgacattagcgccgtcgttgctgatctcctcaaggtgtacgggggccctgatgcgtggcccttactggaggaaggctcctacgaggttgtgcaaaacaggctcttcgagattgaggacgaggagaagcagaagcaggaccagcagctgctgctggagcaccacgaccagcagctgctgctggagcaccacgaccaccagctgctgctggagcaccacgaccagcagcagcttgattgccagcaagtggaggatgagcgtcctcagcaccaagaaccagcagcagacgagggagtggaagtccctatgttcattgaaccacaagataacatatcaatttcaaaggtaccagcagagactaagtcagcagatgacgaagtggaaggccctatgtccattgaaccacctgtttgtgaagctgtattgccacttaatgtagctataaggactcgcccaaggcgaccctgctatggatggcttagtgagtcagaagatgaggaagaggaacaacctactggtcaaaaacatgaggtgcatgttctaagtcggggagagcgagcccagtagatgggtggctgataccaacctgacatggtccatgatgctccactaagatgcagaagtccagtgctgtatttttggtgtcgctgaaaccaaaaactaactttcagaagccttttttgagttttgacaagtctagcagtctagcagaactgcagaagtatataacaatatagaacgtgcgcttgatgagcgtaagtagagcatgttccgctaatttaaataagagcctttgactgaagcggtgacataatttttggaaacggagaaaagaagagcttaacttcgattgaagcagtgacgtaattttagaatatgatacgatgtttatcatccaa

SEQ ID NO: 143911 - DNA, 914 bp, Zea Mays
gaatgaatgaatgcgctagctgatcgatcaattgtggtttttccactgctatggctgtaggtgtacgggggccctgatgcgtggcccttactggaggaaggctcctacgaggttgtgcaaaacaggctcttcgagattgaggacgaggagaagcagaagcaggaccagcagctgctgctggagcaccacgaccagcagctgctgctggagcaccacgaccaccagctgctgctggagcaccacgaccagcagcagcttgattgccagcaagtggaggatgagcgtcctcagcaccaagaaccagcagcagacgagggagtggaagtccctatgttcattgaaccacaagataacatatcaatttcaaaggtaccagcagagactaagtcagcagatgacgaagtggaaggccctatgtccattgaaccacctgtttgtgaagctgtattgccacttaatgtagctataaggactcgcccaaggcgaccctgctatggatggcttagtgagtcagaagatgaggaagaggaacaacctactggtcaaaaacatgaggtgcatgttctaagtcggggagagcgagcccagtagatgggtggctgataccaacctgacatggtccatgatgctccactaagatgcagaagtccagtgctgtatttttggtgtcgctgaaaccaaaaactaactttcagaagccttttttgagttttgacaagtctagcagtctagcagaactgcagaagtatataacaatatagaacgtgcgcttgatgagcgtaagtagagcatgttccgctaatttaaataagagcctttgactgaagcggtgacataatttttggaaacggagaaaagaagagcttaacttcgattgaagcagtgacgtaattttagaatatgatacgatgttt

SEQ ID NO: 143912 - DNA, 442 bp, Zea Mays
aaaaacaaactaaaacataatcatacatggaacaaaaagcatagtaccatacaatactttacattaaaacatattacatcaaaaaaacatcatacaaaagttcatgcaaatacaatagcacaaaacaaaggaagaccaaaggtggtggagttacatgtagatgtctggcatagactggaatataacaacttcaggaaaataatgcatcagcctgcttgttgtggagcatagaggagcacataaccactatgtgtagttcaccagagaggagagatgggtgttcccacgggctaagacacaccaatcaagagtttctttcgaaaaagattcgcttgcattgaaggagatatgcccggcagatcactttttccatgtctcggatgaacgcttcaagctcccaaattcactgctgctacaatctagtcaacaatttgagtcagaa

SEQ ID NO: 143913 - DNA, 856 bp, Zea Mays
ctcgtcacttgattccttaagaacctagaaaaacaaactaaaacataatcatacacaatactttacattacaacatattacatcaaacaaacatcaaattaaaacataatcatacatggaacaaaactataacaaatcataaagtcaaaaatcacgatacaaaaaaaaaacaaagtaaacaacaccaaaacatcaagagcaaaacaaaacaaaaaacatggaaacatctaacaaaaaattacatcacaataacatggtagccacattcctcgtcacttgattccttaagaacctagaaaaacaaactaaaacataatcatacacaatactttacattacaacatattacatcaaacaaacatcaaattaaaacataatcatacatgcatggaacaaaaaacatagtaccatacaatactttacattacaacatattacatcaaataaacatcatacaaaaaacatgaaagaaagcaacacccaaacatcaagagcaaaacataacataataactaagcatacatggaacaaaactataacaaatcataaagtcaaaaatctcgatacaaaaaacatgaaagtaagcaacaccaaaacatcaagagcaaaacaaaacaaaaaacatggaaacatctaacaaaaaagtacattacaacatattacatcaaaaaacatagtaccatacaatactttacataatcatacatctaacaataaagtacatcacactaacatggtagccgcataatagaaaacaaaaaactacaaagaaacatcttacaacacaaaaaacaacatgataataacatcttacaacacaaaaaaaaaattgacaaaacaaaaaacacaaaaaaca

SEQ ID NO: 143914 - DNA, 2532 bp, Zea Mays
ctcggctcatcagtattattattattattattattcggctcctgctcatcagctgcagcagtcgtgctccggaccggagaagtcgaaatggaggagaggctgttcgccacggagaagcacggtggccgggcgctctacaggctccacgccgtcacggtgttcctggggatatgcctgctgctctgctacagggcgacgcacgtcccggctgccggctccggcggcagggcggcgtggctggggatgctcgcggcggagctctggttcggcttctactgggtcatcacgcagtccgtgcgctggtgccccatccgccgccgcaccttccacgacaggctcgccgccaggttcggagagcggctcccctgcgtggacatcttcgtgtgcacagcggacccgcggtcggagccgccgagccttgtcgtggccacggtcctgtcggtgatggcgtacaactacccgcccgcgaagctcaacgtctacctctccgacgacggcggctccatcctcaccttctacgctctgtgggaggcctccgccttcgccaagcactggctcccgttctgcaggaggtacggcgtcgagccacggtcgccggccgcttacttcgcccagtctgatgagaagcctcgtcatgatccgccgcacgccttgcaggagtggacgtccgtcaaaaacctatacgatgaaatgacggagcggattgactccgctgctcggacgggcaatgttcctgaagaaactagagcgaaacacaaagggttttctgagtgggatacgggtattacctcaaaagaccaccacccgatcgttcagattctgatagatgggaaagacaaggctgtagctgacaacgaaggcaatgtgctgccgacgctggtgtacgtggcacgagagaagaggcctcagtaccaccacaacttcaaagccggggcgatgaacgctctgatccgagtatcgtccgtgataagcaacagccctatcatcctgaacgtggactgcgacatgtattccaacaacagcgacacgatcagagacgcgctgtgcttcttcctcgacgaagaaacgggccacaggatcgcgttcgtgcagtaccctcagaactacaacaacctcaccaagaacaacatatacggcaactccctcaatgtcatcaaccaggtggagctgagcggcctggacgcttggggcggcccgctgtacatcggcacgggatgcttccataggagggagaccctgtgcggcaggaggttcaccgaggactacaaggaagactgggacagaggaaccaaggagcagcagcagcaccgccaccgcgtcgacggcgagaccgaagcgaaggccaagtcgctagcgacctgcgcctacgagcacgacgacgacacgcggtggggagacgaggtggggctcaagtacggctgctcggtggaggacgtcatcacggggctggcgatacactgcagagggtgggagtcggtgtacagcaaccccgcgagagcggcgttcgtcggcgtcgcgccgaccacgctcgcccagaccatactgcagcacaagcggtggagcgagggcaacttcggcatcttcgtttccaggtactgccccttcgtctttggacgacggggcaaaaccaggttgccgcaccagatgggctactccatctacgggctatgggcgcccaactcgctgcctacgctgtactacgctgtcgtcccttcgctgtgcctgctcaagggcacccctctgttccctgagctcacgagtccgtggatcgcgcctttcgtctacgtcgcggtcgccaagaacgtctacagcgcgtgggaggcgctgtggtgcggagacacgctgagagggtggtggaacgggcagaggatgtggctggtccggagaacgacctcgtacctctacggcttcgtcgacaccgtcagggactcgctggggctgtccaagatgggcttcgtggtgtcgtccaaggtgagcgacgaggacgaggccaagaggtacgagcaggagatgatggagttcgggacggcgtcgccggagtacgtgatcgtcgcggccgtcgcgctgctcaacctcgtgtgcctggcagggatggcggcggcactggatgtgttcttcgtccaggtcgctctctgcggggtgctggtgctcctcaacgtcccggtctatgaagccatgttcgtcaggaaggacagggggaggatgccgttcccgatcacgctagcctccgttggctttgtgacgctggccctcattgtgccattcttttgactttgaggtgctaataatacgtgtacgggcacacgcacgttcgcatgtatgacgattatgggcaacaggcgtgtaataccactaatacctattaaacactccagtctccaagtgatccattgctacacgtgtgttcctcctgttctctatatgcatgagctgctgatggtgatacgatactgtcagatactgcaataagacgccaaacaagataagcatcggcaatcgagtggatcctcacaaccacagtggacgctatgc

SEQ ID NO: 143915 - DNA, 163 bp, Zea Mays
tttttttgtattaacagacttgtgtttcttttttacagagaagatacttgtcttcctagccgctgcgggactgcctgcaccgcgtcgcgtcgccactgcaccgacccgccacagccccactagcctgactccaccgccaccctaggtataacctctatttctg

SEQ ID NO: 143916 - DNA, 330 bp, Zea Mays
atggcgacggcgcgacgcggaccagagctgcattgcgggcggctactgggaccgagagcggcgaggcgaagtgcagaggagacaaagggtgcgggagggtgggacgggtcaaaggcaaaggttggtggtaaaaggatgcgcttttcgagtggttcaacaaagcggttactcctcctcgctaatctaatggtgatgcgcttggggaaccgcggcggccctggggcctgggcgcagcgtgcagccgtgcagcggtgcaggggtgggtctctcgcgttgcccgagggtcgcggcgcaaacagtccctacgctgccaaatacgtacaaatttaa

SEQ ID NO: 143917 - DNA, 209 bp, Zea Mays
atgtatagtgctcagatgggatctcaaatgggaccccagttcacccgtccgtcacaatctggacagacccccaacaccaacgaaacacaagtatagttttgtagtatatttactttaatttacaattataatcatgcatagttttatttggttatagggttctgagaccggtcaaggaaactcacagatggacatgcagtggtcgatgc

SEQ ID NO: 143918 - DNA, 401 bp, Zea Mays
atggcgcgctccgcctccgcgacggcccccgtctcctgcgccattgaccctgccatggttctctctcacaagttccccgaggtcgcgtacgagtatgatgagagggatgaagtgttgtacgcgctggcgatgggagcttgcaacgcagatgcagccgatgagaaggagcttcagctggtgtaccacagggatggtcagtcctccattaaggttttacctacttttatttctgcacttaatgcaaaaactggcgatgggttttacatggatgtccctggccttcactataacccaacacttttactgcatggtcagcaatatatagagatatataaaccaattccttcacgagataatatagcagatggtaaattcttttagaaaagcagggccctacatcc

SEQ ID NO: 143919 - DNA, 1064 bp, Zea Mays
ctagcggctccccgagcaagatatagccagccgccgcatctataaaacgcgcgctacccgccccacccaccgctccccctcctccactcgcctgtgtgtgtctgtctgtccatccatccatccatcccgctgccagtcctcgcgccggccaccccgaaataatcggaaattgcaacccggtccacgggtcggatcccccaaaccgacgaaccctcccgagctcgcccggcgatggggatctcgagcatgccggagccgcgggacagcctgctggggtacctggtgtacaacgcggtggtgtcgatcgcggcgctggcggggctggtgcgggcggcgctggtgttcctggacctgcaggccgcgcagctgcccgggggcgcgggcgcgggcgcggacgacgaccgtctcgcggcgtcgggcccgggcctgggcctggcggagcggttcctgagggccttccggccggcgctgtacggggtgctggtgtccacggcgtgcggcgcggcggaggcggccgcgggcgacgacgactgcagcgtgtgcctggccgggttcgaggcggaggccgtggtgaaccggctcccctgcggccacctcttccaccgcgcctgcctcgagacctggctccggtacgagcgcgccacgtgcccgctctgccgcgcccacgtgcccctccccgccgacgagacgccggtgctccgctacccggagctcgagtgatccgggcctcggcggccgtcgcgcgcctcggctgtgtgctgcaagctccgtgtggccttccgtgtgcgcgtagcaaaaggaaaaaaggagtataggagcggtagtagtagagttgctgttgctttccctttctcgttttgtgttttgcggttgccctgcccccatgctcttgttgtttccgcgctgtcgctgtagcgtgtaaatactccggttcgcccttggcagcagagagtagtagagtgctcccgtggctgggccgatggtgtagcaccttttacgagctcagctcgtgtgtgtacatttgcatgctttcaattcagtttcccgagccaaaatatcgagga

SEQ ID NO: 143920 - DNA, 303 bp, Zea Mays
cagtccgctccacctcactaaactaatcccgccttccaccgctcgccccccgttccgttccacacagccacgcgggttcgttcgttcgttagccgccgtgcccgtggcgcatcggacgctcatcgctctgcgcttcggtagcatgtgccgggcccgggcggtggccggtggctaggcagtagcgggggtctccggtcgcgtcgcgcctgctgcccggcagcgcgcagcttggtcatgtccccgcttgtctggggcgcgccccgaccgcgccagagccgctgggcagagcatcatcccccggtg

SEQ ID NO: 143921 - DNA, 625 bp, Zea Mays
aaaaaaatcgaacggaaatgttcgtgatcgtgagcgctgcgaaatcttgacctggtgccatgtagccgtacgagccggcgatgcggggctgcttgccggtgtcgagcatggagctcgcggcggccaggacgcgggcgaggccgaagtcagcgaggtacggctcgtaggacgcgccgagcagcacgttcatggacttgacgtcgccgtgcaggatggccggcacgcagtcgtggtgcaggtacgccacggcgtgggcgacgccgagcgcgatctcgtagcgcgcgccccactcgtccgcgggcgagcccttggcggcgcggccgccgtgcaggaggccgctcaggctgccgttggggaggtagctgtagaagagcagcctcgtgccgccgttcgcggcccacccgaggaggcgcacgatgttgcggtggcggatggagcccagcgccgcgatctcgctgcggaacgccgccgacgtcacctcgtccgacgaccacatcttcttcacggcgagggtgtagccgttgggggtgtccaccttgtacacggcccctgagctgccggtgccgatcatgttcgcggacgtcagccctcggagcacgtcgtccatggtgatgtcgagcttctg

SEQ ID NO: 143922 - DNA, 838 bp, Zea Mays
accgaaggtccgaagccgagccacggccgccgaggcgtcgcctccacgggacgggaccgcctgcaccaaggtgaggtaccataccacccgtccaccccacgttcccacccaaacggccgtcgaactaaccaatctgacggtacgagcgcacttgattcggttcgcctccaccttcctttattatagttgtagcgtcgccgctcggccgggcacgcacgcccagacagacgagaccagatcggggaccctcgcggcgcccagttcccgagcgaacccaacccactacccacagccagaagcaaaagcccctcgccttttccgcgccttggttctcctcccgtccatccgcggcgagaacgaccgacgacgacagggcgagatgtgctgctgcccgagcaaggcgtgctgcatctgcacgctcatcgtgctggtgctggtggccgtcggcctcgtcttcggcttcggcgtctacacccgcggcttccacaagctcaccagcatgcacctgcaggacgatgcatacggccgcggtggcgccggcggctccttccgcgcctacggccacttggccccgccgccgtactagaaggaccgccgccccttctccgagatctagggcctggatgctgggcgattcgagccccgctccgctctcggtggagttggatgaactgccgccgccgccgccgcctgtaaaaaggaaatgtatcatgggattttcgttgcttgctgcattttggttttgtttgaaccaatcgattggattggctagtaattcgatttgttgaagactgagtgagattcgacaacatattatcattatcccgtccgctgctga

SEQ ID NO: 143923 - DNA, 951 bp, Zea Mays
atggcatgcttgtttctaaaacaaatgcagtagctttgaccttttgccatctcaattgacatatcatagccatcaagcagttccaacttccaagatcatgttttttccccaagaatacaaagtctaatagtctactagatccaaaagtttgtggaaatcaggaaagaaactgatgaagattccacaattcaccaaagtgaaatagaatggagcagctcacctgtagaagagttaaatgagaagataaagatgctcgagtggaagctggaagaagccaccatgctcatcaaggagcgagattcaaaaatacttgaactagatgcactcagccaagtacaaccacatgataccatagcatgtaacgatgatctgctgtctttacagtctgatgcagaccaactgctcttggagaagatggaggcagagattcagtgttttatcctgacaagagcttcgcacgattggaaactcctggccaagaatcaatttgctcttaacgaggcacagaaatcccttctgacggatcacaaatccttagaaaccaaattgcggcatgccgagaacagggcgatgatgctggaggatatggtggataaactagactcgcaatgcaaggagctgtctgagatttcagaagttctgaagctgcaggccagagctagcagagcctccttgttctgctcggtccagtttatactgctatgcatagccatcgggaccatcctcgttcgcttcctgccgccttctccggagattgtacctacttgaggttagagaattaggccaatcagcccagcctttgattaggcattgttgcaatattgttcactgttacttgttaggcatcaatcgccttacaaattttcgtctttgtaccatcaactcgattttgctagtaacttcttatgaatatgaatttactgtacttctggcttttctggattctggaaa

SEQ ID NO: 143924 - DNA, 1983 bp, Zea Mays
actgatactgtctgtttcctctcgccttccactccctggatctccagttccaggctaggcccgagctggggaattccgatccccccaccaagggctcgccccgatcccaaggactcgtgcctctcgtcctccgatgtggcaactcatcccatccggcttctaaagccgcggccaaggttgtcaattccggtggcaggcggcatggattccggcgccaacagcgtcggcgagtcggtgggcgagtcgccggtgcccgcgccggcgcctcagacacggccagccgaaccggtcacaaagggccgcgggctccgccggtggcgtcgtatcccgcgcgagcagcaccacgaggggtctccggtgagccccgggctcggtaacagtgctggtgctagcgcgggtgaggacttggcagcgcagctccacaagcgtcgttacggtcctgccgacgacaagcccaagggaaagcaggacgcggctgcagaggaggtggagagctcggtcgcgtccgtgaagtcaagcttcgtgccgctggaggtgtccccacctccgccgccgacgctgactaggttggacccgaatctgggccacctgattgccaccaccggtttctcggtgggagccggcggcgccgattcggacaacagcgatgaccgcaccagcaagtcttccacggccgccagcgcgccgcgccacgacttctcgtctgtcggcttcggccgggagcgcgacagggcgcgatcccgcgcccccagcgctgctcacggcaagagcatccgtgctgcacgtgtgcgcggcgcctcctccacggctgaagcagaccattctcgctccagcgtcgagtccaacctccgaagctctaacgctgctcatgcgcggcgatctattaccgacgtcacaagcaacggtgttcacaaggttctattccctgatggtcaacaaagtgacgacgaacctccaagtgctggcctgcggtatgctacaggaggtgtctgcaaggagaatgggagtgtagtagggatattggggaactgtgacactggttccaacaatcatacctttgatgaagcgagtgtgggcaagtttgagaatggagagactcattcatacttggatccgtatgttgagtcgatggcactgcttcagtcggcacaagaagcgcttgagaatgagatccaaaagtttgtggaaatcaggaaagaaactgatgaagattccacaattcaccaaagtgaaatagaatggagcagctcacctgtagaagagttaaatgagaagataaagatgctcgagtggaagctggaagaagccaccatgctcatcaaggagcgagattcaaaaatacttgaactagatgcactcagccaagtacaaccacatgataccatagcatgtaacgatgatctgctgtctttacagtctgatgcagaccaactgctcttggagaagatggaggcagagattcagtgttttatcctgacaagagcttcgcacgattggaaactcctggccaagaatcaatttgctcttaacgaggcacagaaatcccttctgacggatcacaaatccttagaaaccaaattgcggcatgccgagaacagggcgatgatgctggaggatatggtggataaactagactcgcaatgcaaggagctgtctgagatttcagaagttctgaagctgcaggccagagctagcagagcctccttgttctgctcggtccagtttatactgctatgcatagccatcgggaccatcctcgttcgcttcctgccgccttctccggagattgtacctacttgaggttagagaattaggccaatcagcccagcctttgattaggcattgttgcaatattgttcactgttacttgttaggcatcaatcgccttacaaattttcgtctttgtaccatcaactcgattttgctagtaacttcttatgaatatgaatttactgtacttctggcttttctggattctggaaa

SEQ ID NO: 143925 - DNA, 231 bp, Zea Mays
atggagaaagtgaaaggggctacatcgctcctgatgaggagccagaagtacgccatgctaaagcagcagctcgccttggccacccaatttgaggattacaaggaagtagcgaggctaagggacttgccgaggtcgttcgaggaggagcctgtgttgcagcaccagatgatgaagaaggccattgaggaggagagatttgctcatatattaactgaactaccaacattttag

SEQ ID NO: 143926 - DNA, 661 bp, Zea Mays
gctacccaaacagcaacttcctcccaaattcttttgatgaaacgacattccacaaaaaggtgaagccccgattcctgggcagcacgacacaagacgcaagttggttcatggggccaattcctagctgaaaaacttgcattttggaggcgcccaattcttccagatgatgaggtcataatttgtgtgaactttaaaagatgaaatagagaaacaggtgtccgacatgctgagccaaggtgttattcaaaatagtaatagcccatttgcgtcaccagtattcttagtaaaaagaaggacaacacctggcatttttttgtcgattatcgctacttgaatgctttgactctgaagggcaaatatccagtaccagttttcgaccaacttatggatgaactatctcaagctcaatggttcagcaagctggatcccaaagctggctaccatcaaatattgttgcaaccgagtgaagaatacaagacaacctttcagacacatatatgtcattttaaatttagagttatggtctttggtttagttggggtttcaaatactttcttccaagctatgaatgaaactctagctctagtccttcgcaaatcagctttggttttctttgatgatattttgatctatagtagatcttttgctgaccatttacaac

SEQ ID NO: 143927 - DNA, 1457 bp, Zea Mays
ctccttctaccccttcctggtgctaacatatggtatcagaaggttcatcctggttcctactctcccaattccgcggcgaccccgatccactgccatggcgcccaccgacgcgtcgttctccaaggtgctcgtcgaattgtagtagatggaacatcggctgaccggcgccatcgagggccactgcggcctcctcgagtgcaacttctacgatcgctgcgtcgccctcggccgccatctcgagcagctgcgacgacctcgcccaccacgtcgaggaggcggagcaacgtgcgaacgcgcgtctgatcacggtggagatggcgcaagcagagttcgaacaatggagtccggcgattgagaaacgcgtctcagatctatcgctggaggtgacgcgggctaggcgcttcatggaacccgagcatcgcgccccagccttccagcaaccgggtcttttcggaccgcacgggtcggcagccgagcgcccacctgccagcttcactgtcgacgggccttttggccaccgcttcgaacaacatcaccgggattgtgagtttggtaccgatcccaaacgcgcgaccccgtcaaggtgcaggaagaagcgaccgatttcactcaatctcggcatccggaggcatcattcaaccggacggctcagaagaccccttatacaattcatgaagcagccaagtccgatcggggccctaaaggcaactatgctattgctaaattcactgatgtgagcaagccctcttcacattcagataaactggcctctcttcgcagttatcggtgagcacgtggtctgtgtggtcgctgcgccgagaagtggtcgcatgggcacatgtgtgcatcatcagttcagcttcatgcattagaggaagtgttggagctggtcagtactgatggtgaagtagaaaatcccagagcctgtttctccttagatcatgatggctttatctcaagcaacatggactggcaccgagggtcctcaaacactgaaactgaagggttccattcagtccacacctctcctaatactggtagactctggcagttctcacacattttttagtacacgattgtcaccttctttgcatggtttctctaccaggccatttcctttatcagttcgactggccaacgaagatgttctctgctgtgaacatcagctattgcaagtggaatggtttatacaagatttcagtttcgtgtcagaccttctgttgttgcctatcacaacttataactggtcgtaggaatggattggcttgaagcacacagtcctatgagaattgattgggcaagcaaattgatggcaataccttataatggctctactgtttttctgcatggtatgcatccaaccgtgcctgttggcactactgtggaagttgtgttactggattccctacctgaaactaacaggtccttggaaggatcagaccaacttcaccctgaca

SEQ ID NO: 143928 - DNA, 2653 bp, Zea Mays
ctagtccctacccggctctctccctcccccctctctctaaaaaaagtagcgcccggagaaccgagaggctggagaaataaaggcggaaagagggagggaaatctcactttgttggggattctttcctccgtttccgactcctttgttctcttaagtgttcttggttagtggaatggaagctcagcagccccatttatgcccccgagagcctcgtcgttcccctcgtgtgtaggtgtagcctttcactcggttggtggaagggcgaggcacagaagaacatcgataaagggtgtgtctattttttagctcttcgtgttcttgtaggaggaattcccgttcacatgatccgtgcctgtacctgacgggccttgtcgcgctctgctgcttcgctttcggggagaggaggactcgactcaaatcacttggtagcggagacgtcgccctttctagttcagtcgagagatatttctggcatggccggcgcaagcaaccatggatccctcaccgacgaatggttgccgccccctacaccaagcccaagaagtctcgtgtcaagctttctgaatgaagaattcagccccgggccattctctggtcttttcagtaaacatggcgccaatagaccccatgatcaatccgaaaagggcagaggagctctgaattcgagcgaggagttccctactcatgctgtcaaagacccatttcaaaagggtttctccctggagccaaatttgttcagtgctaatcatatatcaaactccaatggtggtttggcagagcgcagggctgcaagagcaggtttcagtgtcccgaaaattgatacttctcgagttggttcatcagcagttattcgatctcctgtgtcaattccacctggtctaagtccaactacactactggagtctcctgtttttctttacaataaaatggcacagccttctccaaccactggcacgttgccatttttgacggctacgaatgataagtcgacaataccaccagctaccaagataactgaagattctgcagtttataatgatgtgttttctttccaaccccacttaggttctaaagaaacaggtttctctactgcagaaaaggtgatctccttaactgttagtgtctagctgtattttccctcatttttgcagtgcagtgttatagtactactggcatccttctattgccaacctcaccaccaaatgtcctctttttgtttttttgtatagaataccttttagtttgttcatgtgcctgagaaaagttttgatctacaggactatggcgcctatcagcaaaagcattcattgtggaatattcatcagcaggaatccagtcttcagtcaagttttaccgcagtcaaggacaacactagtgcaacaattggtgaaacgaagacatctagctccatgttcagtgatagtcactattcagctgaccaacagcaaggtgaagagacaaacatgaaggagcaaggcaaaggtgtcgaggctagatcagctgcttttcttcctgcaccagtgcataatgatgcatctctcctggattctcaagatgcagttgatgtctcgtcaacgctgtctaatgaagaggacgagagggcaacacatggcactgtttctatagagtgtgagggtgatgaagatgagactgaatctaaaagaaggaagttggaattagatgctttaggagctattgctattgctactacctccaccaccagtaccattgacatgggccctgcatcctcaagagctgtccgggagcctagggttgttgttcagaccacaagtgaggtagacattcttgatgacggttatcggtggcgtaagtatggacagaaggttgttaagggcaatccaaatccaaggagctactacaagtgtacacaccctggctgttcagtgcgcaagcatgtggaaagagcatcacatgatctgaaatcagtcatcacaacatatgagggaaagcacaaccatgaagttccagcagccagaagtagtgggcaaggcagttctggttctggcagcggtccatctgcaccacaagctggtggttctcaccgtaggcaagaacctgcacaagccagcttcgctcactttggtacatctcctttcagctccttcggtctcgcaccgagcggacagttgggaccaacaactggtaatttccgcttcggcatggttccgccaggcgcgacgatcccaatgccctctctaggatcacttgcccctacaaaaatgattggaaatccatcagctatgcaggggtacccagggcttatgatgccaggagagccaaaggtagagcctttctcgcgaccacacttcccaacgtcaattgcacctccgccagcttaccaacagatactgagcaggcctccttttggtcatcagatgtaaataataggaaggggatagatttgcttcggcttgtatacatgatagctacgctgcaacatggctttgttctagttttgttgatggatcgtccgatttttacttctttttaaattttcagctcacggctcacgcatttctttgaagcaaagatggctgaggatgataccctgtcgtgatgtgtaatcagggaaaggatacttttcgtccttttgatactatcgaaatttgaaaatgatcaatccgatttttta

SEQ ID NO: 143929 - DNA, 2234 bp, Zea Mays
actttgttggggattctttcctccgtttccgactcctttgttctcttaagtgttcttggttagtggaatggaagctcagcagccccatttatgcccccgagagcctcgtcgttcccctcgtgtgtaggtgtagcctttcactcggttggtggaagggcgaggcacagaagaacatcgataaagggtgtgtctattttttagctcttcgtgttcttgtaggaggaattcccgttcacatgatccgtgcctgtacctgacgggccttgtcgcgctctgctgcttcgctttcggggagaggaggactcgactcaaatcacttggtagcggagacgtcgccctttctagttcagtcgagagatatttctggcatggccggcgcaagcaaccatggatccctcaccgacgaatggttgccgccccctacaccaagcccaagaagtctcgtgtcaagctttctgaatgaagaattcagccccgggccattctctggtcttttcagtaaacatggcgccaatagaccccatgatcaatccgaaaagggcagaggagctctgaattcgagcgaggagttccctactcatgctgtcaaagacccatttcaaaagggtttctccctggagccaaatttgttcagtgctaatcatatatcaaactccaatggtggtttggcagagcgcagggctgcaagagcaggtttcagtgtcccgaaaattgatacttctcgagttggttcatcagcagttattcgatctcctgtgtcaattccacctggtctaagtccaactacactactggagtctcctgtttttctttacaataaaatggcacagccttctccaaccactggcacgttgccatttttgacggctacgaatgataagtcgacaataccaccagctaccaagataactgaagattctgcagtttataatgatgtgttttctttccaaccccacttaggttctaaagaaacaggtttctctactgcagaaaaggactatggcgcctatcagcaaaagcattcattgtggaatattcatcagcaggaatccagtcttcagtcaagttttaccgcagtcaaggacaacactagtgcaacaattggtgaaacgaagacatctagctccatgttcagtgatagtcactattcagctgaccaacagcaaggtgaagagacaaacatgaaggagcaaggcaaaggtgtcgaggctagatcagctgcttttcttcctgcaccagtgcataatgatgcatctctcctggattctcaagatgcagttgatgtctcgtcaacgctgtctaatgaagaggacgagagggcaacacatggcactgtttctatagagtgtgagggtgatgaagatgagactgaatctaaaagaaggaagttggaattagatgctttaggagctattgctattgctactacctccaccaccagtaccattgacatgggccctgcatcctcaagagctgtccgggagcctagggttgttgttcagaccacaagtgaggtagacattcttgatgacggttatcggtggcgtaagtatggacagaaggttgttaagggcaatccaaatccaaggagctactacaagtgtacacaccctggctgttcagtgcgcaagcatgtggaaagagcatcacatgatctgaaatcagtcatcacaacatatgagggaaagcacaaccatgaagttccagcagccagaagtagtgggcaaggcagttctggttctggcagcggtccatctgcaccacaagctggtggttctcaccgtaggcaagaacctgcacaagccagcttcgctcactttggtacatctcctttcagctccttcggtctcgcaccgagcggacagttgggaccaacaactggtaatttccgcttcggcatggttccgccaggcgcgacgatcccaatgccctctctaggatcacttgcccctacaaaaatgattggaaatccatcagctatgcaggggtacccagggcttatgatgccaggagagccaaaggtagagcctttctcgcgaccacacttcccaacgtcaattgcacctccgccagcttaccaacagatactgagcaggcctccttttggtcatcagatgtaaataataggaaggggatagatttgcttcggcttgtatacatgatagctacgctgcaacatggctttgttctagttttgttgatggatcgtccgatttttacttctttttaaattt

SEQ ID NO: 143930 - DNA, 2018 bp, Zea Mays
atggccggcgcaagcaaccatggatccctcaccgacgaatggttgccgccccctacaccaagcccaagaagtctcgtgtcaagctttctgaatgaagaattcagccccgggccattctctggtcttttcagtaaacatggcgccaatagaccccatgatcaatccgaaaagggcagaggagctctgaattcgagcgaggagttccctactcatgctgtcaaagacccatttcaaaagggtttctccctggagccaaatttgttcagtgctaatcatatatcaaactccaatggtggtttggcagagcgcagggctgcaagagcaggtttcagtgtcccgaaaattgatacttctcgagttggttcatcagcagttattcgatctcctgtgtcaattccacctggtctaagtccaactacactactggagtctcctgtttttctttacaataaaatggcacagccttctccaaccactggcacgttgccatttttgacggctacgaatgataagtcgacaataccaccagctaccaagataactgaagattctgcagtttataatgatgtgttttctttccaaccccacttaggttctaaagaaacaggtttctctactgcagaaaaggactatggcgcctatcagcaaaagcattcattgtggaatattcatcagcaggaatccagtcttcagtcaagttttaccgcagtcaaggacaacactagtgcaacaattggtgaaacgaagacatctagctccatgttcagtgatagtcactattcagctgaccaacagcaaggtgaagagacaaacatgaaggagcaaggcaaaggtgtcgaggctagatcagctgcttttcttcctgcaccagtgcataatgatgcatctctcctggattctcaagatgcagttgatgtctcgtcaacgctgtctaatgaagaggacgagagggcaacacatggcactgtttctatagagtgtgagggtgatgaagatgagactgaatctaaaagaaggttaatatcatccatcaggtaaccatttaagacttgatgcagacattgtactgaattcgctggtactctttttcaggaagttggaattagatgctttaggagctattgctattgctactacctccaccaccagtaccattgacatgggccctgcatcctcaagagctgtccgggagcctagggttgttgttcagaccacaagtgaggtagacattcttgatgacggttatcggtggcgtaagtatggacagaaggttgttaagggcaatccaaatccaaggtcacactttcactaccatttcttacactaaatgactaaactgtatccctccatcccctgaagctagtaacattgattcacttgcatgcaggagctactacaagtgtacacaccctggctgttcagtgcgcaagcatgtggaaagagcatcacatgatctgaaatcagtcatcacaacatatgagggaaagcacaaccatgaagttccagcagccagaagtagtgggcaaggcagttctggttctggcagcggtccatctgcaccacaagctggtggttctcaccgtaggcaagaacctgcacaagccagcttcgctcactttggtacatctcctttcagctccttcggtctcgcaccgagcggacagttgggaccaacaactggtaatttccgcttcggcatggttccgccaggcgcgacgatcccaatgccctctctaggatcacttgcccctacaaaaatgattggaaatccatcagctatgcaggggtacccagggcttatgatgccaggagagccaaaggtagagcctttctcgcgaccacacttcccaacgtcaattgcacctccgccagcttaccaacagatactgagcaggcctccttttggtcatcagatgtaaataataggaaggggatagatttgcttcggcttgtatacatgatagctacgctgcaacatggctttgttctagttttgttgatggatcgtccgattttta

SEQ ID NO: 143931 - DNA, 425 bp, Zea Mays
gtttcgaagaacaatatggttttatggaaccaactcaatagaattaggattagatggattgcggtacgaaatgggagttcatacttcatataactatttcttattcgtgctgatattttttggtgttcatatacctattcattatgcgtcgtttgcttggtacttgcacatgattctgtcgaattgtccgttacatggctcacaggttttggccccagttcattgatttgcttgttggtaccgctattgaccatccaatgcagtgttctcaaggtccaaagtacgtggaccttcagttggtgtaatcagaagcaatatccaagatattcattatgcacttctacaaaatgtaatgtaatcctaagtgttcatccttttatttttcttgagtgaatgaaatgttactaaaattattcattttccag

SEQ ID NO: 143932 - DNA, 303 bp, Zea Mays
atggagcaccccttgataattgacatggcggcgtgtgccatggacgagctcatctggctcgcccaggccggcaagcaaatctgggtcaagggaatgtccggtgacgcgaggggatttctcagctcagacgcctacccgatctgtttatttcctacaaacgctcccccaaaagttccaaataattcttccgcctctgccaagttctctagaatcccccaggttgatgctgcccctgccccatcgattggatcttgttcgatttctctgtttctgcagatcctgtgtgcatccgctcccaggtag

SEQ ID NO: 143933 - DNA, 791 bp, Zea Mays
gatagcatcccgcagccgccataatcctcccaatctcgcgctcccctgtgctccgcggcctccacatttcacgcagccctgcgccgtgttcgttcgcgaggttggggccgatgatggcggcggcggggcggcctccgatttctgcgcggcgtccacatgcggccggctatgttctgcctccggaaatctcggtcgcgatcgatagcctctccatcccgcggccgccacctgatctcgcgtcgcgcgtccccaccgtgcccgccgcacacgccgcgatgagatcctggatccccctgcgacatcctcctccaccgcgccatggccgcccccgacgtcctcgcgtgccgctccccgaggtggcgggcatggtgcgcgcagctatcgcgggggtcacgacggcgacgcgattccaggagctggtagactggatggaggagcggaaggcggcattcagggacgacggcaagtggacagagacggtgaatctggggctcaggagccccgcgctcatcatgttcgggctgcttcagttcgccatcgacagggacctcgggttcgggaagaccagcctcgtgctgccctgggtgcgccatggccggctggggtccgcgtccgtgacggtggtgccctgccccaacggcgacgggtcgtggttcttcggcggcactaggatgtggtcgcggctcatggaggtggtcgaatccgatcctttgatgaagccgacagcgaacccgagaatgggtgacaccggcggggatcccgtctgtgaccctaagcgacgggaactgtga

SEQ ID NO: 143934 - DNA, 105 bp, Zea Mays
ggaaaaaatccgagacataaactttgtatgtgtgtacatgtaattgtatgtttatgcttctatgtatgtacatccatggttgcctaatttagctatgtactttac

SEQ ID NO: 143935 - DNA, 1720 bp, Zea Mays
tgaaactttaacaaaaagagcaaagcataatccattccttagcccagtaccgactgccgtggccgccgcccattcagtcccttcaaactagttgcaagaacaaatgcgaacgatacagatgctcaccacccacctgaccagctgacccatcgcagaggccggcgggcgttgctgaagaacccagccatgtcgtcgtcgtcgtcgtcaggtccagcgagggggagcagcgctagcgcgggcgagagcctccggaactcgtgcaacgacttcgcccggaccctgtctcggctgccggccagcatcatggaggggctgtcgaggtccatcccccgccgcgccccgaggaggagtcacccctcggttccccaccatctcctgccgccgccgccgcctcagctcgtccccgacgagctcttcttcttcagcgtcttcgagcagcagtacggcggccaccaccccttcttctacgggtgccgcttcgccgacgccctgcgggccgcgcggagggagggcaagctcgttttcgtgtacctccacgacccgggccacccctacaccgagcccttctgccggaggacgctctgctccgacgtggtggtggagttcctcgacgccaacttcgtgtcctggggcgctgtcagcggcagcggagagggccctggcatggtagcctcgctgcagcccggcagcttcccgttctgcgccatcgtcgctcccgtctccgatgaaagcatagcagtcctgcaacagatagaggggccagtctcaccgtccgagctggtggagatcttgcagcgcaccattgacgagcagcgcgcgactttcgggccctccggccctgtcgaccaacctgcagctgccagatcggcagaggaagaagagaggaggagatcggcgcagcggctacgacaagaacaggacgctgcttacatggagtccctccggaaggaccaggaaaaagaaagatccagaaagagccatcaacagggagctgccattgccattgccaagccgagagcaggtaacgagcttcgcccaagacgtgcaggccaggcatcaagagaacctatcaagacgacgactcagatcagagcatcccctcacaaggaaactgcaccttcgcacagaactgaaccaaataccaagatcctgataagatttcccaacggtgagagaaggcagcagagcttccatcacacggacaccatcagagaggtctacaggtacgtggactccttgagcatagcaggcattggaagctatcagttcgtacgaagctacccaaggaagacgtacggtcagcagcagctggggatgacactcagagatgcaggtttctacccgaccgtgacattgtacatcgagcagcttcagtgattatacataaacttcaatcaaatgatgcaattgatatatatatctctggagatgtgtggaagaaaaaacaagacaaatgtctgtatatattatgtgccttataatcagttataaaaatccacatatttcacttagctgagaaccttgtactactggtaatccacatatttcacttaactgaggacctagtactagtacatattttatactagactccacttttcttttctttttttctttttatttgaaactatactaagttctccaaattgctaaagacttgagcaactcgtacagtcaaatggagataacttactactagtgcatcaggcgtgcccatgcg

SEQ ID NO: 143936 - DNA, 545 bp, Zea Mays
gggaacaaccgcgagcagcgaatcaagccaagggtacatacggcgatggaggcggccaaggagcggcagcagcggaaggccgccggcgagggcgacagcaccacggtgcagctgccgacggagacgagcccgtacgtgcagtacgagggcctcgaggactacaagatgcgcggctacggcgcgcagggccacctccccgtctccgacgtaccccacggcggctccggcactgaggcgcccaccgtccccggcactgccatccccgtggcggagccgaagcgccgcgacgacgtccagcctcagcgagacctgggaggagacggaggagggggcgtccggcgccccggggacacgtccaccgacgccatcaaccgccacggcgtgccgtagctttagcttggctttggctgggtctcgtccgggcgcgcgcgtctccaggagaccaggacacatggccgagcctctcgtcaatgtgagcctgtccgtgtgttggatgtaaaaccatacgcaagttctgtaactaaaaataatgggcgctttatgtc

SEQ ID NO: 143937 - DNA, 1624 bp, Zea Mays
ctccagcatgctctggagctcaccgtctcaccgagtccaaaacccagaaccccgcggtcccgactctcgccatcggcgactcgccaccgttcatcccgcctcccgaattcgcagcttgtaaatggttaccgcctctctcttctccctcccatcgctccgtgtcctctcccgcacctctgcccatggcccccggttccagatcctcgccgctaggaagccagtggagtcctccaccgccaccagcggcagccgcagaggcggaagcaagggggctgggcttctgtcggtgttggaccgcgcgatggcggacgaggaggagtaccggcgcgcgcgcgcccaggtgcagcgcaagggcgtggaggtggaagggtacgccatcgaagggatctcggtgggcgggcacgagacctgcatcaccgtgccgtcgctgaacgtggcgttcgacatcggccgcgggccgcagttcgccgtcagccaggactatctctttatcacccacgcccacctcgaccacatcggtggtcttccaatgtacatagctacccgtggcctctacaacttgaagcctcctactgtgtttgtaccaccctgcatcagggatgatgtcgaggatctgcttcaagtccatcgtagaacgagtcaaattgagctaaaagttgaattagttgcactagatttgggagagacatatgaaatacgtaatgatcttgttgccaggccatttcaaacgtaccacactatacccagccagggttatgtcatctactctattcgaagaaagttgaaaaaacagtatgctcatttgaagggtagtcaaataatgaaactgaagcaatcaggaaccgagattacggataccatactgtacccagaagttgccttcacaggagatacaaagtctgattttattcttgacccaagaaatgcagatgccttgagagcaaaggttctcataactgaggcaacgttcctagatgaccatgttgatgttgagcatgctagggaacatggccacatgcatctttctgagataatggagcatttccagtggttcaggaacgaaacaatcgtactcactcatttctcaaatcgatatagtcttgaggatattcgccaggctgtttccaggctacaacctaagctaaattcaaagggacatccgatcaatggagaagctctccctgacgtttggagagttgttttcgtaagcgcagtccatgttaagtgggcagaccttcggagaatgcctccgaggagatggcgccccaggtgcatcgccatcgatgctctgtggagaatacaggatgtcttcaagagtgccttgccttgcttctgccctgctcctggtcctgaccgtgttggtctcacggcgacgcggcttcccttccaggcacctgggcttcatcctgtccacgatggatctcacatagcaagaaccacagctctgtgagcccatctttttcccctcctatcgtggatgctagatggaactgtatgccttgagcattcgtggcagtgctctcctaaatacatatttataggtagggcatgcacatttgcttagtacaattgagcattggaaaataagtaacttaactaaattatcgtccacttagattatgac

SEQ ID NO: 143938 - DNA, 1774 bp, Zea Mays
ctccagcatgctctggagctcaccgtctcaccgagtccaaaacccagaaccccgcggtcccgactctcgccatcggcgactcgccaccgttcatcccgcctcccgaattcgcagcttgtaaatggttaccgcctctctcttctccctcccatcgctccgtgtcctctcccgcacctctgcccatggcccccggttccagatcctcgccgctaggaagccagtggagtcctccaccgccaccagcggcagccgcagaggcggaagcaagggggctgggcttctgtcggtgttggaccgcgcgatggcggacgaggaggagtaccggcgcgcgcgcgcccaggtgcagcgcaagggcgtggaggtggaagggtacgccatcgaagggatctcggtgggcgggcacgagacctgcatcaccgtgccgtcgctgaacgtggcgttcgacatcggccgcgggccgcagttcgccgtcagccaggactatctctttatcacccacgcccacctcgaccacatcggtggtcttccaatgtacatagctacccgtggcctctacaacttgaagcctcctactgtgtttgtaccaccctgcatcagggatgatgtcgaggatctgcttcaagtccatcgtagaacgagtcaaattgagctaaaagttgaattagttgcactagatttgggagagacatatgaaatacgtaatgatcttgttgccaggccatttcaaacgtaccacactatacccagccagggttatgtcatctactctattcgaagaaagttgaaaaaacagtatgctcatttgaagggtagtcaaataatgaaactgaagcaatcaggaaccgagattacggataccatactgtacccagaagttgccttcacaggagatacaaagtctgattttattcttgacccaagaaatgcagatgccttgagagcaaaggttctcataactgaggcaacgttcctagatgaccatgttgatgttgagcatgctagggaacatggccacatgcatctttctgagataatggagcatttccagtggttcaggaacgaaacaatcgtactcactcatttctcaaatcgatatagtcttgaggatattcgccaggctgtttccaggctacaacctaagctaaattcaaagacattctccagtttccaaaacaaggtggaagaaccgtgtattacaatgctttggggaactggacagcgggatacgcaaagtgcatatactcatgctcatggagtcctgcatagaatggaatatgatcgacaggccctgaagtggcatatgggacatccgatcaatggagaagctctccctgacgtttggagagttgttttcgtaagcgcagtccatgttaagtgggcagaccttcggagaatgcctccgaggagatggcgccccaggtgcatcgccatcgatgctctgtggagaatacaggatgtcttcaagagtgccttgccttgcttctgccctgctcctggtcctgaccgtgttggtctcacggcgacgcggcttcccttccaggcacctgggcttcatcctgtccacgatggatctcacatagcaagaaccacagctctgtgagcccatctttttcccctcctatcgtggatgctagatggaactgtatgccttgagcattcgtggcagtgctctcctaaatacatatttataggtagggcatgcacatttgcttagtacaattgagcattggaaaataagtaacttaactaaattatcgtccacttagattatgac

SEQ ID NO: 143939 - DNA, 1643 bp, Zea Mays
ctccagcatgctctggagctcaccgtctcaccgagtccaaaacccagaaccccgcggtcccgactctcgccatcggcgactcgccaccgttcatcccgcctcccgaattcgcagcttgtaaatggttaccgcctctctcttctccctcccatcgctccgtgtcctctcccgcacctctgcccatggcccccggttccagatcctcgccgctaggaagccagtggagtcctccaccgccaccagcggcagccgcagaggcggaagcaagggggctgggcttctgtcggtgttggaccgcgcgatggcggacgaggaggagtaccggcgcgcgcgcgcccaggtgcagcgcaagggcgtggaggtggaagggtacgccatcgaagggatctcggtgggcgggcacgagacctgcatcaccgtgccgtcgctgaacgtggcgttcgacatcggccgcgggccgcagttcgccgtcagccaggactatctctttatcacccacgcccacctcgaccacatcgtgagcgccacgggccctgttttcatatttgcaggctctatttctgcttttgctttgtttgcttatacacctctaacacctaaggtttacatgcgccattgctaagtccagctcttacaaaactactataaaactattaatgacgcactgatgattaccacaataccacatcaatttctgctgtgctgatcgtgcagggtggtcttccaatgtacatagctacccgtggcctctacaacttgaagcctcctactgtgtttgtaccaccctgcatcagggatgatgtcgaggatctgcttcaagtccatcgtagaacgagtcaaattgagctaaaagttgaattagttgcactagatttgggagagacatatgaaatacgtaatgatcttgttgccaggccatttcaaacgtaccacactatacccagccagggttatgtcatctactctattcgaagaaagttgaaaaaacagtatgctcatttgaagggtagtcaaataatgaaactgaagcaatcaggaaccgagattacggataccatactgtacccagaagttgccttcacaggagatacaaagtctgattttattcttgacccaagaaatgcagatgccttgagagcaaaggttctcataactgaggcaacgttcctagatgaccatgttgatgttgagcatgctagggaacatggccacatgcatctttctgagataatggagcatttccagtggttcaggaacgaaacaatcgtactcactcatttctcaaatcgatatagtcttgaggatattcgccaggctgtttccaggctacaacctaagctaaattcaaaggttgttgctctaacagaaggcttcaaatctgattatagataagtgtatataagtagaacagcttgtgtttctctttctagccctgatttactgaatgtatgttaacatcaggaaccgattaatttgttaaagaaaaaaaggtgcctacttaagtacttatagatatgtctgttgtgtgctcaactgtaattccattattatttatctatttatttcctgtccgaagttcagaactttgtacagctaattgaacattttgacaagaaaggtacttgcacaagttggagatctgt

SEQ ID NO: 143940 - DNA, 1695 bp, Zea Mays
ctccagcatgctctggagctcaccgtctcaccgagtccaaaacccagaaccccgcggtcccgactctcgccatcggcgactcgccaccgttcatcccgcctcccgaattcgcagcttgtaaatggttaccgcctctctcttctccctcccatcgctccgtgtcctctcccgcacctctgcccatggcccccggttccagatcctcgccgctaggaagccagtggagtcctccaccgccaccagcggcagccgcagaggcggaagcaagggggctgggcttctgtcggtgttggaccgcgcgatggcggacgaggaggagtaccggcgcgcgcgcgcccaggtgcagcgcaagggcgtggaggtggaagggtacgccatcgaagggatctcggtgggcgggcacgagacctgcatcaccgtgccgtcgctgaacgtggcgttcgacatcggccgcgggccgcagttcgccgtcagccaggactatctctttatcacccacgcccacctcgaccacatcggtggtcttccaatgtacatagctacccgtggcctctacaacttgaagcctcctactgtgtttgtaccaccctgcatcagggatgatgtcgaggatctgcttcaagtccatcgtagaacgagtcaaattgagctaaaagttgaattagttgcactagatttgggagagacatatgaaatacgtaatgatcttgttgccaggccatttcaaacgtaccacactatacccagccagggttatgtcatctactctattcgaagaaagttgaaaaaacagtatgctcatttgaagggtagtcaaataatgaaactgaagcaatcaggaaccgaggtgagctgtgaggtgctttgaaactggaccctattgcttaggaatatctcccacatggtattcacaacatgttttaatattagattacggataccatactgtacccagaagttgccttcacaggagatacaaagtctgattttattcttgacccaagaaatgcagatgccttgagagcaaaggttctcataactgaggtattgtgtctttacacatccagtatttgttcttacatactgtaaatgaagaaataattgcactagcctgttcatcagatgtacttcaaatatgaaacatgaagaacaatttgaagttcttcgcgtttttttattattggtaccaacatagttttgcactcttcaggcaacgttcctagatgaccatgttgatgttgagcatgctagggaacatggccacatgcatctttctgagataatggagcatttccagtggttcaggaacgaaacaatcgtactcactcatttctcaaatcgatatagtcttgaggatattcgccaggctgtttccaggctacaacctaagctaaattcaaaggttgttgctctaacagaaggcttcaaatctgattatagataagtgtatataagtagaacagcttgtgtttctctttctagccctgatttactgaatgtatgttaacatcaggaaccgattaatttgttaaagaaaaaaaggtgcctacttaagtacttatagatatgtctgttgtgtgctcaactgtaattccattattatttatctatttatttcctgtccgaagttcagaactttgtacagctaattgaacattttgacaagaaaggtacttgcacaagttggagatctgt

SEQ ID NO: 143941 - DNA, 1539 bp, Zea Mays
ctccagcatgctctggagctcaccgtctcaccgagtccaaaacccagaaccccgcggtcccgactctcgccatcggcgactcgccaccgttcatcccgcctcccgaattcgcagcttgtaaatggttaccgcctctctcttctccctcccatcgctccgtgtcctctcccgcacctctgcccatggcccccggttccagatcctcgccgctaggaagccagtggagtcctccaccgccaccagcggcagccgcagaggcggaagcaagggggctgggcttctgtcggtgttggaccgcgcgatggcggacgaggaggagtaccggcgcgcgcgcgcccaggtgcagcgcaagggcgtggaggtggaagggtacgccatcgaagggatctcggtgggcgggcacgagacctgcatcaccgtgccgtcgctgaacgtggcgttcgacatcggccgcgggccgcagttcgccgtcagccaggactatctctttatcacccacgcccacctcgaccacatcggtggtcttccaatgtacatagctacccgtggcctctacaacttgaagcctcctactgtgtttgtaccaccctgcatcagggatgatgtcgaggatctgcttcaagtccatcgtagaacgagtcaaattgagctaaaagttgaattagttgcactagatttgggagagacatatgaaatacgtaatgatcttgttgccaggccatttcaaacgtaccacactatacccagccaggtacttcttcttagagctagcagacatttattttttgttatttgtcacgatttaatgcctattgatattatccatcccatgaacggtgtaaagggttatgtcatctactctattcgaagaaagttgaaaaaacagtatgctcatttgaagggtagtcaaataatgaaactgaagcaatcaggaaccgagattacggataccatactgtacccagaagttgccttcacaggagatacaaagtctgattttattcttgacccaagaaatgcagatgccttgagagcaaaggttctcataactgaggcaacgttcctagatgaccatgttgatgttgagcatgctagggaacatggccacatgcatctttctgagataatggagcatttccagtggttcaggaacgaaacaatcgtactcactcatttctcaaatcgatatagtcttgaggatattcgccaggctgtttccaggctacaacctaagctaaattcaaaggttgttgctctaacagaaggcttcaaatctgattatagataagtgtatataagtagaacagcttgtgtttctctttctagccctgatttactgaatgtatgttaacatcaggaaccgattaatttgttaaagaaaaaaaggtgcctacttaagtacttatagatatgtctgttgtgtgctcaactgtaattccattattatttatctatttatttcctgtccgaagttcagaactttgtacagctaattgaacattttgacaagaaaggtacttgcacaagttggagatctgt

SEQ ID NO: 143942 - DNA, 453 bp, Zea Mays
atgccactggatcgagtcaccgccctctgcaagcctcgcctgacctgtcgccccgccacccccttgttggaccgagctgcccacgccatatcgagtcaccatcctctgcaagcctcgcctgacctgtcgccccaccacccccttgttagactgagctacccacgccatatcggcaccggccgtcgtgcaattggatcaaagttaccgtattatttatgtctatatattgttgtgttctgcaaccaatcaccacgatcccttgcccttgcccttgcccttgccgtcgccggagggtgtggccgggaggctctcatccaggaaggttgcgacaacctctgtgcggggacggtgctcagcgactgggacgacgatattggtgggcacaacatgcatgtccggcgggactcgtgccgatcaagctcattcaactttgaccgagtttgtagtaaatag

SEQ ID NO: 143943 - DNA, 2089 bp, Zea Mays
gcgggctgcggcctagccacagccacgtcagcaatgtcgaaagtcgaaaccaaccccactccacgtctcccccaggagaagcgaccattcaaagccgccgggagctcggcgtcaccgccgcgagctcgacacctcgacacctcgtgccgccgcagcgcttgctttcgtcccccttacgccactcccacttggccacttcagccaccatctccctgaagctagtggctaacctcctcaccgccatgggcacccctctcctcatcccccttctcgtcaccctccagctgttcactacctcctcccccgcggtcgcgtcgtcacacatctccgccatcatctcgcagtcgggcctcgacttcgccaaggacctgctcgtatcccatgccgttgcgaccctcacgcccatgaacgtgccggacatcgagaggaccatgagcatacccctcgtgggcaccgtccgcatggccgcatccgggattgtgctccacggcctcgccgtcaccaactccaccgtcgctgtgggggacgcgggtgttgtcgtggccgcctcgttggccagcgcgaacctcaccatggagtggaactactcgtatgacgcctggattgtgaccatatccgacagcgggaatgcttcggtccaggttgaaggaatggaggttggtgtttccatggtcatgaagaatcagaatggatctatcaagctgtctgttacagaatgtagctgttatatggaggacttggacataacactaaatgggggagcatcttggttctatcaagtgtttatagatggtttcagtaatcatatcatatcatcggtggaaaatgcaattaagaacaaagtaatggaaggtgcactgaagcttgattctttcctgggaaacctcccaaagaaaattgatcttgatagtgttgctgcaatgaatgtgactgttgttaatgatccaatattcaagagctcctctgttgagtttgatatagatggcttgtttattccatctgatgaaactgctccgagagacatgcatcttggagatacccaatttgcattacctcttgggagctcctcaaaaatgctttggatttcattggatgaagatgtcttcaactccgtttcagctctctacttcaaggctggtttgctgcaacggatggtggacaagattcctgatcagttttttctgaacactgctagctggagatttttggttcctcgattgtatcgagagtttcctgacgataatatgctactgaatatctctgcagtttcgcctccctctgtgagaattaatgtgggtagaattgatgccacagttgacttagatataacggttaatgttttggattttggtgagatagttccagttgcatgcttatcagtgtcggttgatgtttatggagctgcagcagtatcagagaataatcttgttgggagagtggaattggactatttctcatttaccttaaagtggagcaaagttggcaaactccacaccattctagtgcagactgtgctgaggattttgctgaaaaaattgtttgtaccatatgtgaactcgtatctcaagcatggcttccggttgcccatcatcaagggtttctccgtcacagatgcatatatcctcacttcttactcaagaatgattgttagctgcgatgttgccttcattgagccagaggttctgtctcctgtccaagagtccaacaccaacgaagatttgtcatatgaggttctgtctcctgtccaagagtccaagaccaacgaagagttgaccaacgaagatttgtcatttgaggttctgtccagtttactgcttggatctgccaaaacatcgcaaccaacagcgtaaaattcatgtaaatagtaaagctattcatcagtttattgctttgtaaaatgtgtaaataactgtgtattgtgtgtgtagttttttttaaaaaagtttaccatgtccctacatgagagcacctttctttttctttttcttcagcctcacgatcagacttcttattttgcttcgcttctctatgaatataagattggcagaattcctaccagcacttagaaaaaataaagtttaaacttaac

SEQ ID NO: 143944 - DNA, 1369 bp, Zea Mays
cagtcggcacgcaccttcttcgctgagagcgcgcgggcacctaccgcttccccattttcgccgagggagcccgcagcagcagctgccacccatacgaacatctcagcattttttttgtttaatttttaatgtttcttctcccgcccgacacgaaagaacgccgcggttttatatactacgccccctcttcatagcgctccttcgagttcgagctgccaccgtctctccttcctccgtcccctcttccctgctctgctccatcaggggcttgcatcagagaaggtagtagagaggatcaggtgcgcgagacagacgctgcaatgatggagtccaaggcagcaattattcttgccgcggctgtactggccgtcctcttcgccccggcattgggtcagaagagcagcccgccggcgccggcgcccatgtcgctgccgccgaccccggcaccggcgccggcgccgcactacgtggacctcgcggagctcctgagcgtggcgggcccgttccacacgttcctcaactacctggagaagagcaacgtgatcgagaccttccaggggcaggccaacaacaccaaggtgggcatcaccgtgttcgtgcccaaggactcggcgttctcggcgctgaagcagtccaccttctccaacctcaccgccgaccagctgaagacgctgctgctgtaccacgcgttgcccaagttctactccctggccgagttcaagaacctgagctcgctcaacccggtgaacaccttcgccgggtcgccctacacgctcaacctcaccgacgacatgggcagcatctacgtgcagtccatgtggtccaggcccaagatcgccagcagcgtgtacgccaccaggcccgtcgccgtctacgcgctcaacaaggtgctcctgcccatgcagctcttcagcaaggacccgccgctggcgccggtgcccgcgcccgccccggagcccggcgcgtccgacgcccccggcccggcggccggcaaggccggcgggctgacgggcggcaagggtgactccaccagcgccgcgcgcgacacgggcgccgtcggcgttgccagttccttgctgctcgccgccgcagcaggctgcttgattctccagtggtgaggagacttgtggttgtgggtccgttcttgccatgtgtggtgttcgtgcttcccctgccccccacacttgatttcgtcttgaatgggttgctggagtcattcttttggacataatgtaggcataccgttaggatcgagctggagtactttttttacgtcacgttacattactgtcataatttccatcattttttgatggacggatgattgaacgaatgaatacgagaagaagttttcactgctagtccgcta

SEQ ID NO: 143945 - DNA, 1152 bp, Zea Mays
aaccagatcaaatcggctaactacatatacttcgtgcgtgatctcgtcagggcaggggcttgcatcagagaaggtagtagagaggatcaggtgcgcgagacagacgctgcaatgatggagtccaaggcagcaattattcttgccgcggctgtactggccgtcctcttcgccccggcattgggtcagaagagcagcccgccggcgccggcgcccatgtcgctgccgccgaccccggcaccggcgccggcgccgcactacgtggacctcgcggagctcctgagcgtggcgggcccgttccacacgttcctcaactacctggagaagagcaacgtgatcgagaccttccaggggcaggccaacaacaccaaggtgggcatcaccgtgttcgtgcccaaggactcggcgttctcggcgctgaagcagtccaccttctccaacctcaccgccgaccagctgaagacgctgctgctgtaccacgcgttgcccaagttctactccctggccgagttcaagaacctgagctcgctcaacccggtgaacaccttcgccgggtcgccctacacgctcaacctcaccgacgacatgggcagcatctacgtgcagtccatgtggtccaggcccaagatcgccagcagcgtgtacgccaccaggcccgtcgccgtctacgcgctcaacaaggtgctcctgcccatgcagctcttcagcaaggacccgccgctggcgccggtgcccgcgcccgccccggagcccggcgcgtccgacgcccccggcccggcggccggcaaggccggcgggctgacgggcggcaagggtgactccaccagcgccgcgcgcgacacgggcgccgtcggcgttgccagttccttgctgctcgccgccgcagcaggctgcttgattctccagtggtgaggagacttgtggttgtgggtccgttcttgccatgtgtggtgttcgtgcttcccctgccccccacacttgatttcgtcttgaatgggttgctggagtcattcttttggacataatgtaggcataccgttaggatcgagctggagtactttttttacgtcacgttacattactgtcataatttccatcattttttgatggacggatgattgaacgaatgaatacgagaagaagttttcactgcta

SEQ ID NO: 143946 - DNA, 1366 bp, Zea Mays
cagtcggcacgcaccttcttcgctgagagcgcgcgggcacctaccgcttccccattttcgccgagggagcccgcagcagcagctgccacccatacgaacatctcagcattttttttgtttaatttttaatgtttcttctcccgcccgacacgaaagaacgccgcggttttatatactacgccccctcttcatagcgctccttcgagttcgagctgccaccgtctctccttcctccgtcccctcttccctgctctgctccatcagggcaggggcttgcatcagagaaggtagtagagaggatcaggtgcgcgagacagacgctgcaatgatggagtccaaggcagcaattattcttgccgcggctgtactggccgtcctcttcgccccggcattgggtcagaagagcagcccgccggcgccggcgcccatgtcgctgccgccgaccccggcaccggcgccggcgccgcactacgtggacctcgcggagctcctgagcgtggcgggcccgttccacacgttcctcaactacctggagaagagcaacgtgatcgagaccttccaggggcaggccaacaacaccaaggtgggcatcaccgtgttcgtgcccaaggactcggcgttctcggcgctgaagcagtccaccttctccaacctcaccgccgaccagctgaagacgctgctgctgtaccacgcgttgcccaagttctactccctggccgagttcaagaacctgagctcgctcaacccggtgaacaccttcgccgggtcgccctacacgctcaacctcaccgacgacatgggcagcatctacgtgcagtccatgtggtccaggcccaagatcgccagcagcgtgtacgccaccaggcccgtcgccgtctacgcgctcaacaaggtgctcctgcccatgcagctcttcagcaaggacccgccgctggcgccggtgcccgcgcccgccccggagcccggcgcgtccgacgcccccggcccggcggccggcaaggccggcgggctgacgggcggcaagggtgactccaccagcgccgcgcgcgacacgggcgccgtcggcgttgccagttccttgctgctcgccgccgcagcaggctgcttgattctccagtggtgaggagacttgtggttgtgggtccgttcttgccatgtgtggtgttcgtgcttcccctgccccccacacttgatttcgtcttgaatgggttgctggagtcattcttttggacataatgtaggcataccgttaggatcgagctggagtactttttttacgtcacgttacattactgtcataatttccatcattttttgatggacggatgattgaacgaatgaatacgagaagaagttttcactgcta

SEQ ID NO: 143947 - DNA, 232 bp, Zea Mays
gcttttatacaattttgagtattacagatatattattatatttacagttgaaggatacatgaagtaacgatggtaggtacattattgttgggatacctataaagtatgaaacatacaatggcaatcatacgtagtcgatgtacagagaaaagaggaaacaaaaacagcaaagttgatgctatattcaaaaacagtaacaacaaagtcgtgttgtcatatgatcaagaaaaac

SEQ ID NO: 143948 - DNA, 2359 bp, Zea Mays
gccgcgcatcgtgccgcggtgccgccgccgccgttgcctgaattggcaaaaccaacgagcagtcagagcggaagccgccgcggcgcccgccaccaaagccaatggagcccgcgctgcgcgagctgtgggcggagtcccgggacctgttgggcctcccttcctcttctcaggacgccaccgccgtgccgcgcgtcagcctgcccccgacgccgctcgcgttcctccgcgaccacgtctccccgggccgcccgctcctcgtctccgccgcggccactcgccactggcccgccgcgtcgctctggcccaccgcctcctacctcaccgacgcactccgctccaccgccgtctccctccacctcacccccgacgggcgcgccgatgcgcttgcctcgcacccgcacccacggcgacccgggtcctcgaggtgctttgcgtccgcgcacgtccgccgtgtcgacttccctaccgcggtccggcttatcaggggatccgacccggccgccggcctggtagcgtacgcgcagcagcaggacgactgcctccgcggggagtacgcggcggtcgccggtgacgtggacgcgcacgtgccgtgggccaccgaggcgctcggctgcctccccgaggccgtcaacctctggataggcaacgcccactccgtcacctccttccacaaggaccactacgacaacatttacgtcgttctgtccggcgagaagcacttcctcctgctgccccccaccgagcaccaccgtctctacgtccgcgactaccccgccgcccgctacgttgccacggagcagagctccgagggggggcgccagttgaggcttaagctggagatggaagtgcccgagaggatcgttccctggagcagcgtcgacccgtgcccggcgtcgcccgaggagttggccgtgcaggcgtcgtcgtttccgctctactttgacgggccggcgccgatacggtgcacggtccgggccggcgagatgctctacctgccaagcatgtggtttcaccatgtcagccagagtccagggccgaacgggctcaccattgccgtgaactactggtacgacatgcagtttgacatcaagtatgcttacttcaacttcttgaggtcgctggagatcaatggttgttcatcgggcaaacctgatgcttcggaaggtgatctagaggagaagaaagattgaggtggcggacagtgactttgattacccctggtttccgctgagcatcacgatgctgtgccgggctgggtttctcgcggccactgtctaacagagtaacagctcttcgagcataacgaggtgttgctagacacatggaaaccaattaatcggccatgtatgtttgcacaacgtttgcaggtgccaattggcctatcagacccaatgtggttgcaatgcattgtcaaagtttggtggcattcacagagaacatgaattttgttttgaattcagtccatgggttcctgatcgtctttgtttctagcgatgattcttgatatgctggaggcctgatttatagcttgtgcaaatcagcatcattcactggaaggatggattgtcctcgtagaaatctgaatgccagataaagaactgcgtggcgtggataaagaactttatcatcatgggtgagacgctacctttaaaggttggataaaattgaggtcggacagcgattaatccataaggttggaacttgaaaaccaagatgaggctatctagtcaagggagtctccggcgtggaagaagtgggagagggggcagagtttcacttctgtccatgtgttgatggtcagacttcgttgttgttgtgagttgtgacttgtgagagccggcacccataccaatctggttcctgtgcttgttatagtgtgcctttgcttatttgggtttcttccgtacggaagtacgaattccttgtatctttttgttaacaggtctcagagccattgtcaagtttttttagagaagctccatattcctgcggtggacacatgatgcagcactcggcagcatgtagccatatagtcttaagtccaaaactgatatttgatttcctttttctcctttgcaatcataaccgcgcaatcctgcatttttttcatttctcatgttcaaggacctgagaaatccgaagtatttgtgggctggttaacttgtgcgcagcattgcttaggacatgtttggatccaggaactaaagcaaactgaccttaggagctaaaagtgaataaaagcatatatttttactattttagtcacttttacctttggtcttttgcccctaaactccttggatctaaataggcccttactatgcgtggcagcactttcaagtatgtgccagctatgtcc

SEQ ID NO: 143949 - DNA, 1610 bp, Zea Mays
acccaaactgccatgcatgagaatagatagacagaaagaacaggaaccaaccaacacaagacacaacaagctgcagcagcggcaggcatggggcaccgcgccactgacaccgggccccaccaccattaccacccgacgcacactttatttagcccacgtcactcgcagcccgcaccggacacgtccacgcgacagtcactgctagctacgtaccgggctacgtacgagacacacacacacacagagagagacgccagtaataaccgtagcgtactgaacagcaaaatcccgtgtcatactgccatgtacgcgcgcgagcgactaccccgccacgcgcgcacgccgatcccctgggccctggccgccgccgctgcgtgcgcacggcctcactcgctggccttctcgggctcctcaggagcagcaacctcctccgcctcggcggccggctcctggggaccagcaggagcaggagcctccggctcgtccgcggcgagctcctcgggagcagcagcctctgcctcggcgaccggctcggccgcggcgggctcctcggcaccagcaggaggagcagcagcagcctcctcctcggcggctgcctcctgctcggccgcgggagtctcctcgggaccagcaggagcagcagcctcagcctcggcggccggatcggccgccgcgggctcctcggcaccagcaggagcagcggcctcgggctcggcggctgcctgctgctcggccgcgggaagctcctcgggatcagcaggagcagcagcctcagcctcggcctcggcctcggcctcggcgggggcagactcctcgggcacgacggccggcggcggggtctccaccacgggcgcttcctcggccgccacgacggtcggggtctggacctgcacacgtgaacggcgcgtaaaaatcaaagcatatactcctacatcttagcgccacacttaatagtagcgtcctccatttgttaacataggataggatccgcacgtccatcgctgtacgtctcatcgaagatgagcgatcgacccgacggatcatcgatgagacagagaccattattcatatatataggtattattcggatccaaacgatccgtgcacatcaacacatgtatgtatatatgaatcgaagactaagatcgatcgatcgagctacctcggcagtggccattggtggcgatgagaaggctgatggctacacgaaggagtggcgcggctagctagagcctagagctaagagcctaagactgagtgaagggtggagctgcaagagtgagcgaccagctgagagtgagatcgatcgagcttggttgtgtgaggcaaatgccgtgagacccgggacgctatatatagaagaggagaggaccgggcgcggcgaggccagaacggggagaacgcaagggctaagcgcagtctgccgggtgggttttttttttctctctctctctctcttttgttaaatccccggccccttgatctgtcgctcgtatcatgatcatgactgggaatcttgaggagctgtacaggtacacacatgaacatgccacgcagtgcaaccaaaaggtggccatgagtcaccctcatgcgtgacacatgggaagggt

SEQ ID NO: 143950 - DNA, 1525 bp, Zea Mays
gtgatggagaccattgacagaacaggctcactggtcactagctccggcggaccacgtaatagtcgcatgagcgtcctatcctatagatgcgccgttgagaccaatgacccggcttgacgacatgttggaatgtttgtgtaggaccgagctgctcctagtcctagacctagggtggatccggcgttctgcaacgctggctgctccactttacagtttacacaaagctttgcaggtttgctgatgaacgactggctctattattatataaagaagatcgtatcatcacacaatgacacaaacagaatgcagggaacgtaaccaaagaagacgacccataccatacccaaactgccatgcatgagaatagatagacagaaagaacaggaaccaaccaacacaagacacaacaagctgcagcagcggcaggcatggggcaccgcgccactgacaccgggccccaccaccattaccacccgacgcacactttatttagcccacgtcactcgcagcccgcaccggacacgtccacgcgacagtcactgctagctacgtaccgggctacgtacgagacacacacacacacagagagagacgccagtaataaccgtagcgtactgaacagcaaaatcccgtgtcatactgccatgtacgcgcgcgagcgactaccccgccacgcgcgcacgccgatcccctgggccctggccgccgccgctgcgtgcgcacggcctcactcgctggccttctcgggctcctcaggagcagcaacctcctccgcctcggcggccggctcctggggaccagcaggagcaggagcctccggctcgtccgcggcgagctcctcgggagcagcagcctctgcctcggcgaccggctcggccgcggcgggctcctcggcaccagcaggaggagcagcagcagcctcctcctcggcggctgcctcctgctcggccgcgggagtctcctcgggaccagcaggagcagcagcctcagcctcggcggccggatcggccgccgcgggctcctcggcaccagcaggagcagcggcctcgggctcggcggctgcctgctgctcggccgcgggaagctcctcgggatcagcaggagcagcagcctcagcctcggcctcggcctcggcctcggcgggggcagactcctcgggcacgacggccggcggcggggtctccaccacgggcgcttcctcggccgccacgacggtcggggtctggacctgcacactggccattggtggcgatgagaaggctgatggctacacgaaggagtggcgcggctagctagagcctagagctaagagcctaagactgagtgaagggtggagctgcaagagtgagcgaccagctgagagtgagatcgatcgagcttggttgtgtgaggcaaatgccgtgagacccgggacgctatatatagaagaggagaggaccgggcgcggcgaggccagaacggggagaacgcaagggctaagcgcagtctgccgggtgggttttttttttctctctctctctctctt

SEQ ID NO: 143951 - DNA, 2967 bp, Zea Mays
ctctcagcctgcttcagccgaaagaagagagagaactcctcaagctgctcccccaaattccggtcctcctaaacccccgcccccacctcctcctcaccggcgcgaccccaattccgggacctccccgatccccatgaacccgatctaaacatgtccgccgcgctcgcctgtctccgccgcacctccaagcgccgccgagacgcgcccgatcatgccctccccccattgttgaagcagccgctgatggcccacgccggcgccgaagccgctgagtcgtcttcgtcgtcctcggcctccgcttcgggggtcgatggcgcctctgcggcggcggcggcggcctccgcatcgtcgccctccgcgtcgccccgggtggtgcacttctttgtgcgcgctaccgattccagaaccatcgcgatgcacgcggggtgggacgacaccgtcggcgccgtgctcgaccacctcggcgcctgtgggtacgggcgcgatttgcggctcctctacgcgggacggcagctcgcgctggattccaccctcgctgagctccgcctcccgccggactccacacttcaccttttggcgcgtctcaggtccactcagcaccctcacgcgtggcagctcgcatcgcacatcgccagcactgccgccatcgcggagtccgagccctctaggatgccctccgccgccttctccctcgacgaactagtgaaggagtttatcctccgcgcccaccgcgccaacctgaggctttcccgctacgatcgcgccgctacagtcgaggaccgggccgcggcggaccacaccgccgagtacctcgaaatcttcctccaggccggcgccgccttagcgctggttcgcctctacctctcaaagtcccccttccgttcttacgccgagagtgccattaaatgctttgtccccacggacccttcgtccttacctatggacttactgatcgtgctgcttgaattctgccgcttgctctccttggctgcaggcaggaatgaattactgtatagatcatgtcgtcgtacacttgcctcagctttatccactcgccccaagctacccccttctatgaactcaccaaccaggttgatcgagcaagtcctgccatttgcccgtgaaacagtggatatggtccttgatgggcttgcatcaatgccaatgattatatcgcctagtgatctagatgagttctcaaactttctcaaagtgatgtgccagcaggcacgccgttggatttctgatgaggggccgatacccagtattttttacagcagggagtctcagcatggtgacacatggatatggaggtttcacatcatgtcgatgtacatgttgaaaaggttggatgagtgcttgaagacattggagatggacctgccattgtcatcagagagtatcggggtcatggaaagtcaaaccatatgggctgctcgatcacacatcctggtcatgttgactgaacttgatttcatcgcagcgatttatgaggatgtggggcacaacctacagcttgtgttgctggcacacaaagcaccactcaatgctcttgtccgttgttccaagagaaatgagcgtctacattggctcgtgaagcataagaatcttctctgctttgaggcaagaaggagtttagtcttcatgatgctgcctgaagggaaggatgactttggggagctgcatgagatgttaatcgatcgatcacatttacttgatgaatcctttaattacatcgcacaggcagaacaagctgaacttcacggtgcgctgtttatggagtttaagaacgaggaagctacaggtcctggtgtcctgagggaatggttttgtttagtgtgccaagctcttttcagtccgaagcaagttcttttctcaccttgtcctgaggataaacgaaggttctacttgaacgaaacatctgccgtggatccactgcacctgaagtacttcacttttgcggggcgaataattggattagccttgatgcataaagtgcaagttggagttgttctagaccgtactctgttcttgcatcttgctgggagaagtattacattagaagatatttctgttgcagatcctgtcaaatatgcaagctgtaaaaagattctagagatggatgctgctgaaattgataatctatacctgacattttctcgaggagctcatgagttaggtactgaaaagattattgatctttgcccaggaggagaggatgtcagtgtgaatatcgggaacagaaagcattacattgatcttcttattaagaatatctttgtggactctatttcatctcagctaacccattttgcggaaggatttgctgacatactagttaatccaaaacgccgggaagaactttttgagtgtttagacctcgaagactttgatcgactgttagggggaagcaacaatgcaataaatctgcaagattggaaatcacatactcaatataatggctacaaagaaaaggatcgtcagattaccttgttctggaaggctgttgagcgcatgtcgatcgagagacagaggcagctcctcttcttctggacctcagtgaagtatttaccatcggacggcttctgtgggctgagctccaagctttacatatacaagacgtccgattcacctgaccggctcccgtcgtcgcagacctgcttctaccggctctgcctccctccctatacatctatgaaaatgatggaaaaccagctgcagaagatcacgcaagagcatgtgagctgcagcttcggtgcatggtagttgctgctgttctggattgattctgaacccggtatatactgtacatatggtaggctagtgacaccttagcgtctcgttgagtccgttcctagagcttgaggaggtaatatgttgtctttcttttccttttgtacgtatcgtgggttagtgttccgacactttcatttaattaatctaatgcaaaaggaatggataggaagc

SEQ ID NO: 143952 - DNA, 105 bp, Zea Mays
tttttttttgttggttgatctggcgtttgagacgccgtattataatatctagccgagaggaattaaagacggtgacactgacatgcctgcctgcaagggatgcta

SEQ ID NO: 143953 - DNA, 3214 bp, Zea Mays
tgctgtctctaaaaaggaatatatggaccatagacaccttaggtctctggtttgttgtagccaaccatctgttttgtgacgcttcagttttgaattcataccaccacttcagtttcccggcttgaaggttttgtttcaaacaaggatcagtcctacgaagatccaattgaagagtgagtagtctccatctgtagtcttctgtgaagctgtaacaaactgcattccctacttaactgtagccaactgctagatttttatgtagctgttaaaaccaatgcccgattttttttacaccgcaggctactgtatgctgtattcgttggtatcaagtgaaaatgccacggttgctgaactggctacgactttacaagccgacctttaccagctccaggcagctgcatcgtttgcttgccgactaggatgggctgtgaagcttctggataccgactctgttcttagggattcgagcactcttgcactgtccaacaacattctcagcgatgaagttgaaagctctcgtacgagtgtcgcctcagaaaagtctggtcatgagtcgcttagcagtgattctgatggacacaagaactccgggatggcttatgtgggcttcattgtcgatgctaatgtaacttcatacttaatgatgggctcactatctccagatttgaagtcgcatgctgtgacactatacgaggcaggaaagcttggcgattcttgtaaggctgatctatgcaatgatcttgccagtttagaggggaaacgatttgaaggtgctgtttctgttggtcgcttggccagcgaccgtgcaggtggtgccagagctgcttggggtcatggaattggtcagcgaggcgggggcgagaggatccctgggatgcgccttccatcgaccgagcgtcgacgcggggcgagaatggcggagcgacgatttcccttgctggttttagagctcagcgtcaatctcgtcatgtctctaccgcaccttagtctccgccgcacagatcgacatgccacacgtgcgccctggactgcagcccctgcacctccctccatcgccctcgtcaatcccgtcatggaaggcccgtcctcgcctccccgcgcgcggcgcctccctggatcttccccaccatcctcgcctctcggcgcgcggcgattccctggatcttcctcacctcccgtcaacaaaacaaaaggaaacacaacggcctcttaccatctttttcctcgcctcccgttcctcctcctaccttgtacggcgactccaaacagcaaaagtgaggaggaagatagtggcactgcagcgctcgtggaagaagaagcggtgaagcaggcagaggggttcgaggctgtggaggcaagggcaaagaacgtcgacaagtttgatctcagctaccttgacaaccaagtcttcttttggtctgtccgcgacatcttcaatagggatctcctcaataaaaagggcgaccttgcactcatcgattttattaaggaaatcccttgtgaaccaagggtggaagtcgtgcttattgatgatgcctttgttgaaagaaagtcgatggaatgtttatttcagccgaatgcatatctaggtgacgaggttatagactgttatataaatttgataaaagctcaaaagcatctaaagtgtcgatctggaggtcgcgttcacatagaaaatgctttccagtttaatttcttgaagcgagatggcgatgttgaaattaaaacagaggagctatatccaattgaagacatgacacaaatatgtagcgctgaacgaagggtgttactttacctagaccatgacatggtgtttattccgataaacatccgagagacgcactggtatcttgccgtgatccatgcaagaaatatggagatacaagtgctcgattcacttgctacttcacaagatcgtaaagacctcacggactctattaaaggactccaaagacaaattgatatgatatctcaacgtaaggagttaaaagaccacaggtggccaaacctccaagttgcttcttggccgctcagagaaatagacatgagatatgcaaagcagacagatagctcttcatgtggtctctttcttttgaactgtatcgaatactggacaggggatgaactgtctgacagttttacccaggatgacatgtcacactttagaaagaaaatggctgctatattactatcttcagaactgaataagagaagggggtgtctgttatacaaaaatgataaagaagttgactctggaagcccatcggatgttgagatattagaaaacccaacagattctaagaagaggaagctactccacgtgcttgatgatagcgaagtagtgtatgaagatgaggaaggccctattactcaagcagacttgcaaaagtggtttgttgatgattgggataaaagaactcctgtaaaagtatctaatgatgtgtgcaccaatgactttttaatggttggtctttccacaaaggacatgccagtgaccaaagccgattcaatagatgttttatgtgattatatcatgacaatagaagacgatacgacactagagatgacatgggtgcgaagtttcaatccttttaagatagaaatatctgttaaagacctacaaaacatattaacgataaataaagatatgactctaagatgttttgacatggctgttcggctgcttgccaataaagagtcatgtaggtcgaaaggagaaatcataaataatagaaagcattatatggacatgcgtttctgggttcttatgccatggaaattcaacggatgtcacgcccttttcgtaatagatcatgttaaaaagcatgtgacttttatcgactttacaccgactcaagattggtgtaaacacatgccatacaagaggtttgcggaagcgattatcatggcctcaaagaaatataagattgcttacagcaaaaaacgttctggatgggcggaggatatctttaagtgggaacatacaattcagactggtgttccaattgacttaagagggtgtaataccggctacctcgttctacaagctatggccatgtgggggaatgacagacgaatgaaatttgttggggatgcaaagattgttcgaaggaactttgtgattgatctgttaagttatgaggataattcgtgccgatatgccatccctgcaaacatacaacagagacttatcgatatcgctaaaaaggattag

SEQ ID NO: 143954 - DNA, 228 bp, Zea Mays
gtgactggtgctttgtgctacagcaaattagttaattttattttattttttcacatggttcactgctactaacatggttttattttattttttcctgcaaaatagctgtagatgggtcaaaggaaattataacgttcgaaatgcatatgacatcttgccctcacacaacaccgtaatccatttcaagatccaaatcagaaatgagaacttattaaaattgattgacgg

SEQ ID NO: 143955 - DNA, 272 bp, Zea Mays
aaatatattttctttgtcaaaacgtacgttacttacatatggcccagtggtttgtgttagtagttaggtgtttgaggtgctgggatcaatccttgcttgggccttttttttttacattttgtccaattaaactatattcaaacttttgcataatcctctgaattttttaccttaagtaaataaggccaaaacatgactccatgccaagtttcactaatttttgactaaatttgctatttatttatttatttttggctaggaaggcatttaac

SEQ ID NO: 143956 - DNA, 744 bp, Zea Mays
gaacttcaacagtaaaaaatattattagaaaatggacaataaattctaacacactgtgcatcaatcgagcacatattctagctgttgacacacgcatgcccgtgatttatttctcgtgccagggatgagccgtgtgctgcacttaactaggacggagcagacgaagagaaccgactctatatagcagtagcgctacagcagctgcaaaatgaaagaacagcttgataatctgttactatatggtacaacagattttcttttgcacttgcaccagtcggtcggcctactaataagtatatataatattgacctgccggccggctaggaatatagagagctcgatcgatccatagatggcagctgcatggatcggtcacatcgacctggccgccgtggcggcaccgtcgtgctcgacgtcggaaacagcgccgtcatcgtcgtcgtcgagtcccccgccgcacccggcgccaggagggccgccgccgacgaagccgtggccgcggccgaaggcgcgggcgtggtccttgagcgagcgcttgtgcttgaactcggagccgcagaggcagtaccagagcctgccgcagttcttctcgtgcgtgcgccagtcgcccttgacggcgaaggccttgccgcagcggcggcagaggaagggcttgaggccgtgcttgcgcttgtagtgcgtctgcagcgtgcggaagtccttgagcggcttggcgcgcgggtggtcgatgttgttgcggcacc

SEQ ID NO: 143957 - DNA, 2031 bp, Zea Mays
gatcgtttttcagagttagttgatttgttagtcacatacgaacacacaacaaacctgttatactataccatgaaattcattgataggttgagggatgacatcaaatctgtgattcttgtacaacgtcctggcgatctcgatactgcctgctccttggctttattgcaggaagctgcggaatcttctcggcgtccggatcctgttcgtggtgattcatcttatgctggtcgttcgtcgtggaagttggttgttccacagtctgctcgctgggatcagccgcgcagtttggctccagaatcctctaaaactccaacttagccagcgccaataattgattctaaagtggcttctcttcgttcatatcggtgtgctcgtggattatgccagtattgtgctaaaaagtggaacaagggccataaatgttctccaactgttcaactgcatgcagtccaagagatcgttgcggcaatcactggcctcactcctgtgtcggctccgctaatggtcaccgtagccaatggtgaggtccttatatgcaattcagagctggtggaagtagactggactttacagggtgtctcgtttagcacaacattgaagttattgtccttacctcactatgacacaatccttggtatggattggctacaacagttcagcccaatgttgatagattggaagaacaaatggctgtctataccatttcaagatcagcttattgtcccgcgtgactgtcagtcattggttcctgctggttcgttgttggaaatatgttccgtgacctcggcatcaacaccacaacatttattttcagccacggcttctactgttcctgaaccggttcattccttgctgcaacagttcgatgccttgtttcaacctcctacaacattgccaccgagccgtgcatgtgatcactccatcccattagtggatggtgctcgcccggttactatacgaccttatcggttgtcccctgcactgaaggacgaagtggaatcccaagtggcagaaatgcttcaaaatggcataattcaaaacagttctagtgccttttcctctcatgtcctcatggtcaagaaaaaggacaattcatggagattctgtgtcgattacaggcacttgaatgccctcacagttaaatctaagtacccagttcccatcatcgttgaattattggatgaactagctggcgcatgttggttctctatattggatttgcgagatggattccatcaaatattgctcaagcccggggaagagtacaaaacatcatttcaaacccacacaggacactacgaattccgggtcatggcattcggtctcactggggtgcctggcacatttcaaaaagccatgaatcatactttggctcctcttcttcgtaaatgcactattgtgttctttgatgatattttagtctacaaccgctcccttcaagaccacttcacccacctacaacaagtattcgagctgctgtcgtctgatcactggaagattaaaatgtctaagtgcaatttcgctcaaccccaagtaacctacttaggccacattatcagctcagccggtgtcgctaccgacctagcaaaggtccaagctattgtggcatggcctgttcccaagtgtgtgaaggaattgcggagcttcctgggactctctagatattacaggaaattcatacgacattacggcgtgatctgccaacccctgacagcactgttaaaaaagggcgctctgtacgtttggacagctgatcatgacactgcattctgcactctcaaacaagcaatgtcatcggctccggtgttggctctgccagattttaatgtcacatttcagattgaaactgatgccagcgccaatggtgtaggggttgttctttcacagcaaggtcaccctctggcattcctgagtaaggcccttggagttaaatctcgtggtctctcgacttatgaaaaagagtatctagctgtcattctagctgtccaacaatggcatgcttaccttcaacgccaggaattcgtgattatt

SEQ ID NO: 143958 - DNA, 3034 bp, Zea Mays
cactccccttggcctgcctgcctcgccgtagcccgccgcccctcctctacaagactacaagaggccgacgtatcagccaagtggccggtgaccgcctcgtcccctctcgcgccgaccgccccacgcgccgccgctccgcaccgacattccctcgggagtcgcgggtaccacggcgccgacttccacaccgcgttaagcttaaaccccgcgcaggcgcgccattgtagttacaaaaagaaggaacaacagtaacagatagagcaaccgcctccccggtcctcgctcctcgtccccgctcccgccggcgtcgcgagggactgagccggcgcggcggcaaccgcgagaaccccggtaccaaagttctagtgcatcacaaaggatactgaaatgggtgccaaagagaatggggaagagagagatgatcattcaagtgatgtggaaagagatggtaaacaagggaaggtaactgaatcagactatgaaccagctagaaattccctttcatcaccgggtgaggctaccagtaacgaagacactaaagtgaaaagagtctcaagggttccaaagaagctatcaaggaaagagtctaaagaaaacagcccacgctcagcaagaagcatttccaaaagtcaaatccacactaaactgcagtatatatcgtcaaacagtaaccagaacaaatcacccaaaacaaacaaagcggttaatggtgctaaaactgttgaaattaagaggccagagactccgaaagctccttcttgttcttcatctgagatgtctgaggaaacagatgacaaagctattgaggatagacccacagatgacaaagcaattgagggcagaatcaaggatgatagcgctgttgaaggcagagccaccaatgataaagccgttgatgacaaagcaaagaatgataaagacattgaggacggaatgaaggatgataatgccattgaatgtgaagtcactgatgataagcctattgacagcaaagtaactgatgatattaccattgagggaagagagattgaaggtaaagccattgaagaggcaaaggagattgatatattggatgaagctccaaaatctgatcagagtactggcactgatgatgaaattgttgatactgaagaaaacatagctgataatggcaactcagtttcttataaaattaacgaggaattatattcaaaaattgagaagttggagcaggagctacgtgaagttgctgccctcgaggtttctctctactctgtggtgccagagcacggttgttcatcacataagttgcatacaccagctcgccgtctatctagggtttacattcatgcatcaaaattttggtcctcagataagaaagcttcagttgcaagaaattcagtttctgggcttgtgcttgttgcaaagtcttgtggcaatgatgtttcaaggttgacattttggctatcgaacacagttgtcctgagagaaatcatcgcacaaacatttggtacttcacaacactcaagtccagttaaggttttcagctcaaatggcaatgcaaacaagcctgacaggagtttcacttcatcgcaatggaaaagtaactacaatggcaagtatgtgaaccccaatatcatgcagctgccagatgattggcagaaaactagcacattgctggatgcattggagaagattgaatcttggatcttttctcggattgttgagtctgtgtggtggcaggcaatgacaccccacatgcaaacccctgtagaagatttgtcaactccaaagatagggaggttgttagggcagtctttgggtgatcagcaacatgggagtttttctattgatctctggagaagtgcatttcaagatgcattcagcagaatctgtcctcttcgtgctggtgggcatgagtgtggatgtttaccagtcttggcaaaactggtgatggagcactgcatagcccggttagatattgctatgtttaatgccatccttcgtgaatcagagaatgagatacccactgatcctatatccgacccaattgtggactcaagagttctgccgattccagctggcaacttaagctttggatcaggcgcacagctgaagagctctgttgggaattggtccagatggttgactgatacatttggcatggatgctgctgaatctgaaaagggtggtcaagatgtggaagttaatggcgatgacagaagagacgcagccgaatcaacttgttttaagctacttaacgagttgagtgatcttctgatgctcccgaaggacatgcttctcgagaaagccattaggaaagaggtctgcccttccattggccttccactagtaacaagaatactctgtaacttcactccggacgagttctgccctgatcctgttcctggcatggttctagaggagctgaattctgagagcttgctggatcgatccacagagatagacatggtgagcacgttcccagtgaccgctgctccagtggtgtactgggcccctacgctggaggacgttagggagaaagtggctgacacggcatgtggcaacccagagctggaccggaggggttcaatggtgcagaggaggggctacaccagcgatgacgatctggatgccctggagttcccgctggcgtccctgtacgacaagagcaaccccccgtccccgtgcaacaatggcgtcgcccatttcagcactcggcaggtagcctccatggagaacgtgaggcacgagctcctgcgagaagtatggtgcgagcggctatgatctcgataaatacggcctgtggagcctttttgatctatgtgaacagtggaaatggtgggaaagacgtgaagaaactgcaatcgaaaagcgatgacaaaaatgctattcaattcttcgtgtatatccatccgttccttgtcagcccgtgcattggttgtttccccttttttatatgatatagtagaactgtattgtacagtggctatgaatgaatgtgatgtgatcatgaaagattgggagacatagcatcattttaaccttcattatt

SEQ ID NO: 143959 - DNA, 751 bp, Zea Mays
ctccaggctccggccaactcgcagccagtctccacagcgcaacgaacctcgagtcctcgacaagcacccaaatcgacgaattcttcccccctctccgatctcgacgcgcaccgatgcgggcgatgtcgtcggcggttaatggtatgctgcgggcacggctgcgcggggcagcgcgcgttcgcggcggcggcggcgagggggccgggcggtggacgaccccaggtcacgaggagcgccccaaggggtacctcttcaaccggccgccgccgcctccgggggaatctcgcaagtgggaggattgggagctgccctgctacgtgacctccttcctcaccgtcgtcatcctcggcgtcggcctcaacgcgaagcccgaccttacaatcgagacgtgggcgcaccagaaggcgctcgagcgcctccagcagcaggagctcgccgctgccgacacccaggccgagtgatccgcgcgtctcaggtcctctcgaactctcggctgcctctgatttggttccaataagatggccacaatgtgcggtcctgaatgttctggacttctggtattgatggaacacgagctgaacactatgctgctgttttttctgttctgttttgaaatttgcccggtgatgatggcgaatgtcctgaatattctgaatattttgaaatgtttgactgttgtattatcatcttatccttccgttgtactaccgcatgagcacaatttaggattttacttgtttatcacttccgc

SEQ ID NO: 143960 - DNA, 1718 bp, Zea Mays
aattgaagagaaatgaggaaaagagtctagagtctcccgtcatccgtgtccgtgcgatttttctacacaatcgtctcgcaaagattctcgttggtcagtttgagacttagccttggaggagaacagaacagccacgatgacttcgccgattcagctcgcggccgcgcctttgctgctgctagtagtagtggtcgcgggcacacggtcgagccgcatcttttcggtggccgactatggtgcggcgggcgatgggttccgctacgacacggcggcgattcaggccgctgtagacgcctgcgcggcggcgggcgggggccgcgttcttctcccggcgccgggcaactacctgacagcgaccgtccaactccgctcgcgggtggtgctggaggtgccccccggagcgcggcttctgggcgggaccaggcaggcggactacccgcccgagtcgcgccggtggtacgtcgttctggccgagaacaccacgggcgccggcatcacggggggaggcgagatcaacggccagggcggggcatttgttgtcaggcccagcgaggtgaagaacgtcatggtgagctggaatgccaccggcgattgcctgggcgatgagtgccggccgcggcttgttggcttcattgactctaaggatgttaggatccacgacatcacactcaaccagcccgcctactggtgtcttcaccttgtcagatgtgacaacacagtcatccacaatgtgtcgatatttggagattttaaaactcccaacaatgatggcattgacattgaggattctaacaacactgtcataactgattgccacatagacaccggagacgatgctataagcccaaagtcgacaactggaccagtttataacttgacggcaacaaactgttggatgcggactaaatcttgtgctatcaagtttggaagtgcaagcttcttcgacttcaaaagactggtttttgacaacattacaatagttgattcacatcgaggacttgggatgcagatccgggatggagggaatgtgaatgatgtggtgttttcaaacattaaaatgaggaccaggtactaccatcctttatggtggggaagagccgaaccaatctatatcacaacttgcccaaggcacccagattcaaaagaaggcgccatttcagacataagattcatcaacatctcatcggtatcagaaaatggagtttttctggctggatctaagcatgggctgctccgcaacctgaaattcaagaacatagaccttacctacaagcgttggacaaactacacgggagggctctatgattacaggcctgggtgccaggagatggtgaagcacaagactggtggcatgatgctggagcatatctccggtctggagattgacaacgtgaggatgagatgggcgagaggaagcctgaagggctggaatgttaaccctatcctcttccggccatcaaccatcgataatctgtctttccatgactggcagtcagtggatgttcagtagatttaagtggcacagttgtattacgtgtgtatctatcagaataaaggggtgattcttttgtgaaatattgaaatgtgttaataataagcaatcccaacagcatttaagcttctgcagggactggtgtggtttgctataataattttataaatctgaattcgtatgtttgattgttcaaatgtggtttgctttgtgattttataatgat

SEQ ID NO: 143961 - DNA, 741 bp, Zea Mays
atgcagcgaacccgctcggcgatgctgcgcgggtgggtggcgcacccgcgcttggcgcggatcttgcaggggacggcgtcctggaactggaggaacttctcgatcgccgccatctccgccgaggccgccctgccgcccttgttctttccgctgggcaggctgagctgcggcgccagcggctgctgcagcgcggggccggagtcgcgggggcgcttcgcgccggacgtcggcgacggcgacgcctcgtccggccaggcgccggacgcgaggccgcccatcgggtaccccgggatgccgctgtacccacgcgccgcgccgctggcgttgctgccggccgcctcggggctgccgctgccgccgcctccgtcgagctcctcgctgcccacctccgagatctgcgacatcaccgacccctgccgggacgagaagctcagctgccccttgagccgcgcgtcgctgacgccgttcctgaacccgccgccgcccatgcccacccggagcatgctcccgtaccctttgtccatgttcaagtggttgaggaagccggcgggggagctgctctggcggatcaggctgttgttaccagcgccaacggctgcaccgtgctccgtgccgccggagctgacgttgcggtacagcccctccatggcggccatctgctgctcctgctgcgactggtacatgagctgctgctgctgtgaggcggccatggacgcgacggcagcttcgtccatgaagtga

SEQ ID NO: 143962 - DNA, 111 bp, Zea Mays
tattatatgtttccgttgcaacgcacgggcactcacctagttataattatgtttttagacggagcgagtataattattatttttagatggagactgtattactgtgagaag

SEQ ID NO: 143963 - DNA, 87 bp, Zea Mays
ctcaggttaatctctgtctctgaccttcatcacttgctactcttcttcttacataaaacctcctttaatggacaaatgtacaaatcc

SEQ ID NO: 143964 - DNA, 86 bp, Zea Mays
ccttccccttcccttcggtcgtccctcctgcaggtcgccgccgcacgctcgctcgctcgctttcctctcccgaccacagcgccacc

SEQ ID NO: 143965 - DNA, 174 bp, Zea Mays
atcataacagaaatacaaagcaattcagaacccacatattctatatctgattcagatgactcaaaacagtcgggtctctaaacaggctaaatgccaaccgacaggtttagagttttacaacgaaagtaccagagcacttaacgagagggcaacagtaggaataataggcggtag

SEQ ID NO: 143966 - DNA, 2162 bp, Zea Mays
cccaccaggccaccaccaccctctctcggctcggctactgttcgccaattccttgcttccttcgctcacagcgtttcagattcccaagaaggcaagaatcccctcccttcccatttcccagcagcagcagctttggagccaaaggggcaggcagcctttgaccctccaccgtcgccatggccgtggtcgccgccgggggcgaggaggcctttgcccccgctgcgccttccacgtccggcgccccggcgtcgcgccaggacgtgcaggcggccatcgccaaggccgtcgagctgcgccagcttcacgccgccctcatccagcgcggcgcgcccaatgcccgcgccgccagccgcagcccggccgtcattcgcctcccgccactcgcgtcccccgcgcgctccagagcagcagacgaggagtacccagtttttactccggcctacgacgacgaggagcacgtagcagccgttgcaccgaaccacatttgcccggacaaccgaagccggtcggaaaactggactggggtcgccctggatcagggtggcagcgacgacgcggccttgtccgattacgacggcctccaagccttctcgtcctccaacagcgacgtgttcttcccttcctccaacgaccaccgtcttcggaacagaggcacggcgtacaagatccaccccgccttcatgcactcggcgccgtcggccgaccgcttcctgccgtccgccggccgggtggcctacacgtccgagctgaacctgccaccggcgacgtgcggcaacgcgttccggcccgccacgatcagcggcaccagggtgccacccccatcggcgcactcgcggacgaagcaaggagggccgccgcagatcctctcgtggctcttccccaagtcgagaaagaaagccaagccaccggagatgacgtcgccgacggccatcgagcgcggcaacatgccgcagctgctgaccgagtggggggcgctatctatggagtccctcaagaaagagctcgcggaggccaacgcgcaccgggacgccgccctgcacgaagctgccgaggtgaggtcgtcgctgggggagctggccaccaagctggtgagcgtggaagcgtactgctcggagctcaagaaggcactgcggcaggccaccaactcgccgtccgtctcccggagaccgacgaaatcgatcgaacccagccgagagctctcgatgccggtgagccacgaggtgatggtggaaggcttcttgcagatcgcgtcggaggcgcggctctctgtgaagcagctctgcaaggcgctgatccagcaggtgaacgaagagtccagtgacggcctgtccgacaagctgaacctgctccttcgcccgtaccagctcgcgctcagcagcggcagcgtcagcaaacactgctcgaaggccgtgctgtaccatcttgaggcgatcatgaaccaggtcatgttccaggacttcgagaaccccgcgttccagcggaacggctcgccgaggtgcctcgacccggcggaagacagccggcagagcttcgcagccttcgtggcgctgcgcaaccttagctggaacgaggttctgcggaagggcaccaagtactacagcgaggacttcagccgtttctgcgaccggaagatgagcgtcgtcgtggcgacgcttgcctggtcccggccgtggcccgagcagttgcttcagtgcttcttcgtcgccgccaagtgcgtctggctgctccacctgctggccttctccttcggcccgccgctgacgatcctgcgcgtccaagacggccgcgcatttgatgagctgtacatggaagacatcctgcatgacaggcagccggtgcagagtccttgtcaagtgaagataatggtgacgccggggttttacgtgcaagatagagtgctcaagtgcagggtcctcaaaacaagatcggcagcataattgtgtctctttgaccaacagctagtgtggtgtcaactcactcgtgtaacatttttctttttttgttttgagccaaaggtcaagaaacttgaggtgctgaaccgcatgtttgctgtagatttggagtaaacaactaacgaagtgaagcctgagctttctttgaccaacatgtttggatcactcctttgttatgttatgatcaacaaaaatgttccattacaagat

SEQ ID NO: 143967 - DNA, 3095 bp, Zea Mays
atcctatgttgccggacaaggcacaatgtcacacatcttatgctgtcggaccatacacaggagaatgggaagcagcctcatcgcgagcgtcgtgccaacgtttgtaccagaaggccagagtggtgtaagtgtgtcgctggctgtgggacctagtgttgtgtgtggctgtgatatagggtctagcttgtcagggtggcgtgatggtataaataagagtctgtgtcttgtgaaaggggattatcgaacaaatgaacaaatctctgaaactctgaactacctccgttctactgcctctcttcgtctttgttgtgtacctctcttcctcctgctatcctctggattcccttccccactgctaacaattggtatcagattcctacgttcctcggccctctcatccatgatgtcttcatcaccgattgatgccctaacccaggcgctggagcaccagactcgtgtcatcctcgccgagatcgacaagcgcttcaacgcgattgactacaagtgggagtactacccggttgtcgccgacccactcctgcagggcatccgtggagcggccatctcggtgccgagtgaccttgcccccatcgccggggaggctatggtcgtgatgggcgcggccgcggacgcgggggaccccacgcggctcgacccgcccacgccgctcgacgccaacctcacccgaggcgggccgccctccatcgacggccagtccgcctccctcatcccattcatccatgatgccgccacccagtgctgttaccaggaagtcgaggcacacctcactgcctcgaatgcggctacagacgggcggatccgtcagatcgaggccgataccagcgctcgggcaccatgcgtcagcgcgttggagtcctatgctgccgacgcgaatgtgaacactgactccccgttgcgtcaaatcgaagaagatggtggagttcgtgttgcggcgctggaatctgtcgtccaggtgttcgacgtctggcggccccaggtggactccttcatcgagcatcttcaaacctctgtggcacagatccgtgcgtccctcccctctctggaatcgccatggtcccagtacactcgccgcgatggacccggccacccgaacgcctacggcgccaccagcatcctcgtccccgtcaagtgcgtactccacaaacccccactcggtggctacgacggctccctcgatgacgacccggagttcggtgtcacctacatcgacgcgccactcgaccaagccgtcggttgcgttggccacgcaccagcagcggcggtcgcactccgcaccgatgttgtgggtgtagtaggtcgtgggctactggctcaggtggtggctgctgggtcaacgcacgctacctgttcgacgatttacctggccgccgaccgcaacttcgctgacatctctgttggcgcgctttcagaggagacgatggaacaaggggcaacgactctacaacctatttttcctgagaagaaatcggtgctcctctcctcatccactgatagtaaactcggaggtctgaaggcctatcatctcgctcgaggcctgtgtgaccgatgtgatgagaaatggcatcggggtcacaagtgcaatgatattgtgcagttacacgccctacaagaggtatggaatttactggctgaacctgcagtggaagaaacagcaccagatgagtcccaacctggcgatgcagtggttatggccatttcctctgaagccttttctgtttccacttttcctctacaagtgcaggtggccaatggtagtacgatatcctggaccagtgtgctcagtcaagcagcttggaatattcagggttattgttttactcacgacaaatggttatgcatcccatatgagggtatacagattgtgctgcatggttgtgcttcttcacagcatactgatgttcttctgcacattacaccggtggattcttcagattctgctgttaacttaggcattacttcatcaacttgtgttgaaggtattatcctacaaatcttcaatgcaacaagtgtgccttatgatgtggtgtttctatcagctttgtcaatgaaatgtgttgaagggaaatctgggtcacaaccaatgccactaggaattagtggtgccattgttggtccacgaaagctgggttacttgttgcctctgataggagacattgtcacggcactatcttacctagctgatgggggattttcaagctggttttgcatctgcttgtggaaagtcttagggccatctttagttcaacaaattctctggctaatctctaaaaattcagttgggatggatttgtttatatggctacgctttgagctcattagaaaactaaaacaacggatgagtggcagtgatattactggcttattcagaatgctaattcagggagtaatggtccagccttggtggttttcctctcagacctcagtgcaattgttggtccttgtacatctagcacaaacaagtgggaatgctattctctggactatgccatgtccttctttcgccatcagtgttataattacttcagttttgtattgtaacctgttcaagaagcttccatggcagactccaaatcaaggggcagtacaccggcagctatgtgatattttttgtcagctggaaattgtattctatggaaaatataacatatataatcaggatcctttggtgagtcacgatgcaatcaagaacaagttcaccactttcccttggaatcctggtgcttcaaaggttctacatcggcttgggggcaagccgaagcttaaggggaggggaatgtcacacatcctatgttgccggacaaggcacaatgtcacacatcttatgctgtcggaccatacacaggagaatgggaagcagcctcatcgcgagcgtcgtgccaacgtttgtaccagaaggccagagtggtgtaagtgtgtcgctggctgtgggacctagtgttgtgtgtggctgtgatatagggtctagcttgtcagggtggcgtgatggtataaataagagtctgtgtcttgtgaaaggggattatcgaacaaatgaacaaatctctgaaactctgaactacctccgttctactgcc

SEQ ID NO: 143968 - DNA, 1905 bp, Zea Mays
gctgcgtgctgcatgccacaccagagagcagcgtttcaagctcttccccatagttcagtacttcagtatatatgtgtgtgttgtctgatgagaacgtacatggccctctagctagctccggctccgcccactctctatccagtagctagccacaggctctcatccgcctcttgttccttgtcttgttcatggatgcagagacactcaacatcttcccttcccagcccatgcatgtggagccgtcgccgaagggggagattagtttagtcctgtccccggcgccggtgggatccaagcagcctaggtcaccggaccatcaccatcaccagcaggcggccatggaggagttggcggggagcaggaggcagcaggagcacctccacctgcagcaccaccaaccctttgctgccgctgctgagccagcagcacccgggatgatcaaagatgtcaagccactggccaagaaggatcacaggagaggcacatcgaccgctgaacgcgacccaaaaacgctgagaaggctggcccagaacagggaggctgcaaggaaaagcaggctaaggaagaaggcttacatccagcaactcgagtccagcaggatcagactagctcagctcgaacaagaactgcacactgcaagagctcagggagttttcttccccaacagtggcatcctcgctgaccaaggtgtcgccggcaaaggcgtccccatcggcggcatcgacggcctcagctcagaggcggcgatgttcgacgtggagtacgggcggtggcaggaggagcactaccggctgatgtacgagcttcgggcggcgctgcagcagcacctgccggagggggagctgcagatgtacgtggagagctgcctggctcaccacgacgagatggtgggcatcaaagagggcgccatcaagggcgacgtcttccacctcatctccggcgtctggcggagccccgccgagcgctgcttcctctggctcggcggcttccgcccctccgaagtcatcaagatgctgctgagccacgtagagcccctgaccgaacagcagatcgtgggcgtgtacgggctgcagcagtcggcgctggagacggaggaagcgctgagccagggcctggaggcgctctaccagtcgctgtctgacaccgtggtctccgacgcgctcagctgcccctcgaacgtctccaactacatgggtcagatggccgtcgccatgaacaagctctccacgctcgagggcttcgtcagacaagctgagaaccttcggcagcagacgctgcaccggctgcaccaggtcctgacgacgcggcagatggcgcggtcgctgctggccgtgtcggactacttccaccgcctccgcacgctgagctcgctctgggtcacacgccccagggcaccgcaggagcaataataggtccacagctggtgacggcggcgctgatgaatggcgtgatcgccggccgccgcatacaacggcacacgcgcatgtgtccattcatgcatatatgagtcgtgcatgggcgcatgcatggtgtgtcgttcgtcatcaagaacagagcttgcaggtagagccagttagggccggccgggggagagagagctagtgaggacgagaaaccaaccaaaggataatgttaatcttggcgacgattgtcgtgttggttgctttgtagctatagctaggtgtacttgatcgttcgatcgcgatctatcgatcgatcggctgctgctgtagtcgatgcggtggagtgatgatgttgttctaagttattagttatctctcatgatcaccggacgcatatgcttcgtagtcgtttaatttggagacgtgtgtggggttttaggcaaccgtcataaatctttgatagcatgtaacacatgctaatataagcttgctttgatggtag

SEQ ID NO: 143969 - DNA, 1911 bp, Zea Mays
cacgtactacaccgcctgtgcgcgtatgctgtgtcggcgtgcgcctgcgcccgcaacagcctgtgcttgcagctagcgatccgtccgtcgaccggccggtgcatggtgagcggcggcagcaccaaggagcagcagcacgagatgaacatctccttcgggatgatgaaccagcaccatcagcctccgtcctcctcctcttcctcgtccatgcatgcggccgccgcgagcttcatgagcggcaaggaggcgtcaggggcgtatgaccatctgggcgagctggaccaggcgctgttcatgtacctggatcacggcagcagccatggcggcggcgccacgcagcaagagcgaaggcagacactcaacatcttcccttcccagcccatgcatgtggagccgtcgccgaagggggagattagtttagtcctgtccccggcgccggtgggatccaagcagcctaggtcaccggaccatcaccatcaccagcaggcggccatggaggagttggcggggagcaggaggcagcaggagcacctccacctgcagcaccaccaaccctttgctgccgctgctgagccagcagcacccgggatgatcaaagatgtcaagccactggccaagaaggatcacaggagaggcacatcgaccgctgaacgcgacccaaaaacgctgagaaggctggcccagaacagggaggctgcaaggaaaagcaggctaaggaagaaggcttacatccagcaactcgagtccagcaggatcagactagctcagctcgaacaagaactgcacactgcaagagctcagggagttttcttccccaacagtggcatcctcgctgaccaaggtgtcgccggcaaaggcgtccccatcggcggcatcgacggcctcagctcagaggcggcgatgttcgacgtggagtacgggcggtggcaggaggagcactaccggctgatgtacgagcttcgggcggcgctgcagcagcacctgccggagggggagctgcagatgtacgtggagagctgcctggctcaccacgacgagatggtgggcatcaaagagggcgccatcaagggcgacgtcttccacctcatctccggcgtctggcggagccccgccgagcgctgcttcctctggctcggcggcttccgcccctccgaagtcatcaagatgctgctgagccacgtagagcccctgaccgaacagcagatcgtgggcgtgtacgggctgcagcagtcggcgctggagacggaggaagcgctgagccagggcctggaggcgctctaccagtcgctgtctgacaccgtggtctccgacgcgctcagctgcccctcgaacgtctccaactacatgggtcagatggccgtcgccatgaacaagctctccacgctcgagggcttcgtcagacaagctgagaaccttcggcagcagacgctgcaccggctgcaccaggtcctgacgacgcggcagatggcgcggtcgctgctggccgtgtcggactacttccaccgcctccgcacgctgagctcgctctgggtcacacgccccagggcaccgcaggagcaataataggtccacagctggtgacggcggcgctgatgaatggcgtgatcgccggccgccgcatacaacggcacacgcgcatgtgtccattcatgcatatatgagtcgtgcatgggcgcatgcatggtgtgtcgttcgtcatcaagaacagagcttgcaggtagagccagttagggccggccgggggagagagagctagtgaggacgagaaaccaaccaaaggataatgttaatcttggcgacgattgtcgtgttggttgctttgtagctatagctaggtgtacttgatcgttcgatcgcgatctatcgatcgatcggctgctgctgtagtcgatgcggtggagtgatgatgtt

SEQ ID NO: 143970 - DNA, 932 bp, Zea Mays
cctaacttaagtatggagggctaaacttctcattttgttgccggtcttgtcattggagaccaaccatctgttgtatgctgagtgatgacttgtattctttggcaataatgtgtcatacagtgacacaattgcacatgtggaaggacccaatcgcaaggaaatgatgatgtgttctgtgaatggtggttgagaaccagtttgatcaaactggaaacggggtctcaactcgctgatgactttaggggcctggatgttgtggaagcatcagaatggctgtttttaagggtgctgcacccagtgtccagcttgtccttggatgaatttgggagtaagaataccgctaatgcatgactggagctaggtgcttggagcagcttatgactgctgccacgtatacatataataggttcatccgctagtgtgttcctgaacaattagtgggtgtgtgttgtggttgggcttttttttttgtaaatatgttttcttaatagaaagatatgcagagaaaattaaaagggacccataccaactgttttacattcaaaggatgtgcatgcagactatctcacactcagaagccctaagaatattattaaatgtcagattcttttcttatttctcaatgtgagacacttccacaccagaatttgaagttctttttatccctctgtgttactgctgttggtaatttgtgatacggagactggaaccagttctgttccttttgctatgttcttttgtgtgaaagatacaaggttcatatctcttggcgcgggagttgttgggctgtgggctgctgcctccttgtgcgcaaattggcaggagccaatacttgtggggtcctctaatcataaccccttcgcaggaagtctgtcacatgcgcggcaggcctggagcatctcaagagatcgtcagggattcagagaattcag

SEQ ID NO: 143971 - DNA, 2619 bp, Zea Mays
tcctcctctctctctctctttttcgctcccgatttccaaatctcaaataataaataaccagaagggaagcgaatcttctccatcaacccagcaaatcgctcgttcgagcgtcccactcgacgagaaattctcacccatcacctccgcgtcgctccccccgttcgccgccaggggcccaatttcgtgtggacaggcacaggctgctgtgatcctttggtggatgggggcagcgcagctagccaccggaggttgcctagtttgaaatttaaccgcgttaccgaagtggtactccgtagttcttatggatcaacttgccctgcttgcgacggagctgggtgactcgtcagactttgaggtggagggcatccagaacctcactgagaacgatgtcagtgacgaggagattgagcccgaggacctggcgcggcgaatgtggaaggacagagtcaggctgaggaggatcaaggagcggcagcacaagcttgccctgcagcaggcagagctgcagaagttgaggcccaagcccatatccgaccaggccatgcgcaagaagatgtcaagggcacacgacgggatcctcaagtatatgctcaagctcatgcaggtgtgcaatgcacgcgggttcgtttatgggatcatcccggacaaggggaagcctgtcagtggcgcttccgataatatcagagcttggtggaaggagaaggtgaagtttgataagaacgggcctgcggcgattgagaaatacgagtctgacaacttagtatccgctactgcccagagtggtggaactaagagccagcacagcttgatggatctccaagatgccactcttggttcactgctttcctcattgatgcagcattgtgatccaccgcagcgcaagtacccattggagaagggtgcttcacccccgtggtggccttcagggaaggaggaatggtggaccgccctgggtcttccaagcggccaagttcctccttacaagaaaccacatgatcttaagaaggtctggaaggctggtgtgcttacaggtgtaatcaagcacatgtctcccaattttgataagataaggaatcatgtacggaaatcaaagtgtttgcaggataaaatgactgcaaaagaaagcctgatttggctgggagttctacagagagaagaaagccttgttcacagaatcgacaatggcgtatcggagattactcagcgcagtatgccagaggagaggattgcagacacaaatagcagcagtaatgagtatgatgtgtatggttttgaggatgctcctgtttctacatcatctaaagatgatgaacaagatctgtctccagttgcacaatctgctgtggagcatgttccgaaaagaggaagggaaagagcttacaataaacgccctaatcaaatcgttcctggtaaggcaaaagaaccaccaaagagaaaaagaacacgccacagctccactgttaccgagccagatgcacacagagttgttgatgcaccagaaaactcaagaaatttgatccctgatatgaatagattggatcaagtagaaatcccaggcacgtcaaaccagattgtcacctttgaccatgggggcaccacaactgaagctttacaacacagaggagatgctcaagtacaggtccatcctcctggtgctgaggttaatagcttctatagtgctccaactgcaaaccctactcctataagcatatatatgggtgaccagcctataccttatcaaaataatgacagcacaaggccgagatctgaaaatagttttcctgtagatgctcatactggtttaaataatcttcccagcagttatcagaacttacctccgaaacaatcactaccacttcccatgatggatcatcatgtggttcccatgggtatcagggcacctactgatagcattccttacggtgatcatatactaggtggtggaaattcaacttctgttcctggagatatgcagcaactcatagattttcctttctatgctgaacaagataagtttgttggcagttcctttgaggggttgcctttagactatatcagtatcagtagtccaatcccagatattgatgacttgctgcatgatgatgatttaatggaatacttgggaacataacattcggtcaggatgagtctgctagcatttgttttcatccattttagtctcactggagtcatcatcctaacttaagtatggagggctaaacttctcattttgttgccggtcttgtcattggagaccaaccatctgttgtatgctgagtgatgacttgtattctttggcaataatgtgtcatacagtgacacaattgcacatgtggaaggtgaacatggcctaagttaaatatgatatctttctggagataatatctgttgaagaaagggctagatttttttttatagttttagaatccttgagatatgattgttttcctctgtcatcctatctttgtctatggcttttgccatctacaaaaacatcgggaatccaacactgtatatgcaataaagaaatgaaaaaaatgattttgccatcctctctgttgtgtttgttttttatttcaatgtcccctaagaatgctgttgttgcataacaaagtccac

SEQ ID NO: 143972 - DNA, 108 bp, Zea Mays
gtcggtgttacctttaatttatttagtagctcaaatgtataggctcgagagtatgattgtaatttcatcgaagttgtttcccatgcgtataaataaagaaacattgcc

SEQ ID NO: 143973 - DNA, 504 bp, Zea Mays
atgagttcggcagacaagacgcatggttcgcacggcgcgtggtctgtcatcgacgaggcgttcatgaaggctccgccgtcggacgacccggcttgctccgtgcaggtggacgctgtcgcataccgcgagaccatccagacctgggtggaagacctgcgcgccaagaacggggcgcgcccgctctcagcggccatgtaccgccgccggcgcgccctcaaccactgcagcgtagctctcgagttcgcccagcggcgcagggtggcggtgggcctggaggacgacgagctgtgccggtccgtgcaggccgcgatggacacccaggtggtcggttcgtgcgcctactgcggctgcaatttctccgtcgtggccgtggtcgccgtggggggcctgggcatggcctgcggcgtctgtttccggctggttcgagtgtacaacccggtgccgctggttcgcaaccccccggcgaacgcggaggagaggtggaagggctggctgccatggtag

SEQ ID NO: 143974 - DNA, 1698 bp, Zea Mays
caccagacacgccaaaagcgttattttaagggcggcgccaccactattgtcgcctgcttcaccctccctgctcactgccgcctaccctcgttgaagcgcgctctctcgctctcgctctcctcgcgcttcctcccactcccactggacagagaggagggttagtggagggcggggtaggaagctaccgccgccacagtaacagcgttagctaggggggaagcacggaagcgggaagcaatggcgaccggcggcggcagcagcaggagcgacgacgtgcgcgggctcaagtttggcaagaagatctacttcgagcaggacggcgggagcgggagcggggcgggggcggtgggcggcaggaaggggaagggcgtggccaccggtggcgcgaggccggcgtccgccgcctccgcagcccagccgccgaggtgccaggtggacgggtgcggcgtggatctgagcgccgtcaagcagtactactgccggcacaaggtgtgcaacatgcactccaaggagccgcgcgtcttcgtcgccggcatcgagcagcgcttctgccaacagtgcagcaggttccaccagctacatgaatttgaccaagggaaacgtagctgccgccgccgcctcatcggtcacaacgagcgccggaggaagccaccacctggacctctcacttcacgatatggccggctcgctgcatcacttcaagagcctggcaggttcagaagcttcctgctcgacttctcgtacccaagggttccaagcagcgtgagggatgcgtggccaggaatccagcacggtggcgacaggatgctgggcaccgtccagtggcatgggcaccaagaacctcctcacccacaccgcagtgcagctgctggctatggcaaccatgctgcatacaactgccatggcggcttggtagcaggcggggccccaatgctctcctctgccgcctttgagctcccgcctggcggatgtgtcgcgggagttgccgccgactccagctgtgctctctctcttctgtcaactcagccatgggacacgacctcccacgaccaccggtccccagcaatgcccgcggccggcgccttcgacggcaccccggtggcgccgtccgtcatggcgagcagctacgcggcgtcgagcgcctggacgggctcgcgggaccccgctgccgacggcgccaggaacgcgcagcgtctcgacgatgctctgcacctggtccacccaggctccgcggcggtccacttctccggcgagctcgagctcgccctgcagggaagcggcgggccgccacacctgccgcgcgtcgaccatggcggctccggcggcggcaccttcaaccattccaccaccagcgcgatgaactggtccctgtagcagcactgcctgccttcatccggtcgccacgccacgagatgtggagggagcacttttgcattggacaccaccctggttttgtgcgccttaccttgccgttctcgttttttcagggtggagaaactgggattcctaaccatagtagatctaccgtgaattcccttcccgtgtagtagcgcattgcgtccatgaactcatttgatcgatcgtcgtgtcaccgtgtgcgtaactgcgtatctgtttggcgtaactgcgtatctgtttgttgaatctttccgaacattgcggacttcccatgctgcttcaagcaacaactcgggctat

SEQ ID NO: 143975 - DNA, 84 bp, Zea Mays
catatctgaaggctgacagcctgtcactgatattgcaacccaacaaaattatctataacatttcccccttccccaattctgacc

SEQ ID NO: 143976 - DNA, 2100 bp, Zea Mays
gtttggcggaggcctcaatccgggtctagaccaaggtcatggtggcgacgaaggtggaggccgaggtggagggtgatgcttccactctcagtcttggggtggggtcgtggggatgacatatgagagtggggtgcagtggtggctcgtcgacatcagccattggcacccttcccctgcccagttcgatgatgcaccctccctcctactacttcacgatggcaccaccatctccaggtaccgtgccgatggaggaaaggagaaacaaggtattttgaagattaagagtgatgccacatacttagcgatggggtgcttgatatcctagatattgtactagcttcagacctcgccgaattgacaccttcgaagaaatgaagtcgccagattggtaggctttgagtgtttcaccagaggaagtatgtagtgcagttaaggaaggaaatgaacttccatcagacttgatagacacactactaaagtggatcccaagcaatgatgaggagcttaggcttcgactgtcctcccatagcaccgccacaccgcatgcgtccgcggcggcgtccgcctcggcgccggtctcgcacaccgctccctagctggggaagttcatcgcctccgagcccttcaacgtggggggattcgattgggcgatctacttctaccccgatgggaagagcggcgaggatggcgttgtctacgtctcgctcttcatagccctggccagcgaaggcaccgatgtgcgcgcgctgttcgaggtcacgctcgtcgaccagagcggcaaggggcaagacaaggtgcatacccactttgggaggtctctcgagagcgacccatacaccctcaagtaccgcgacagcatgtgatgagtctatgtacaggttgtttcctacggtatgcttatctatggtggaaagaaaaagtgattgactcatacttgaaaagaaaagatggcctttgcccattgacgcctgagacaaccagaaatttgccatgacctcgttcctgaccaagaaaaactgtcaagcacagaatcacagttgatatattgggattccaaggtatcagaggctgatatggatgcaatgtggaaacatcctgatgtgtataaggagtggataaaatctggtgagagacgtggaaatgtacgattctcccatgatgcaaagaacatgccttacctttctcgcgtcgaggtgaaggatatgattgccttctcatgttgtgtatatgatggtggtgatgaggagaaggaaatggatgcagccagagaaataggttggagagggaaatttactaagagaggacgtgtaataagaccaggaattattagaatgagtggaaaatgtcctcttacacctttggaggttgggttaatgcttcgtggaatggatttcagcaataagactgcaatctttttggcatctggaaagatttacaaagcagagaagaacatggcttctcttcttgaaatgtttcctctcctacagacaaaagagacactggcatcagaagaggaacttgctccattcaagatggctgctgttgactatagtatttgtgcccaaagtgaagtttttgtgaccacacaaggtggaaatcccgcattttttatgggtcacaggagatacttgtatggtgggcattcaaaaacaattaaaccagacaaaagaaggcttgctgtactcttcaataatccacgtatagggtggacggcattgaagcggcacttgcttaatatgagagcatacagtgatgtcaaggggatcgaaatgaaaagaccaaacgaatctatatataccttcccgtgtcctgactgcatgtgccgcttgaacagaacagaacactcgaaatccaaacagagtagatagtatatttcgtatgtagaccaaatggctaaaaccatccaatattttcatagactgaaaatgcagagaaagcaacaaaggtgtatcaatacagtcgtacaagcttagtatcggatggtttttaatttgtatagcaaagcacgggcacatacctatatatcttttaatgtatgtaaatattcttaacctttaaaagatactaacaagcaggtataacgataattaatgtttctat

SEQ ID NO: 143977 - DNA, 1441 bp, Zea Mays
cggtggggatttatttaatgggaggctaatctcattttttttaaattcgcgcaggacgctgcagtcaaaagtgaaacggctgaaagcggagcgggagcagagagcctccggcgaggctgtgagcgaccacgatcgcctctcaagcgaggagcccgggtgctcatgcagggagtcgaactccacagatctgaagccgcccaaacatcccagccagctaggcgacgggtctaaggaggagaaggttgcgaaacaggaagcgtccgttgagtcggcggtcgattccaaagacagcagcgaagtgcggagctcggcgagcttgtgccgccgccgccgtggaagcgggaacgctgaagaggaggaggcggaggcggaggcgtccaagtcctctccgctcactttcctgctcgacgcggtcttggccaagctcggttgcgtgctggaccggttacgcgaaaacgacagcgaggaatctgccatgtaccgggacacgatcaggcgccatgtggacttggagactctgcggcgtcggctgaacgcgtcggccggctcgcgcgccgacgatgacagccactcctctgcgcacgagctctatcgcgacctgctgctgctctgcacgaacatcgtggtcttcttcccgggtggcacccccgagaactccgcggctgtcgaggcccgcgcgctcgtcaccgggcacgcatcggcggtgctccacaagccgaagcaggagaacgtggctgtggctgcgccggcaccggcaagcgccgacatcgttggttcgctgatcgagaaggggaagccgctgattgtgtgccgcaagcggagctccatcgcgaaggccgcagcgtctgcgagaaaggaggagaacacgatgaagggtgagacggcggaagagacggaggacgagaagaaatccgtggctgcggcgaccaaggacaagacgtggggggtgaggacgaagaagagccgcggtggcaagaactccgcgggtccaggccgaaacctagcggacggtgctgacgggccgaggaagggcgccggtgctggcactgacgggctcgccaagaagcggaacgccgtagacttcctaaagcgcctgaaccagtcgccccccaggaagcgggggtcggggtcccacctgggtacgacgcgaaagcggccggcggcgatggaggagcagacgactaaacgcaagagaggaaccggacggaaggagggcaccggacgcggtggatccaggaggggcggcaaggctgccggggcgaagagaggcgtcgggcggccgcagaaacgaggcctagcaccagccactccgccaccgtccaagaggaccaagacgaacagcagcaggtcggagaagtctttgggaacgggaaagcgtggcgggagaaggcagagtatttttatagatcacgttgttggagatgctctaacactaatataa

SEQ ID NO: 143978 - DNA, 1938 bp, Zea Mays
gctgatttccatgaccagtgaccaccatgccatcttctttaccgataaaaatcaatccgggccgaggaagcaaaaggcgacgggggaaagcaacggagacgagggcaacggaccagggctgagagcctaagaccaccacacctccactgcctcacggacgagaacgcaggaaggatggcggacggcaccgacgtgtcgccggagtcggaggcgacggcggcagccgggaagagcggggagatctggggaacgctggaggagctgctcctggcgtgcgccgtgacgcggcacggcacggcgagctgggactcggtggccatggaggtgcagacacggatccccgtggcggcgcggccaggcctcacgccgcacagctgccgcctccgcttccgccacctccaccgccgcttctccaccgtcggcagcggcggggtcgaggaggccgaggaggatcccgacgcctccgctgccgagggatgggtggacgagctccggcggctgcgcgtcgccgagctccgtcgcgacgtcgagcgatgcgatctctctatcgggacgctgcagtcaaaagtgaaacggctgaaagcggagcgggagcagagagcctccggcgaggctgtgagcgaccacgatcgcctctcaagcgaggagcccgggtgctcatgcagggagtcgaactccacagatctgaagccgcccaaacatcccagccagctaggcgacgggtctaaggaggagaaggttgcgaaacaggaagcgtccgttgagtcggcggtcgattccaaagacagcagcgaagtgcggagctcggcgagcttgtgccgccgccgccgtggaagcgggaacgctgaagaggaggaggcggaggcggaggcgtccaagtcctctccgctcactttcctgctcgacgcggtcttggccaagctcggttgcgtgctggaccggttacgcgaaaacgacagcgaggaatctgccatgtaccgggacacgatcaggcgccatgtggacttggagactctgcggcgtcggctgaacgcgtcggccggctcgcgcgccgacgatgacagccactcctctgcgcacgagctctatcgcgacctgctgctgctctgcacgaacatcgtggtcttcttcccgggtggcacccccgagaactccgcggctgtcgaggcccgcgcgctcgtcaccgggcacgcatcggcggtgctccacaagccgaagcaggagaacgtggctgtggctgcgccggcaccggcaagcgccgacatcgttggttcgctgatcgagaaggggaagccgctgattgtgtgccgcaagcggagctccatcgcgaaggccgcagcgtctgcgagaaaggaggagaacacgatgaagggtgagacggcggaagagacggaggacgagaagaaatccgtggctgcggcgaccaaggacaagacgtggggggtgaggacgaagaagagccgcggtggcaagaactccgcgggtccaggccgaaacctagcggacggtgctgacgggccgaggaagggcgccggtgctggcactgacgggctcgccaagaagcggaacgccgtagacttcctaaagcgcctgaaccagtcgccccccaggaagcgggggtcggggtcccacctgggtacgacgcgaaagcggccggcggcgatggaggagcagacgactaaacgcaagagaggaaccggacggaaggagggcaccggacgcggtggatccaggaggggcggcaaggctgccggggcgaagagaggcgtcgggcggccgcagaaacgaggcctagcaccagccactccgccaccgtccaagaggaccaagacgaacagcagcaggtcggagaagtctttgggaacgggaaagcgtggcgggagaaggcagagtatttttatagatcacgttgttggagatgctctaacactaatataa

SEQ ID NO: 143979 - DNA, 1653 bp, Zea Mays
aacggtccggcaagctcgacacccaatccaatcccagttccacctccgtctcccgtctcacccattccattgatccagtcagtcccctccgccatgacctccgcccctaattaaatcccggcgcggccgccgccgtctccccgggccagtaatctccgctccccaattccctcgcctccacacttgaaatccccaccaccaccaaacctccctagcccggcaaatcccgtatccaaatccaatagggtaaacctagccgcccatctgcccgccatgaaggcgtcgatcaagttccgcgacgacgaccgcccgctgctgcgcgccaaggtgccggtcggcgtgctggggctgcctttcttctcgggcctcgtggcggggggagacgccaaggacctccgcttcgacctctccaccgccttcacctccggcccggcgctccgcctctcgtaccgccccaacgaaccgctccagccctttgccctctccatccgcacggggctggggccgctggggtcccctgtccgagcccccttcgccctcgccgccgaattcaacctcacctcctcgaacccgcccgccttctcgctcgttttcaagccccggatcggagacttcgccgtcgccagctccgtccgctccccgccgccgccgccgcccgcatcaactctgcccccgctgtcggtcaagatgtccgacctcgtcaccaacggcgacgaccacgaccgcaaagcgcacggtaacgggttctccttctctgggaatgggttcgcggcgaacgtggcggccgccgccgggaccggcggcggcggcgtgggcgcgctgctgtccaggatgcggctcacgaccaggagtgtgctgccactgtggagtaaggcgagcctgcggttccagtgggggctgcgcgtgccgccggagatcaaggccgcgctcgcagacgacgggtacgggcgcaaggctgggagcctcgccatcagcaagctgccgctgctggtgatgaacaagatcaccatcgagcacacgcccaaggtgccttcgcagtctgaaacggataagaagaggaagaaagatgccccaccagcagccgagggcgaggtgttctcactaatgaagaggcaattggaggagctgaatgctgagagcaccatgctgcgtctggcagtcgaggacttgcgtgcagaggttggagccagcaaaggcgatggacgtaagctgccagcaacagtgccacatccacagcgttcattcgtgtcgaaaccagatcaccattttcacagcgatgctaaggatttgggagacagtgggacgaaaccggcctccaatgatgcaagtgaggggttgaagaaggcgctggaggccagacgaaagtaggaaacacctagataggggggccatagggcttgctgacactgcaagcgctacaatatgatatggctgctgacggctgtgtcaagttttgtgcttaataataatgcttcctcaatggagaagattggtaagggctgtgaggtagccattttccataggtgatgtagtagttttgcctatattctatttccattgtttgtgttaggatattatccgttctgtataaatccgcaacttgcgatctaaaatgaatgaaggattagttttttttatcgggggccacctttg

SEQ ID NO: 143980 - DNA, 462 bp, Zea Mays
agtcgccaaccacgtcggcgtgcgcacgtcacattagtaggacgatcagaagctaagccccagctccagctccggtcaagccgggccgccggccacgagctccgcgatgcgagtcacgtcctaccagaggctgtcgtcgtcgcagcccgagggtggcgccgcgagggcgtgggcttcgctgaggcgggcagcggcaggggtcgctcggctgtacgccgcgcggcggtggcgggtgtccgcgcggaggctgtgggttgcccggccgctgcgggcgaaggcggcggcggcgaggtacgggtacgactcggccagctacgcgcgcaacttcgacgatggggtgtggatggccgaggtgggcgtgtcatggaacgcgcgttcgttcggcgcgtgcaggctcgccgccgcccagtcttaactcaggagagagcttcccttcatgttgcttcttagaattagcgactg

SEQ ID NO: 143981 - DNA, 1961 bp, Zea Mays
ctcacacatgacacatgtaattgcttgaaaatctatggtttagaaagagggaatcagggaagtgaactagcggtccacgatactccgacgcccactttgctacctcggaaccctagccgccgcccatggatatcgccggagaccggcgccggtagcgatacgcaaaaggagtggtacgttctttgaccttgtttattgctgcgcccgaggcgtgtggcgcggggggagcaggaaggagaggggaagaacagaaggggaaggcgggcggggccgcgatgtcggtgcggatcaaggcggttgtagaccggttcgtgaaggagctgcaggaggcgctggacgcggacatccaagaccgcgtcatgaaggagcgcgagatgcagagctacatcgaggagcgcgagcgcgaggtcgccgagcgggaggccgcctggaaggccgagctatcccgtcgcgaggtttgttgagatttatgctccaaggtgcaagccggaattgtcagttcgggaatcagaattcagttacatttaggtgaaacccgtagcgggttttggtgccagtaggggaaattggagaggaaacgaggagtgtttagaaggcagaaatgggagccgctaacaacaaggatgaattcacagggaaatttgggttcgcaaagtggaagtggaggcttggtaattggtggggtgtgattgatgagtggtggcaccaaggagagaggtgttgggtggggttagttcttggagtagaaagtgtatatgggtgaggagatcaaattcatataccgggtggcaggtcaaccacaactccataagaataggagacgtctagatcagaatccaaatggcccaaatttcattttgctgtgctttgccttgcccgtcttgcttcacttatggaagcttgcacacatttggcctgtttcttattacgtgttcagtagccatgagttaatgtagttaactagttatgtctttactatgtctcatttctctcagtcaatgatggtctggccagcaatgcagttcttgactcatgctatgttatgtacaagtgctcatatgttgggctatggttgaatcaataactctcattatacggaaggcttaatttgaagtgcttgatatggaatgacttagttcaaactgtaacacggtattttatatacaaagcaagtgcttagtcacttggtactagatcatcatcattaacacctgtagtattgaagcgagaacagtaaagccggttctcttttgcctaattaggagcaaaattagttgatggtcgtgccaggtcagttttctttaaatgtattagaagacttagagcgagcagtatgcatttgggtaggatcttcctgatggatgaaagtcaagcatgtctccgatcatcactattaactgtaattagggacctgcaacatgacttgtgttccaatcctgttctgtacaggccgagatcgcacggcaagaagccaggctgaagatggaaaaggagaatttagagaaggaaaaaagcgtcctcatgggaacagcatcgagccaagacaaccaagatggagcccttgagatcactgtcagtggtgagaagtacaggtgcctccgcttctccaaggcgaagaaatgagaaatggactggcactgaactggaccaacacatgctctgtagtcagctaaatctagccacctagtcttgcaagacccttattttgattcaaattgcattctcttttcttgtacaggaaatcctggaatgccgttaatagaatagcggatacttatgccaggactgtcttgtttataaaaaaaccgggctgctagagcagctgcaatggggagttaatgatgactgaaggttgttgacagttgtgatgtcctgttcttgctgatatgtttacagatcagctcaatgctggctctaaaatatgagttcagagttggtataaatggacaggtgctctgcaa

SEQ ID NO: 143982 - DNA, 967 bp, Zea Mays
ctcacacatgacacatgtaattgcttgaaaatctatggtttagaaagagggaatcagggaagtgaactagcggtccacgatactccgacgcccactttgctacctcggaaccctagccgccgcccatggatatcgccggagaccggcgccggtagcgatacgcaaaaggagtggtacgttctttgaccttgtttattgctgcgcccgaggcgtgtggcgcggggggagcaggaaggagaggggaagaacagaaggggaaggcgggcggggccgcgatgtcggtgcggatcaaggcggttgtagaccggttcgtgaaggagctgcaggaggcgctggacgcggacatccaagaccgcgtcatgaaggagcgcgagatgcagagctacatcgaggagcgcgagcgcgaggtcgccgagcgggaggccgcctggaaggccgagctatcccgtcgcgaggccgagatcgcacggcaagaagccaggctgaagatggaaaaggagaatttagagaaggaaaaaagcgtcctcatgggaacagcatcgagccaagacaaccaagatggagcccttgagatcactgtcagtggtgagaagtacaggtgcctccgcttctccaaggcgaagaaatgagaaatggactggcactgaactggaccaacacatgctctgtagtcagctaaatctagccacctagtcttgcaagacccttattttgattcaaattgcattctcttttcttgtacaggaaatcctggaatgccgttaatagaatagcggatacttatgccaggactgtcttgtttataaaaaaaccgggctgctagagcagctgcaatggggagttaatgatgactgaaggttgttgacagttgtgatgtcctgttcttgctgatatgtttacagatcagctcaatgctggctctaaaatatgagttcagagttggtataaatggacaggtgctctgcaa

SEQ ID NO: 143983 - DNA, 1508 bp, Zea Mays
gtttactagatttttctatagattcgaaccgtaatccattaccacgcctcctcacaggcacacctcacacgagcagcagcggacgataagagatgtgctgaagctgaacggtggccatgtccaccggacgcacagaggaggccgccgggagcgcggagacggcgtgcgtgacgggcgccggcgggtacatcgcctcgtggctcgtcaagctcctcctctcccgtggctacaccgtccacggcaccgtccgcgacctcagtgacaataaaaccgctcatctgaagcggttagagaatgcttccgaaaacctcaagcttttcaaggctgatgtccttgactacgacgctatggcgggtgcagtcgcagggtgccagggagtctttcatgtcgccactcctgtgccttcagggaagatcaccgatccagagcgagagatgctgggtcctgctgttaccggcaccataaacgcactcaaggctgcgtctgctgcaaatgctcgtcgagtggtcgtcgtttcatccatggttgccgttgagatcaacccgaaagactggcccagagacaagatcaaagatgagaactgctggtcagataaagagttctgcaggaacgaagagaactggtattctgtcgccaagatctcgtcagaagaggccgcacttgaatacgcgaagcagaccgggctggatgttgtgacggtcaatccagctgtggtctttggccctcttctgcagccgacgctcaacacgagctgccagttcctcgtctacttcctgaaaggaggacctgatcgaatgagggacaagctttggcacatcgtcgacgtcagggacactgccgatgctctcctgcttgtgtacgagacaccacaagcctccggcaggcacatctgcgctcctcatttcatcagcgcgcgtgacctgctggagctgctgaagacgatgtaccctgatgattaccctttcattagcaaggagagcatctacgacatggagcacccagctccaatgacgtccgacaagctcaagaaactgggatggaaggtcaggccgctgaaggaaacaattgcggaaaccgttgagttctgccagcatgctgggtttctcgaggacgtggagggattccgttttcctcccctgtacaacataatctagtttacaataacgtcagtagtgtaagagcaactccaacggaatccgtaaaatttacacaaaaactttgatttggaggctctctaaaataaatagctcgctggaaagcaagctctgatagatccgtcatttatcgctgttttttttttaatcccgcggcaaggaagatgcaggttctgtttgattgccctagaccagctaggtatggctaggccaggatcctgttcgtttcccaataaagctttatttaggtaatctagtattaacccaatccacttgttgagctggattaggtgtaaattagcttaagcacctcaatacgtacctatgtattgagctcaatactacaatttcagc

SEQ ID NO: 143984 - DNA, 1542 bp, Zea Mays
gtttactagatttttctatagattcgaaccgtaatccattaccacgcctcctcacaggcacacctcacacgagcagcagcggacgataagagatgtgctgaagctgaacggtggccatgtccaccggacgcacagaggaggccgccgggagcgcggagacggcgtgcgtgacgggcgccggcgggtacatcgcctcgtggctcgtcaagctcctcctctcccgtggctacaccgtccacggcaccgtccgcgacctcagtacgtactgtaaccaaaaacaaaactccgtcgtacttggcagctcgtttttgtgcactacggagacagcttgcagttgaaatgaattgaaaactatccagacagcatcgacagtgtcgtcgtacctgtgtgtttcaggtgacaataaaaccgctcatctgaagcggttagagaatgcttccgaaaacctcaagcttttcaaggctgatgtccttgactacgacgctatggcgggtgcagtcgcagggtgccagggagtctttcatgtcgccactcctgtgccttcagggaagatcaccgatccagagcgagagatgctgggtcctgctgttaccggcaccataaacgcactcaaggctgcgtctgctgcaaatgctcgtcgagtggtcgtcgtttcatccatggttgccgttgagatcaacccgaaagactggcccagagacaagatcaaagatgagaactgctggtcagataaagagttctgcaggaacgaagagaactggtattctgtcgccaagatctcgtcagaagaggccgcacttgaatacgcgaagcagaccgggctggatgttgtgacggtcaatccagctgtggtctttggccctcttctgcagccgacgctcaacacgagctgccagttcctcgtctacttcctgaaaggaggacctgatcgaatgagggacaagctttggcacatcgtcgacgtcagggacactgccgatgctctcctgcttgtgtacgagacaccacaagcctccggcaggcacatctgcgctcctcatttcatcagcgcgcgtgacctgctggagctgctgaagacgatgtaccctgatgattaccctttcattagcaagtaaactttacttacctaaccatttctcttgtacgtttcatcatatactgaagctagttgggaatggtagggagagcatctacgacatggagcacccagctccaatgacgtccgacaagctcaagaaactgggatggaaggtcaggccgctgaaggaaacaattgcggaaaccgttgagttctgccagcatgctgggtttctcgaggacgtggagggattccgttttcctcccctgtacaacataatctagtttacaataacgtcagtagtgtaagagcaactccaacggaatccgtaaaatttacacaaaaactttgatttggaggctctctaaaataaatagctcgctggaaagcaagctctgatagatccgtcatttatcgctgttttttttttaatcccgcggcaaggaagatgcaggttctgtttg

SEQ ID NO: 143985 - DNA, 1070 bp, Zea Mays
atggtaaaaccgccactccctaggcgacgcacggcgtgcgtgacgggcgccggcgggtacatcgcctcgtggctcgtcaagctcctcctctcccgtggctacaccgtccacggcaccgtccgcgacctcatgtcgtcgtacctgtgtgtttcaggtgacaataaaaccgctcatctgaagcggttagagaatgcttccgaaaacctcaagcttttcaaggctgatgtccttgactacgacgctatggcgggtgcagtcgcagggtgccagggagtctttcatgtcgccactcctgtgccttcagggaagatcaccgatccagagcgagagatgctgggtcctgctgttaccggcaccataaacgcactcaaggctgcgtctgctgcaaatgctcgtcgagtggtcgtcgtttcatccatggttgccgttgagatcaacccgaaagactggcccagagacaagatcaaagatgagaactgctggtcagataaagagttctgcaggaacgaagagaactggtattctgtcgccaagatctcgtcagaagaggccgcacttgaatacgcgaagcagaccgggctggatgttgtgacggtcaatccagctgtggtctttggccctcttctgcagccgacgctcaacacgagctgccagttcctcgtctacttcctgaaaggaggacctgatcgaatgagggacaagctttggcacatcgtcgacgtcagggacactgccgatgctctcctgcttgtgtacgagacaccacaagcctccggcaggcacatctgcgctcctcatttcatcagcgcgcgtgacctgctggagctgctgaagacgatgtaccctgatgattaccctttcattagcaaggagagcatctacgacatggagcacccagctccaatgacgtccgacaagctcaagaaactgggatggaaggtcaggccgctgaaggaaacaattgcggaaaccgttgagttctgccagcatgctgggtttctcgaggacgtggagggattccgttttcctcccctgtacaacataatctagtttacaataacgtcagtagt

SEQ ID NO: 143986 - DNA, 205 bp, Zea Mays
ccggctcaagtccgaaaaggtctgtattgtttgaatttcgggccggccacggcctggcccataattgttaaacaagccggccttattttgggtggcccaaaattataaaagcccgaaattcacattagggcccgaaatttaatttttggtccgaaattcacatcagagccctaaattcaaaaaaaaataataaaacaaataaaag

SEQ ID NO: 143987 - DNA, 1279 bp, Zea Mays
ccaatactacgtagctgcctgtgcctctttctggctccctgctgtctgcctggccggtgctcctgctcacagacacgcgcaagatggccggacgcacggaggaggctcgcaggagcggggagagggagacggtgtgcgtgacgggcgccggcgggtacatcgcctcatggctcgtcaagctcctcctctcccgcggctacgccgtgcacgccaccgtccgtgacccgcgtgatcccaagaacgcccacctggggcagctggaatgggccgcggagaatctccggctgttcaaggccgacgtgctcgacagcgacgcgctggctgccgcagtctccgggtgccggggggtcttccatgttgcctgtccggtgcccacggatagggttcttgatccggagtcagaagtactggctcctgctgtgcaaggtaccttaaacattcttcaggcttgctcagctaataatattcagaaggttgttgtggtttcgtctaccgccgctgttcatttcgacccaaattggcctccacatagacctaaagacgaggattgctggtcggacataaacttttgcaaaaagaacgaggactggtatatggttgccaaggttattgctgaaaagacagccctagaatacggagagagaaatggattaaatgttgttacagtttgccctactatggctttaggaccgctcttgcggcctatgctcaatgtcagccatgaattcctcatgtacattattaaaggaggtcctactatgatgaagaacattccatggcacatagttgatgtccgagatgtggttgatgctttgcttatggtatacaagaaagaggaatcgacagggagatacatctgtgcaccaaattgcatcagtgcaaaagatctggtgaacatgctgaagagggattatcctaattacaattatgtaaactgcgacaatgatatggtgcttaactctatagttacaccacttatgtcggagaaactgaagaatttgggctggaaaccaatgaagacactagaggaaacattattggatagtgttgaatgctataagaagatggggcttctaaaagatgctgagggatgcccttgtcgtcttcctcacctttttcatatggctatagaaaaatgaagaatactcaccattgcttcttgtgttacctaattactctttgaacattgttgggtatgtgttctaatcacacaccaataatgttgacattcaatgggttgtggttgatttgaaataaatgtttggtttcttatgtaatc

SEQ ID NO: 143988 - DNA, 1068 bp, Zea Mays
atggcgtcgccgccgccaccacgcgtatgcgtaaccggtggcggcgggtacgtcgcctcatggctcgtcaagctcctgctctcccgcggctacgccgtgcacgccactgtccgcgacccaagtgatcccaagaacgcccacctgcaacagctggacggggcccgggagaggttgcgcctgttcaaggccgacgtgctcgaccgcgacgccctggcgaccgcggtcgtcgcgtgcgagggcgtcttccacgtcgcctcccctgtgcccgcggacaaatccgaggtgctgtctcctgctgtcaagggcactctgaacgtcctccaggcctgctcggcaaacaacgttcagaaagttgtcgtggtttcgtccacggctgccgtttactttaacccgagctggccccaaggtagaaccaaagacgagagttgctggtcagacagagatttatgcattaagaacgagaactggtactgtgctgccaagacgattgctgaagaaactgcagtggagtatggagagaagaacgggctgattgttgtcacggtctgcccttgtatcgttttaggcccactcctgcagccgctgatcaatgccagcagcgaactcctcgtctacattataaaaggtggcttttatatattcctgctagtttcaaatatccactggttggataattactcgcatggaggtcctagggtgctgaaaaacctcccctggaacatagtcgacgtccgtgacgtagctgatgctttgctcctagtatacgagaaagtggaatcatccgggagatacatctgtgcgcctaatcggatcagcacaaacaacatggtgaacttgtttaagaagtcctaccctaactacaattatgtgaactgcgacaacaaggactatgaatctgaaatctcaccagttacatcggagaaacttaagagtctaggctggaacccaaggacaatggagaaaactttgttggacaacattgagtatttcgagaaggcagggtttttgcgtgatggagagggttatccttgtcgtctacctcatatttttcatttcgcttctgactaa

SEQ ID NO: 143989 - DNA, 798 bp, Zea Mays
agatgaacccacggggcccaacttttcctgctgcatgaacgtgagatcgtctggccctgcggtcctgccgtcctggtggactcctaccagccatgccgtcttccttggccggcgcggcggcgcctatcggcggccgcgttgcggggctgtcctgatggagacgtcaatccccacccgagagttcatggatcgccgataatgaatgcctcatggctgcagaggctggtgacgtcgactctgcgaggttatccaaacaatgcccatttgaaggagctggagaaggccccagagaatctgtatctgttcaaggctgacgagccagaccacgacacgctaacagctgcagttgagggatgcgaggggatcttccatctcgccactccggcggtgcctgaagataagattgttgatcctgaggaggacctgatggctgatgtgatgaacaagaacgacagactggtacgtcatagacgtccgtgatgcggccgaatgctctacttctactgtacgagaagaaagtgtcatctgcgagatagatacatctgctcaccgaatcacgtttgcacagaggacttggcctggtaacctggttgaagaagatgtacacaaagtacagctacataaataagtaggctcgccattgcaaaaactttgaaaccctttaggccctgttcgttttttacagattggaggtccgacacggtttctgactggattgtttctctaatttatgtaagttttgataagctgaaatgaatcttggtccaatactaaacaaacgaacggacacttactttt

SEQ ID NO: 143990 - DNA, 592 bp, Zea Mays
agatgaacccacggggcccaacttttcctgctgcatgaacgtgagatcgtctggccctgcggtcctgccgtcctggtggactcctaccagccatgccgtcttccttggccggcgcggcggcgcctatcggcggccgcgttgcggggctgtcctgatggagacgtcaatccccacccgagagttcatggatcgccgataatgaatgcctcatggctgcagaggctggtgacgtcgactctgcgaggttatccaaacaatgcccatttgaaggagctggagaaggccccagagaatctgtatctgttcaaggctgacgagccagaccacgacacgctaacagctgcagttgagggatgcgaggggatcttccatctcgccactccggcggtgcctgaagataagattgttgatcctgaggcaagtccttgcttgcttgacaccaatgcttatcatcagattatgtagtactgtatctgcacagattgatggagtacacaaactaagcttgtattggtagagaatcatggtactatgaattggcatttggatcagcgtgttttgttctagtaagataataccacttctcaattaa

SEQ ID NO: 143991 - DNA, 410 bp, Zea Mays
tctagcagggtgtttttgacgatagagatgcctgacgccaagggtgtgaagcataacttaaagcctaaaggccatttcaacttgtcagctaagggctcagaggactcgccctacgagtttgatcttgagttgtttgatgttgtctatttaatacatgttgaatgtagcactttaggttttgattgtattggccttcctatttgcaggagagcaaagcagatgttgtcccaaaaccatatgctaccagatcaagaaagctgagaacggttggtggccaaggctcctgaaaaaggatatgtgttcttgaaggttgactggacaaatggcaggatgaggatggtgaagatgttggatgttagtatttcacttttggttgattatgttttttgcgcctgacaaatctagatatg

SEQ ID NO: 143992 - DNA, 1421 bp, Zea Mays
cattgttttgcacaccaacttatcacctacaaaagcgacgcgtcctggatcgattgcaaatctacccccaaccaacccagctttgtatctgctaactgtgatcaccaaagttgtgctgatacgatgtgcaattctcgctctttcttctctagaatgttcctgccgatgctttataagagaaggttggtcagcatatcgatctctgccagtgtctagctgagaacatggtgacctcaagcaagggcaaggtatgtgtaaccggggcctcaggctttgttgcctcttggcttatcaaacggctcctcgagtctggatatcatgtggtagggactgtcagggacccaggaaatcaccaaaaaacagcccacctttggaaattacctggcgctaaagagaggctgcaaatcgtgcgagctgatctgttggaagaagggagcttcgacagcgccgtgatggcctgtgagggtgtattccacactgcatcccccgtcctcgctaaaccagactctactagcaaggaggaaacgctcgttcctgcggtgaacggtactctgaacgtgctgagatcgtgcaagaagaaccccttcctgaaaagggtcgtccttacgtcttcgtcgtctgcggtgaggatcagggacgacggccagtccagcagtaacatctcgctggacgaaacggcatggagctccgtgccactctgcgagaagatgcatctatggtatgccctagccaaggtatttgcagagaaagcggcgtgggagttcgccaaggagaacggcatcgaccttgtgactgtcctcccgtcgttcgtgatcgggcccagtttgtcccacgagctatgcgttaccgcttcagacgtcctaggcctattccaaggcgacacggcaaggttcagctcgtacggaagaatgggatacgtccacatcgacgacgttgcgagcagccacatcctggtgtacgaggccccccaggccgccgggaggtacctgtgcagctcagtggtgctggacaacgacgagctggtctcctcgctcgcgaaacgctacccgatattccccataccccggaggctgaacagcccctacggcaagcagtcgtaccagctgaacacgtcgaagctgcaggggctgggcttcaagttcagaggggtgcaggagatgttcgacgactgcgtacagtcgctcaaagaccagggacacctgctggagtgccccctgtgaactgcgatggggtgcctccgcctgtgaacgcgccggttgggttgcgtcccgaacccgctgttaattcgtttttttttcttcaataattccacgtcatgtcacggtgtcctcgcgcagactgctactgtcagggcgtcatagctcacgggctctccggctacatgaataaaaatgtcacgctcgtcatttgctttgcctttt

SEQ ID NO: 143993 - DNA, 1319 bp, Zea Mays
atcctcttcaccagtgtgctgcttgcttatctcgttctgtcgttcactcgacgcgttctccgctactcctcgtcctcctgccgaggaaaattttgcagcgggagctactactagctagagctagcatgggaggtacaagcgccgcagtcccgagccacggcctcgcctgcgcgcccccggcagccgtcactctgaatccgcgggcgcggcggcggcgcgcttcctcgggcagcggcggccacaggagcagcccccagcagccactgaggagcgacctgctacccccggctaccgtcgcctgccgagctcgctctcagtctgcttcctcgtctaatgtgaactttgggagaggggatgacgcggacaagttgctcgaggatttgctcaaacagcatggcgaggtggtgtacagctccggtggacctccggatcccaccgttgaggccgacgacgatgccgagtgcttgtcctttgccgtctcgttggctaaagctgcaagtgagataaaggctactgatatccgtgtactttgtgtgaggcggcttgtctactggactaggttcttcatcatcctcactgccttctcaaatgctcagatagatgctatcagttccaaaatgagggatattggtgagaagcagtttagcaaagttgcatctggtgatacaaaaccgaattcttggacattactggattttggtgatgttgtggtccatatattccttccgcagcagcgagcattctacaacctggaagagttctacggcaacgctacacccatcgaactcccttttgacacccaacggcagtgatcgttgatcgttacatccgagccagcgctaggaagcatcccagtgaaaagtgagattttttcgtgaagccagccagaagacattgttaccggcatctcactagtcatcagatgtggtgagctgcccagagaaaagaaacctgcggtgcgaggtcgcaactgacaaaacgcttcctacaaccgaagcggcgcgctgctcgcagcctccgatgcagtgctgaaacggcaacttgatgcgaaaattctaggtttctgttgtgtcatgtcatgctctgcataccctgtgtgaactatcgaataatgttggcaaccgcaccgcaccgcacttggcttcccatgaccgggaggatcagtgtgtcgatccagaaattgttcactggctcctggctcgctaatattaacaccatctgactgatctgacagcttgtaaaatttcactgctggtttacgcaaggctgcactgaacaagcttgctagaagaggcaagttaaagcactaattagtctac

SEQ ID NO: 143994 - DNA, 2454 bp, Zea Mays
cgccaccagcaccaaccatccggcgagagcgagatggagaccccgccgcggggccggtggccgccaggcttccgcttcagccccaccgacgaggagcttgttctctacttcctgaagcgccggatcgcctccggccgcccctctccctacgtcgccgacgtcgaagtgtacaagtcacacccctcccacctccccgagaggtcggcgctgcagacgggggacaggcagtggttcttcttcagccggatggaccgcaagtaccccaacggctcgcgcgccagccgcaccactggcgacggctactggaaggccacggggaaggaccgcttcatctgcggcggcggccgggcggttggcaacaagaagacgctggtgtaccaccatggccgcgccccgcgcggggagcgtacggactgggtcatgcacgagtataccctacttgccgatgcgctcccgcctgctgcgcagggtcgggagttctacgcgctttataagctgttccagaagagcggggccgggccaaagaacggcgaacagtacggtgctccctttcgagaggaggattggttggatgacgacgatgagagagtgattgcgggtgcagccgctaatcctgttcctaacaccaacagcccaccatctacaatggaggagcatgcaattactgaccgtgagcttccgattgagggtcttgatcaaccactgtcagattttggaaatgatccggagttgttttctgaagcacagcctgtttcttcccatggtcaaggtcagggttggctcagtgaggggggtgacaaagctgaggtcgtggatgcttccattagcaatgatgttgtggtagtagcagagaacacctgcactgatatctctcttggggatattgagcagtttctcatgcaaatatctgatgatcagcaaaacgatgaattgttctcagatttatcaacaccacttccaaaattgcagttccagtgcgatgatcgtcaggtttggcttgatgccgaaatgggacatgaagtttatgctgcggatcctactgccagcagtggtgctgttgtaactgcagaatgcactgtcacagaacttccacttggagatcttgaagggcttctgctgcaaatagccaatgaccagcacatggtcgaatcccaatcagatctttctgcaccaactccacatcataacttcaatcaggctgacattggggatttacatgaatctcatggtgctcgggttggtaatctttcttgtatagttcaggaaagcacattttgtgaaccacggactgaaccaagtgatcaatttccacagtctaatgtaaccaatttgccatttagcggagaagcaaattcttctgaagggaccagtgtggcacattctgtgtcaggtttgatcagttaccacagtcaagatgctgatgaagagttccttgaaatcaacgatttctttgatctggaggatgtaggtcagaatgcaaattgtatgacaactgagtacatgatgtctgcaacaaatgggatgtttgacaatttggaatactctgatgcttcttcgtttctacctgggtcatttgacacagttggattggtagctgaaaatcaatattttgataccgattacagtggaattcaaaaccagggatatcaaaatacaaccgaagtaaggacatataatcaggctgctcttactgtgcggagccatatgaagcatgatcatgtagtcttatcctcgcatgcatcaggcactctgaatatccatgcggcaaatgagctacataaccagagctccacatcttcacaatcatggttcaatgcggctctatcagccttgttggactctgtacctagtagtccagcattagctgctgaaatcgaaaacactgttatcaacagaacactccagcgcatctctagcttccgaccacatcaaactgcaggtgaagaaaacacttttatcaacagaacacttcagcacatctctagcttcaggtcacagcaagcaacaggggaagaaccaggcacccctagtattcaggttaccagaggtggcaggctgatgttcatatctctactggttatacttgcttctgttatatggacctttacttcaggctccgccctcaacttttgcaagggtttatggaaatcctcttctacgtgacagattaagtgggaacctggtgaccttgtcctctgtaaattttttggtcctcggtaccatttatggtttgaatatcatttccctttcaaaagggtgaagaggtagaaacattttgagggtggtaatatgattataggttgtagagcctatttaaaacggtaaaatgcaagggggaaaagcatatctgatggtaatatttgaaactaatgggttactgttctcatttgtattttgacagatatatgtactgaatgcaattaacctattaatatagcttcagtttctgtgcat

SEQ ID NO: 143995 - DNA, 2145 bp, Zea Mays
atgctcggtggccgcgatcctctggccccgttcctcgtcgcttccttgaagcgtgcggcgcgcctccgctgcggcgagcagctgcacgcgctcgctgccaagtctggccttctcgcctccaacgtcttcgttcgcaactctgtcctctcctcgtactcccgcctcccgtcctcacttgccagcgccctccagctgttcgacgaaacacccccgccactccgcgacgccaccgcgcgcaacagcgtcctcgccgcgctgactcgtgccggctatctcgaccgcgcgcagggcctactcgaggagatgccacgtatccacagggacgccgtctcgtacaccaccctcgtgacctcgttcgctcgcgcgggacatgcggcgcgcgcggtggccgtgttccgcagcatgctctccgagaatgttgttcccaacgaggcgactctggctggtgcgatcacggcgttcgctcgctgtggggcaccggcaacagtggggatgatccatggttttgctctgcagcgggcgttggatggcttcgtcattgtagccaccaacctggttcatgcatatgcaggggtgttagagctttgttctgcccgtgccttgtttgatgggatgacgtataggaacacagtcacttggaatgtaatgctcaatggatatgtgaaggcaaagatgatagacatggctgcggaagtgttctggaggatcccagagcgagatgaggtatcttggttgacattgattgatggatatatctgtgcagatctgatatcagacgcaatgaaggcatatgttcaaatggtgggtgaagttggtgcaaacgactacgaggtattgcttgttgatttgatgaaggcgtgtgctcggtactctgctgttacagaaggccaacagctgcatacagttattctgaagaatggttttgatgcccatgcatttgtgcaagcgaccctggtccatttttatgggtgttgtggtcttattggccttgcacagatgacattcagattgtcagacaagtcccacacagcatcatggaacgctctcttggctgctctactgaggaatggcctaattcgtgaagcaagggagctgtttgatgatatgcctgaaagggacactgtttcttggagtacaatgatttctgggtatgtgcagacaggacgttcagacatggctttgaagctattctattcaatgttgaatacgagcattgaaccaaatgaggtcacgttggccagtgctctatctgcaattgctgattctggcacattggaccaaggtaaatggatccatgactatataatgaacagaccagtccagcttactgataacctgagttctgggttgatagatatgtatgccaagtgtggcagtattgctgatgcagtgcagtttttcaatcgcgtcaacgataagttctcttccgtttcaccatggaacgctatgatttgtagtttagccatacatggttatgcacatatgtcgcttgacctgttttcacaattacagaggactagtattaagcccaattcaatcacattcataggtgttttaagtgcatgttgtcatgctggcacggtaaccaagggaaaatattattttgagtccatgacgagggaatatgggatccagccaacgatcaagcactacggttgcatggttgatctcctcggtcgagctggatacttggaagaggctgaacagcttgtttcaatgatgcctatgaaaccagatgttgtaatttggggcagcatcctttcagcatcaagggcacaaggaaatgtcgcattaggtgaaagagccgctgaagaattggcaaagcttgatcaaacccatggtgcatccaaaatagccttgtctaacatctatgctgatgctggtcactggatcaatgtttcagttgtgaggaaggaactccaggatgcaaatcttgagaggctaactggaagaagtggcattgtgttcctattttcgaacacgaagtgcaaacactacttccagaaccgcctcaagccatccaatctcacatggacagccatgtacatgaaggctgaagcagcacaagaagcatgctgcatgtatcgtgaaaatggaccgtctcctttttctgcaacttttgactctgatgactggaatgtctga

SEQ ID NO: 143996 - DNA, 2286 bp, Zea Mays
ctggccggtcgcgctgcgctccatctttggtgcgcttgtcccgaggcgccgccgcataaactagcagccccacttccgcggcggcggcgcactcacggtccctcgtcgcacggaagcctcaaaggagagagccaggattcgcccatgctcggtggccgcgatcctctggccccgttcctcgtcgcttccttgaagcgtgcggcgcgcctccgctgcggcgagcagctgcacgcgctcgctgccaagtctggccttctcgcctccaacgtcttcgttcgcaactctgtcctctcctcgtactcccgcctcccgtcctcacttgccagcgccctccagctgttcgacgaaacacccccgccactccgcgacgccaccgcgcgcaacagcgtcctcgccgcgctgactcgtgccggctatctcgaccgcgcgcagggcctactcgaggagatgccacgtatccacagggacgccgtctcgtacaccaccctcgtgacctcgttcgctcgcgcgggacatgcggcgcgcgcggtggccgtgttccgcagcatgctctccgagaatgttgttcccaacgaggcgactctggctggtgcgatcacggcgttcgctcgctgtggggcaccggcaacagtggggatgatccatggttttgctctgcagcgggcgttggatggcttcgtcattgtagccaccaacctggttcatgcatatgcaggggtgttagagctttgttctgcccgtgccttgtttgatgggatgacgtataggaacacagtcacttggaatgtaatgctcaatggatatgtgaaggcaaagatgatagacatggctgcggaagtgttctggaggatcccagagcgagatgaggtatcttggttgacattgattgatggatatatctgtgcagatctgatatcagacgcaatgaaggcatatgttcaaatggtgggtgaagttggtgcaaacgactacgaggtattgcttgttgatttgatgaaggcgtgtgctcggtactctgctgttacagaaggccaacagctgcatacagttattctgaagaatggttttgatgcccatgcatttgtgcaagcgaccctggtccatttttatgggtgttgtggtcttattggccttgcacagatgacattcagattgtcagacaagtcccacacagcatcatggaacgctctcttggctgctctactgaggaatggcctaattcgtgaagcaagggagctgtttgatgatatgcctgaaagggacactgtttcttggagtacaatgatttctgggtatgtgcagacaggacgttcagacatggctttgaagctattctattcaatgttgaatacgagcattgaaccaaatgaggtcacgttggccagtgctctatctgcaattgctgattctggcacattggaccaaggtaaatggatccatgactatataatgaacagaccagtccagcttactgataacctgagttctgggttgatagatatgtatgccaagtgtggcagtattgctgatgcagtgcagtttttcaatcgcgtcaacgataagttctcttccgtttcaccatggaacgctatgatttgtagtttagccatacatggttatgcacatatgtcgcttgacctgttttcacaattacagaggactagtattaagcccaattcaatcacattcataggtgttttaagtgcatgttgtcatgctggcacggtaaccaagggaaaatattattttgagtccatgacgagggaatatgggatccagccaacgatcaagcactacggttgcatggttgatctcctcggtcgagctggatacttggaagaggctgaacagcttgtttcaatgatgcctatgaaaccagatgttgtaatttggggcagcatcctttcagcatcaagggcacaaggaaatgtcgcattaggtgaaagagccgctgaagaattggcaaagcttgatcaaacccatggtgcatccaaaatagccttgtctaacatctatgctgatgctggtcactggatcaatgtttcagttgtgaggaaggaactccaggatgcaaatcttgagaggctaactggaagaagtggcattgtacagtaataggatagatcttttctcagttagctataatgggcaagtgatgatgagaagcccttcctttctttctgtattctattttctgaagatgccgtgaccattgttttctcttcaaacaaaagcaggcgcgaacatgatgtgatggcggaaatataatttcttttgtggtcctca

SEQ ID NO: 143997 - DNA, 1871 bp, Zea Mays
atacggtggaggagaggggaggcggggaaaaagcatgcgaattattcgaggcggctttatggtcggacggatcacccccagcaaggagccgccacccgccactccgccagagcattgcagcgccagccacctcgccccctctcgctgtcccgcaccacccgctccgagggaaggagaggtaaccggtggcgggcgcggcggcgagcggagatcccgggaactccgatcgagcgcaagcggcgggacctgcgggagcagagagcgcgcagggaggagaagtgagtagcgtggttcgatggtaagggagacgggatactacgacgtgctggaagtgagcccgacggcctccgaggccgagatcaagaaggcatactacgtcaaggcgaggcaggtccatccggacaagaacccagatgatccgcttgcggcggcgaggttccaggaattgggggaggcataccaagtgctcagtaatcccaagcagcgtgaagactatgacttacatgggaaacctggtatttcaacggaagcgataattgatcctgcagcaatttttgcgatgctgttcggtagcgagctttttgaggactacattggtcagctggcgatggcatccatggcttcacttgatggttttactgaaaacgaacagatcgatccaagaaggttgcaagagcaaatgcgagttgtacaaaaagaaagagaggagaaacttgcagaggcactaaaagataggttgcatctttatgttcaaggaaacaaagaggaatttatccagtatgctgatgctgaggttactagactctctaatgccgcatacggtgttgatatgttgagtactattggttatgtgtattcgagacaagcttctaaggagcttggaaagcaagctaaatatcttggtgttccatttattgctgaatggttcagaaacaaagggcattctattaaatcccaaataactgctgcaacaggtgcattagctcttatgcagctgcaggaagactggagaaagcatctcagtgatgagtgccactacaatgaagaggaactggaggcttacatgctgacacataagagtgttatggtggactcgttatggaagcttaatgttgctgatatagaggaaaccctgtcacatgtgtgtcaaatggtgcttcatgacagcagtgccaggaaagaggaactgcgagttcgagctaaaggattgaaaactttaggcaaaatattccatcaagccaagcttagcactgctgagggagatccagcagcaatgaataatacaataaataacttggatgagaatgatgatagttcaccggagtcatctccaagatctcccagggaccaaatgttcgatacaaacccaccttattcccagagtccatacgtggaggcccctgagttgggcgggtatttttccttcgacttcccaatgcctatcgctccgcctggcgcgcagagggaccctattccgtgaccgccgtgagtgcggcggctctgttttgtgtggatcgtcattttgtacaatattgcctgtgtaaatcatttttatctgtaacattagtagcagtagtgtgagacagcagcttggcacccattgcatcttttcttttctttttcttcgtgtaatcaatcaatcaagcatgcgacgacggcagccttgtgttgttcgtagggcttggtctgcttctggccacgggtcagccattggtgtacatgaactaccacctctttgtttcttgtgtttatcagtttatgggtgcataattgttttagcctatgggcccatctgggcaaacaacacttgcttgtgctaagctttgctcgaacttcgtctcgtgaaatttgatcatctcctgttcctgcaa

SEQ ID NO: 143998 - DNA, 1676 bp, Zea Mays
attcggaccagaacccgatcggggccattggggacggggcggagaacgcgagtaagcactaccctcctcaactcctaccctccgccgtaaaccccgctgttctttgccggagcacccactccccgtccccagccccagtctcggtccccccggacttcgatatcttcggagaccgcctgcatgctcaaatcgtagacactctgggtaggcgcagggtggagatccgtccgggctcggatcaatttcttcgttcgctggtactcaggctctaatatttttacaaaatcgatggaaagttctaaatctcctcagtcatcaaaaaacagtcggattgtggtgccttctgatagcaatcgctcccgatttgacaatgacggtttttcttcagaaactgcatcaaatcaaatggttgtgttcaactctgaagcagcagatgaactgggagaaaaccgtttgcagaagtcagtgataacaaaggggatatcaccatctattggagcattcactgtccaatgtgctaaatgttttaaatggaggcttattccaacaaaagagaaatacgaagaaattcgtgaacgtattatacaggaaccttttgtatgcaaaagagctcgtgaatggagacctgatataacatgcaatgacccagaagatatatctcaggacggtagcaggctttgggctattgacaaacccaatattgcacaaccccctcatggatgggaaaggcagattaggataagaggtgaagggggtaccaaatttgctgatgtatactatacctctcctactggaaggaaacttaggtctctggttgaagtcgataggttcctccaagagaatccagagcatgttgcacagggtgtaactttagctcagttttcgttccagatacctagacctttgcggcaggactatgtcaaaaagaaaccaaagttgataaatgcaagtgatgaagcaagtacaattacctctaagtcttctgaaccagaagaagtgaaccctatagcctgggcagttcctacaaaacatgagggtgatgccagtgaagaagcttctttcgccgatgagacacttgcatcagaagtagtgctaacccggaagaggaaaataggaagctctttgtcagtagagccaaaccatctctctgatgaacttgaaccaaagttggaggatgcttagaacggggagacttctaactgaaaagtaaaagtgggcagcgtcgtgatgccaacttacccccctgccatggttttattggtcctctgcttgtttctcgttttccttgggagtcagcttctctgttttatgtggtcgcacacggccttatttgtagtattacaccacagaagctggctgacccaaaaaccgacattttgggggcagctacttaacgaaatgtttgcacgagagtttagagccctatggaacttgtttggataaatatgtttattacgttgtagtacttagctaggaacctgcttatgtaagatgatctttctttatgtaagattaagaactgtcagcggcctagttctgctgcacctcggatctaatctcatgttctttgttagacggaccagcagccaaggttctgaaatgtcgtaaagtttatatgctagtactgcgctattgctattgtaattctctgtgcacgtttttgatttgatattgtg

SEQ ID NO: 143999 - DNA, 668 bp, Zea Mays
tacactgctagactcactatacttttcttattaaacattttgtttcagtgaaccctatagcctgggcagttcctacaaaacatgagggtgatgccagtgaagaagcttctttcgccgatgagacacttgcatcagaagtagtgctaacccggaagaggaaaataggaagctctttgtcagtagagccaaaccatctctctgatgaacttgaaccaaagttggaggatgcttagaacggggagacttctaactgaaaagtaaaagtgggcagcgtcgtgatgccaacttacccccctgccatggttttattggtcctctgcttgtttctcgttttccttgggagtcagcttctctgttttatgtggtcgcacacggccttatttgtagtattacaccacagaagctggctgacccaaaaaccgacattttgggggcagctacttaacgaaatgtttgcacgagagtttagagccctatggaacttgtttggataaatatgtttattacgttgtagtacttagctaggaacctgcttatgtaagatgatctttctttatgtaagattaagaactgtcagcggcctagttctgctgcacctcggatctaatctcatgttctttgttagacggaccagcagccaaggttctgaaatgtcgtaaagtttatat

SEQ ID NO: 144000 - DNA, 1509 bp, Zea Mays
aagtttactggtcagcccaaggagttgaagcgagcctcagtttgcagggtgcccgcacgaggcacgaggcacgaggcaggcctccattcggaccagaacccgatcggggccattggggacggggcggagaacgcgagtcaggtactcaggtactcaggctctaatatttttacaaaatcgatggaaagttctaaatctcctcagtcatcaaaaaacagtcggattgtggtgccttctgatagcaatcgctcccgatttgacaatgacggtttttcttcagaaactgcatcaaatcaaatggttgtgttcaactctgaagcagcagatgaactgggagaaaaccgtttgcagaagtcagtgataacaaaggggatatcaccatctattggagcattcactgtccaatgtgctaaatgttttaaatggaggcttattccaacaaaagagaaatacgaagaaattcgtgaacgtattatacaggaaccttttgtatgcaaaagagctcgtgaatggagacctgatataacatgcaatgacccagaagatatatctcaggacggtagcaggctttgggctattgacaaacccaatattgcacaaccccctcatggatgggaaaggcagattaggataagaggtgaagggggtaccaaatttgctgatgtatactatacctctcctactggaaggaaacttaggtctctggttgaagtcgataggttcctccaagagaatccagagcatgttgcacagggtgtaactttagctcagttttcgttccagatacctagacctttgcggcaggactatgtcaaaaagaaaccaaagttgataaatgcaagtgatgaagcaagtacaattacctctaagtcttctgaaccagaagaagtgaaccctatagcctgggcagttcctacaaaacatgagggtgatgccagtgaagaagcttctttcgccgatgagacacttgcatcagaagtagtgctaacccggaagaggaaaataggaagctctttgtcagtagagccaaaccatctctctgatgaacttgaaccaaagttggaggatgcttagaacggggagacttctaactgaaaagtaaaagtgggcagcgtcgtgatgccaacttacccccctgccatggttttattggtcctctgcttgtttctcgttttccttgggagtcagcttctctgttttatgtggtcgcacacggccttatttgtagtattacaccacagaagctggctgacccaaaaaccgacattttgggggcagctacttaacgaaatgtttgcacgagagtttagagccctatggaacttgtttggataaatatgtttattacgttgtagtacttagctaggaacctgcttatgtaagatgatctttctttatgtaagattaagaactgtcagcggcctagttctgctgcacctcggatctaatctcatgttctttgttagacggaccagcagccaaggttctgaaatgtcgtaaagtttatat

SEQ ID NO: 144001 - DNA, 1496 bp, Zea Mays
aagtttactggtcagcccaaggagttgaagcgagcctcagtttgcagggtgcccgcacgaggcacgaggcacgaggcaggcctccattcggaccagaacccgatcggggccattggggacggggcggagaacgcgagtactcaggctctaatatttttacaaaatcgatggaaagttctaaatctcctcagtcatcaaaaaacagtcggattgtggtgccttctgatagcaatcgctcccgatttgacaatgacggtttttcttcagaaactgcatcaaatcaaatggttgtgttcaactctgaagcagcagatgaactgggagaaaaccgtttgcagaagtcagtgataacaaaggggatatcaccatctattggagcattcactgtccaatgtgctaaatgttttaaatggaggcttattccaacaaaagagaaatacgaagaaattcgtgaacgtattatacaggaaccttttgtatgcaaaagagctcgtgaatggagacctgatataacatgcaatgacccagaagatatatctcaggacggtagcaggctttgggctattgacaaacccaatattgcacaaccccctcatggatgggaaaggcagattaggataagaggtgaagggggtaccaaatttgctgatgtatactatacctctcctactggaaggaaacttaggtctctggttgaagtcgataggttcctccaagagaatccagagcatgttgcacagggtgtaactttagctcagttttcgttccagatacctagacctttgcggcaggactatgtcaaaaagaaaccaaagttgataaatgcaagtgatgaagcaagtacaattacctctaagtcttctgaaccagaagaagtgaaccctatagcctgggcagttcctacaaaacatgagggtgatgccagtgaagaagcttctttcgccgatgagacacttgcatcagaagtagtgctaacccggaagaggaaaataggaagctctttgtcagtagagccaaaccatctctctgatgaacttgaaccaaagttggaggatgcttagaacggggagacttctaactgaaaagtaaaagtgggcagcgtcgtgatgccaacttacccccctgccatggttttattggtcctctgcttgtttctcgttttccttgggagtcagcttctctgttttatgtggtcgcacacggccttatttgtagtattacaccacagaagctggctgacccaaaaaccgacattttgggggcagctacttaacgaaatgtttgcacgagagtttagagccctatggaacttgtttggataaatatgtttattacgttgtagtacttagctaggaacctgcttatgtaagatgatctttctttatgtaagattaagaactgtcagcggcctagttctgctgcacctcggatctaatctcatgttctttgttagacggaccagcagccaaggttctgaaatgtcgtaaagtttatat

SEQ ID NO: 144002 - DNA, 1438 bp, Zea Mays
ccaactctcgcattccctccttttttttaattccccgcgccacgttccaattccaactctgcaccgagccctgcccacattgcaattcgactgttccacggctcgcttcgattacgcgatacgcggtcatttacgagcggggagtagcgcagcgcagcggccggcgcgcgtcagaagtgcccatggacgccgcggcggtgctgaagcggaagggcgaggaggcgcccgaggcgtggctgcttggcggggtcgtggtccccgccaccaagatccgccgactcgatgcggaggtgccgccgcctgtcgggtccggcgcgggcgtgctgtcagagccgcaacgtgctttagggttggaggaggcgcggatgagcggccacgtgggggcgccggccatggacgcaacgccgttgttgaagaggaagggggaggaggcgccgcagccgtggctcgatgtcgacggggtccctatacccgccacgaagatccgccgactcgacgccgatgtgccacccgtcggatccgggatgggcgtgccgcttgctgagcccggcgtgagcgtggcgccgcagcctttcgtggcgggggacttgcggatgagcggtgatgttgcgccgccggccgcggcgattgccgtagctgctccggcggtgaacgaggagcgggcgatcgtggtgtaccagcctgccgaggccgaacgcaacctcctggacggtccactccgcccgggggcttctctccgcgtcagccccgactggatacatgggctcaagaacaccatgctgcaagaggcgagcaaccacagagctctgttcgaggagatggcggccagggacgggaacctcaacctggccatggtcccgtgggcgcctcccgaggtcgatgtccatgccgcctccagctccacagcggcggcaatggaaatggtggacgctgatcaggacggcgacggcgcatccatggaggtcgagcacgacgttgagggccagaccacgccaccagctggcggtgcgctgcaggtggaggcgttcaaccaccattaccagcagcagcaccagtggccagcgcagcactgcgttgcgtcgccgcagctacagctcccggccgcgagctaccaggcaagccctgtcacgtggtcgtggtgatggcgcgaactagagcagaggactgcagggggagacatagacacatagttgtcgtagactagtagtagtgattagtattaatctcctccctgctcagtttgctatttgcttttctggatgttggggttggggttgctgttgtgaaaaaacgcgagcttctgagccggaggaggtgattttttggggagatgttcgatgccatccgtttttgcgcgagtcactacagatcgcctgctgtaattcagtgttcacagagttatgagatggaagataaaatgaatgcgtaattgttaatc

SEQ ID NO: 144003 - DNA, 5563 bp, Zea Mays
atggcagacgttggacggctggagcacttggagcagagacgtcggcaaaaaccagagaggacagaggagagaattagggtttactggcggctgggagggtttctggcgggtttgtggttagccattcatgtcatgacacaaattgaacatcgtgggcttcaaaagcagtggacttgggaaccaatgatgggagaaagtttgatcttggcgctagtcgataataatgatgatgtgcggcaagttggaagagctctcttggaacatgtatctcaagcacggggtttgacttctgggcttcaatttctgtgctcgagtgcatcttcactcactgctgtttttctgggtctaagatatgtagttcaactggtgggaacaagatcagttttggcagattttagtagttttcatcacttgttttttgtcatatgcaaactacttaaggaggttgtcgttcaaagaccccaaattgcacagccagcgaaacctccagaagggggtttcttgcgacaaccctattcaagtgtcctagctagtccaccagaacatgctgtggatgttagtaactgggagaagttctgcactttgctttctgcaactctctggcctttcatttccacatgcctaagagaaggaaaggagctaataggtctcaaacagtgtcagatatcttgcgtccgtttgcttgagttgcttcctctggtctatgagagggtcaactcaaattgccgcaccctatcttgcagtacgacgacagtgtttcagaatcctatggatatttcatggtttattcatttggttcactggggaaaatcatctctccttgtgattatcagacattggaaacaatgcatgctctctttattgaaagaactaaaatgttcacatagcggtaccattcaatgctacattgaagatcttgacaatatcatttcacatgatgcagtaaatatcaatgaacttgaagagagagtttcaaatcttgaacttgtactgtccaaggaggttgccacaaaaattgaaaggagagggttagctgacttaccaatgtttaaagaaccaattgttagtgttccctctccagttcatgagagacattctggcatggacagttttgtggatgttgaaagcacaaagtcctcccatccaccagatgttcatgaaataattctcctttcagacagtgaggataatttactggcacctgacgtgtccagtgaggaggttttgtcatcagttatggagaatgatgcatccactgcttccaatatgttgaaagatgctacacctctagaacaaagtacgctgaacgacaatagacactcacctttagaaccacagatatgtcatcctgttagtaatattagtgcctcttctaaacctgtatcaacagatagtagggacaacattgctgccacaaaaggattacttcgaatgaaaaaaccgagaccgccaatgaacacaaataataattccacttcacccaaaatggttaaatcatctgttactggcacttctcaacaactgcatcctaaattgttgtcagatacagaaaaatttaaatccatcttcagggatatatctgatgatgaagatgatcctttagaccatgcacttgataattaccggaggccacaggttctttcaagaaagccttgtatattagttcccaagagacaagttgttcagcttccagtgcctgttggaagaaaaccaggttctggcagtagggttacaagtactcgacgacttcaaccacctaaactgggtagctggtttagaaacatattggaaatggactacttcgctgttgttgggttatcttctcctgagatagtaagaaaacctgctttaaaagaagttccggtatgttttgattcaccagctcaatatgttgaaattttccagccattagttctagaagagttcaaggctcagttgcaaaatgcttatgttgagactccccctgatgacatgatgtgtggatgcgtatctattctcgcagttgaaagagttgatgatttccttattgtccgtgcccgtcctgagcatagccagtcgatcaaattcagaggttgcacagagaatgatttagtactactcaccaaagatccactgaagaaccaaggacaacaagtccatgtgcttgggaaggtggagcggcgtgagagtgataaaaataaggcattgatttttgtgatgaagttctttctttctagtgacaatgcacgcctaaataaagtgaaacggtttcttgtggaaagaacattagagtcatcatacaatgatagccagctccaagctctaagcattgccattggaccaacaagctctaaagcaaattttgatctgtcccttattcagggacctccaggtacaggtaaaacaagaacaatcgtagcaattgtaagtgcattgctatctttacatgcaggtgacccttacaagtcacagagaaatgagtacgtcggtagtactgattttacaaagccaagagcaaagattagccaatctgctgcagtaattagagcttggcaggatgcagcccttgctaaacaactggaaaaggattctcagaaagaatgtcctcgaacaacagagcggtttgtgaagggaagggctttagtttgtgcgcagtcaaatgctgcagttgatgagcttgtgtcaaggctcagtgagggattgtacagtgctgatggaaagctgtataagccttacatagtgagggttggtaatgcaaagacggtccattctaattcgttgcctttcttcattgacacacttgttgagcaaagattatcagatcagttgaacattaataatgatggcaaaaaatcatctgatgctgaatcctctagttcacttaggtctaaattggagaagattgtggacagaattagatattatgagtcaaggcaaaaactaattgagtctgataaaagtgaagatggttcttctgtacctggtgaaggtgaggcagatgaagtttccgatgaagcacttggtggaaagcttaactttttgtatgcacagaaaagggtagtttctgcagaactggccactgctcatgcccgtgaaaaagaaaatagctgatgaaaacaagtttctgaagcacaaggtacggaagtcgattcttggagaggcagaaataatcgtgactacacttagtgggtgtggaggtgacatttatggagtttgctcggaaactgcttcatctaataaatatggtactttttcggagcatgcactgtttgatgttgttattattgatgaagctgcacaggccctggagccagcgaccctaattccccttcagattctgaaatcgagaggaactaaatgtataatggttggtgatccaaagcaactacctgccactgtgatgtctggattggctagcaagtttctttatgagtgcagcatgtttgaacgactacaaagagctggttacccagtgattatgctcactaaacagtatcgcatgcatccagagattagcaggtttccatctttacatttctacgaaaataaactgcttgatggtgtggaggtggctgataaatcagcttcatttcattttcatgagtgtcttggtccatacatgttttttgatattgctgacggacgtgaacattgtggaagaaatgctgctacacagtcactctgtaatgattttgaagctgatgcagctcttgaaatactgtcatttctaaataacagatatccattggagttcacctctaggaaaataggaatcattactccatacagaagccaactctctatactccgttcaaagttcacttcctcttttgggcctgagattgttgccgagatggaaataaacactgttgatggatttcaaggtcgtgaagttgatatcttgctgttgtcaactgttagagcctcaaattcttcagatgatagccatcgcactggtgaagcacgcagcattgggtttgttgcagatgttagacgtatgaatgtcgcactaacacgtgccaggctttctctatggattgttggaaatgcaagaactttgcggattaattcacactggaattccttagtatgtgacgctgaagaacggaatctgtttgtctcaattaaacggccatatggtttgatgtttgaaaagggccaacctcattccagaaatactcataggtacactagtcatcttaagcagaaggataacaaaaaagctgctttgatgagctcaaagagagttggtgttaaattccaggagcaaccaacacatgctataaggaatgtagaaaaagaaagtctatcaaaagaacaatcaaaatggacatcattatgggaccaaaagattcctggaactcaagagtccgttatgagatctagtgaagacaagtcacagaagcatagtggtaatatgagagtcaccaagtgttcactgcaagaaaacatggatcaggattttgttatcagaaaacaaatggatgataaaaaattggctgtacataatgataaacatctggggctttctaaaggcttggttaaacgaggtgatgatggctctattgtcacaatgaagacagaattgaatatgactgtggagcagaatctttgtaaggaaactaataaagcttcaactgaccaagagttgtttcagaattcaaaggtgaggacatgtaataaaaagagtgccagcgaaaacagcaagaaaaatgatgtttctccaccggcagttcctggtcagcagaagttgatacaaaagtcaaaagcaccaaggacggtttctgagaagcctagatgtgataatttaaatcatgaaaattatgatccagcgaataagaatgatggtgcttatccaccaacagaccctgatatgaagaaagctaataaggctagaggagctaggaagttttctgagcaaccaagacctgggaatttaactcaagtggatcttgcacgtccatctcattttgatgaagcaagtagccatgtgccagaactcaagaaaagccgatccagcaagttaactagtcaaaaagatttggttgcagaaagaaaacgacaacgcgaggatattgacactctgctttcgtcatctcttatatcatctacgaaaccttcctcaagtcgtaatactaagaaacagaaatgagaagactccagcaaaggtggctaatgtcatgggtatggcagcttttgtgaagcaattttggtagcaatggtgcttggatcacgagtttccatcttccgaagcaagtagaggaaagctaactgcctgtaatctgggagctgtatgtgcagcaactgacaaacatccagtggacccaaggagccctccctccatacggttgcaaaagtgctggaattttttggacggctgttaatggtttattacgtcattttatttcccattttcatccgtttggatgcgagcaaaatgagaccatacagacaaatagagcaatcatactgcttgttgaggcgcaagccaattttgcagtgtacataactgtaagtagcacccttgtagcaagaaggcagattagcatttgaacatgcctggtggtgtccttaaaatgaaatg

SEQ ID NO: 144004 - DNA, 107 bp, Zea Mays
tttcatcaatcctgggaggtcttactgccgggatgatcctgttaagaactaagctccatacctccctagcaaacacacaggatactagaatgtggttaatggtttcc

SEQ ID NO: 144005 - DNA, 867 bp, Zea Mays
atggggaagactgacggtggcgcatgcggcaaagttgtaggggatgcggatggtggcacacgatttcacagagtcgcaggcggtgcagatggaggccgcgagcgtgggcgaagactaggcgaagtcgcaagagaggcaccgacgatggtggtgcgtgcaggggaggcgggcgaaggatggtggcaaaggtggcgcaggggatctgcacggcagacggtggcgctggcgcgcaatggggcagcggcatccttgatcggaagacgagcgatgggattctgcacgcacggacggtggccgcatgcgcggacgaaggaggggtggtggaggaagaagcttcactgcgacgagcagaggcgcacccgctacctccgcgaggacggccgtgacggagggcagttgatttggagccattgcaacccttattacaaaagtatattatctttttggaagcggaagtccttccatctacttcagaacattcgagacctagggtgcagctcaaaagagccgatgtatggcttggatttaaatcactgtatccttggatttcttgaggctccagcttttgaagatggaattctggaaaagtacccattcctgaatattgtacttaaccatgtcagtgatgacacatctgatttgtcgtgtgctgtaagttgcctcaaggcatcatttgaaatgctcggcatgtttgttattcctttacttgactgtcctcatctaggaaacattgtaaatatgataggtcagttatctgtatgcagtcacttgaagcgctacaagacggtgaacatgaaaagcaaaggaggaacattttgtattttcttcttcatcaagttactcggagtagtaatttcagtgccttga

SEQ ID NO: 144006 - DNA, 807 bp, Zea Mays
atggcggcggcgcggcggatcgacctggccgaccgttggcgcaggatgcaggaggacgaggacgccgatgacggcggcgagtcgtccgccgccaagcaccggcgactcatccgcgccaaggaggagtggttttcacattgctatacctttctgataaatttaccaaaagaagatcatatttggtgtggatatgctgatatcatgagccccttcatggagacattccatggcttctttgatgatgaagatgagaactcatctcttcgaataatgtggacaagagtttcccgagaaatgggcatttgcacacaatgtgtatgtgaacaccaccaggcacaaggatttttcaataccgaatatcagtcagatactgttgatccccttctgaaagtattgcggcttcttgatgaagagaggataacaggacatcttatacatatcaacacaaagcttcagctcaaagaatatgacccttcatgccatggtgcagaagttgttagcataatgtttgaagttctgatgtatcctgttctgttggatgaccaatcattggctaatcaatttcagatgttcattgaaaaaattgatgagacgtacgaagtgagcctttcaactaatcagcaataccccggtgtctatgccctacttttcttcaaaagctgtaaagctcgggctattgggcttcgattagctcgatccatggggaagctgagctccacactggagctggaacttgaagccatcccaaacgcccccttagttgttcctcaactcttgtcacaaaaattaagagaatcgcttgcataa

SEQ ID NO: 144007 - DNA, 2271 bp, Zea Mays
atggaagcgtcagtaggagcagctggtggtggaggggggaagtcgaagaaggaggaggagagcctgccgccgggcttcaggttccacccgacggacgaggagctcatcacgtactacctgcggcagaagatcgccgacgccagcttcacggcgagggccatcgccgaggtcgacctcaacaagtgcgagccatgggatctcccggagaaagcgaagctgggagaaaaagagtggtatttcttcagcctgagggaccgcaagtacccaacgggtgtgcgaacaaaccgtgccactaacgctggttactggaagacaacggggaaagataaggaaatcttcaccggtcagctaccagccacgccagagctagtagggatgaagaaaaccctggtgttctacaaaggaagagctcctcggggcgagaagacaaactgggtcatgcatgagtatcgtctgcatcactcctctagatcagtccccaaatctaataaggacgagtgggtggtgtgccgggtgttcgccaagagcaccggcgctaagaagtacccgtccaacaacgcgcactcgcggttgcaccaccacccgtacgcgctggacatggtgccaccgctgctgcagcacgaccccttcgcgcgccaccacaactacccgtacatgacctcggccgacctggccgagctcgcgcgcttcgcccgcggcacgccggggctgcacccgcacatccagccggcgccgcaccccgggacgtcggcgtcggcgtacatgaaccccgccgccgccggggcgccaccgtcgttcgcgctctctggcggcctcagcctgaacctcggcgcctcgccggccatgccgccgtcgctgccgccgacagcattccacgcgacgatgtcgatggcgatgagcggacagacggcggcgccgagttgtgccggcaccggtaataaccatcgtcatcaggtggtggcgggtgagcaccagcagcagcagatggcggcggcggggctcggcggctgcgtgatcgtgcccggagcggacggagggttcgtcgccgacgcggccgccgggggtcggtaccagagcttggacgtggagcagctggtggagaggaggactatgtcgatacatatttgcaagaacggttatatgccaggctatgaggtgtgggtgcaccacggtgaggacccacctcctcgtattgtatcggaagttcagtcacatgaagaggaggactacgataggatggaagagatgcttgacgatgtacgccatgagtttctaaccgtcgattcggagaaccccggtcaacccaccgagtttgaggatccagctacacatgaggaacacaatgtcaatgcccatacgttgcggtatcatgtcgacgagccccctattagtgatattgaaatttttcaatggaggggcaaaactgtaggacccagcacaacatactatttcaccaacgacgaatggaagactgctttactctacatgtataacaacatggaagagatgagtcagtttctcctggaatttgattctcaaaattgcatctatggctgtgaacgtgaccagattcgtcgagagggaaaagatgggggacttaatttcttgtgttggtttcgagattatgtagataaaaatgacaatatacacccggaccttcgacaattatccctaggagcagtaactggcagacgttatggtcggtatgatgtcaatggttttagattccgttccacaaggttcgaagatgatcatcctctatcagccacgacaaactccggagttgtaactagagctgtcgatgatgaagggaaggtgactaattattatggagtcattaatgatataatcgagtacaagttttttggagataaacaactcaaagtggtgttcttcgattgtgattggttttctccaaatacaacgcgagaaaatcaatatggcatggtggaagtcaaacacaacgatagattaaaaggccacgacactataatccttgcccaccaatgcgagcaggtgtattatatgacatatccatctaagaaaaacggtttggttgattggagggtagtgtacaaagttaatccgcgtgaacgactatatgctcctggtgatgctggttatgttgaaagtcaaatcgagcaggaagtgggggctgctgagattttccaagacgaagaacttacaagcacgtttaatgtacaaactgaaatgttggaagaatctttattaggcgatcaaaatgatgtagaggttcctccaaaaagaaaa

SEQ ID NO: 144008 - DNA, 768 bp, Zea Mays
tggttgatttttcagaatatttttttccatttgagttgctttgcctgattctgtatgtgatttttctgtcagtaggaaaagcattggtataatactctagcaaaaacaaggaagattcagttatgctgcatatgtgttatctatattaattttatgttgtacatagtattacttacttagttataatctattgcttgccttaaacactagagacagctgtcagttctttttaaaagtttgcatttggtggcctaataattgatcagccaactaaacgactttctgtcttcagcttgatggtcactgcttgctgactggtttcagactgttgggtgctccaagggcagcaatagggcttgtctagaaagtgaggtacagacgtaaggcaacctctcattcctgatcaggcaggaaaagcatgtctctgaccaaacataatcgcttggagtgactagcggagaggtaaggtaaagctatatgctcactccagccgccagagaccagcaccaatgtttctctacgagctgcctttctgccgttccgctggctcgacccgatctttctggcatgacaccagtcaccagggggttgctgtcgtttaaactcgtctggatgcaatgttcaccaaaacgcaaaaccgtaaacaacaagctatacggccatttaaacgagcaatatggccgatttaaaataagaacatatacttttactaaataaaaatatacctttgcaaatatttctgaattaatttgacattttgactggcta

SEQ ID NO: 144009 - DNA, 675 bp, Zea Mays
atcgaacacctctgccctctgtaaggagacccaaccccaccgcgcgcatccatgcccccaacgacggcggtgcgtcgggctccctcgccgcacgccgcgggcggagcgaggctcaccgcggagcaagcctctggtccgtgagaagcatgtctccgcaggaggcacggcaacgcgatcggtagattgcaacggcgaagagcttgatggtcactgcttgctgactggtttcagactgttgggtgctccaagggcagcaatagggcttgtctagaaagtgaggtacagacgtaaggcaacctctcattcctgatcaggcaggaaaagcatgtctctgaccaaacataatcgcttggagtgactagcggagaggtaaggtaaagctatatgctcactccagccgccagagaccagcaccaatgtttctctacgagctgcctttctgccgttccgctggctcgacccgatctttctggcatgacaccagtcaccagggggttgctgtcgtttaaactcgtctggatgcaatgttcaccaaaacgcaaaaccgtaaacaacaagctatacggccatttaaacgagcaatatggccgatttaaaataagaacatatacttttactaaataaaaatatacctttgcaaatatttctgaattaatttgacattttgactggcta

SEQ ID NO: 144010 - DNA, 757 bp, Zea Mays
atcgaacacctctgccctctgtaaggagacccaaccccaccgcgcgcatccatgcccccaacgacggcggtgcgtcgggctccctcgccgcacgccgcgggcggagcgaggctcaccgcggagcaagcctctggtccgtgagaagcatgtctccgcaggaggcacggcaacgcgatcggtagattgcaacggcgaagaggaggttattgtgctgttccatatggctgattatggaagttaatggtggttgagtgcaagaaaagaagtataactaacactgtaacgatcaaggtatacagaaacagagctattagcactagtgatgaaaacagtctcatgagtcgtgaaaggtagcttctacctccctcatctattatatgatttcctggaagactgctaacaggcggcaagcttcaaagatcatgttcacattgccgtatcctttcttaatcggcgctgtccttgtagatttacgtgaggaacgtggacattgagctatattatagttggaatcttcatgtttaatccttttacttaatccaacatgatgctatcttgtagaaggaagttctcattagtggatgacaaatgatcgcaagagtttcttgtggctggcgccactgtgtgtcccaggttcagggtgcttttatgttttgtgcaacagttttgggttgtagttggtgtttcttggtgcctaaacatggggctgttgtaacatttaaactttattccttattgaatgaatacgcagagcttc

SEQ ID NO: 144011 - DNA, 480 bp, Zea Mays
ttcacacgaccggaccaattcgcatcggcatcgaacacctctgccctctgtaaggagacccaaccccaccgcgcgcatccatgcccccaacgacggcggtgcgtcgggctccctcgccgcacgccgcgggcggagcgaggctcaccgcggagcaagcctctggtccgtgagaagcatgtctccgcaggaggcacggcaacgcgatcggtagattgcaacggcgaagaggtgcggggtctccgctgccagcctgccattactgttggtgatgggcatattgcaatgtctctattttgctgtagaaagggtaacaccttgtgattttgttagggcttctcataagcaacctctgcatcgttattacctgtagaccagaccagagagggtactgatttatgtaagttgtagtgccctatggcttagtgtaggattcagcttttccaaatgcactgtttaattaatgatgttcaattttcacaa

SEQ ID NO: 144012 - DNA, 1549 bp, Zea Mays
agcacagccacgcacaggggtcaggtcagtcgcctacgaaattcaatagcacagcgagagccaaggaagaagaagaagcaagcggagcgccatggcggcgtccaacggcgagggccacggccggttcgacgtgatcgtggtgggcgcgggcatcatgggcagctgcgccgcctacgcggcgtcctctcgtggcgcgcgcgtgctgctcctggagcggttcgacctgctccaccaccggggctcctcgcacggcgagtcgcgcaccatccgcgccacctacccgcaggcgcactacccgcccatggtgcgcctgtcccggcgcctctgggacgaggcccaggccgacgccgggtacaccgtgctcacgcccaccccgcacctcgacctgggcccgcgggacgactcggcgctcgtcgcctccatgaggaacggcggtgccaccgaagtcgtcgccggggatgagtcgtcgtcctggccgtgggcaggcgtgttcagggtccccgacgggtggacggcggcgcggagcgagctgggcggggtcatgaaggccaccaaggccgtggccatgttccaggcgctcgccgtcaagagaggcgccgtcctcagggacaggactgaggtggtggacatcacctcctccaagcgaggtgaaggagaggggtcaatcatctcggtgaggacgtccagcggcgaggagttccacggcacgaaatgcatagtgacagtgggcgcatggacgagcaagctgatcaagtcggtgaccggcctggagctgccggtgcagccggtgcacacgctcatctgctactggaaggtgaggcccgggcgcgagcaggagctcaccccggaggccgggttcccgacgttcgccagctacggcgacccctacatctacagcacgccgtcgatggagttcccggggctgatcaagattgccatgcacggcggcccgccgtgcgacccggacggcagggactggtccacgggcgcgggcgacctggtggagccggtggcccggtggatcgacgccgtcatgccgggccacgtcgacaccaccggcgggcccgtcgtccgccagtgctgcatgtactccgtgacccccgacgacgactacgtcgtcgacttcctcggcggggagttcgggaaggacgtcgtcatcggcgcggggttctctggccacggcttcaagatgggcccggccgtcgggaggatcctggccgagatggccttggacggggaggcgagcacggcggccgaggccggagtagacctccgccccctaacgatcggccggttcgcgggaaatcccaaaggaaacctgtctgccagccaaggctgatcggcgacggggctctgtttcatggtttgatgtcaaagtgtgtgctctgcttgccaacttgtctgttaagtgtcttttgggttgttggatttaaaaaacaaaagtgcgcgcatctcctcagtgttttctgcaggctgcagtaataaactggtttggtcagttctattgataatgacagcaataataagttcgttattgtgcagatccctc

SEQ ID NO: 144013 - DNA, 1536 bp, Zea Mays
agcacagccacgcacaggggtcaggtcagtcgcctacgaaattcaatagcacagcgagagccaaggaagaagaagaagcaagcggagcgccatggcggcgtccaacggcgagggccacggccggttcgacgtgatcgtggtgggcgcgggcatcatgggcagctgcgccgcctacgcggcgtcctctcgtggcgcgcgcgtgctgctcctggagcggttcgacctgctccaccaccggggctcctcgcacggcgagtcgcgcaccatccgcgccacctacccgcaggcgcactacccgcccatggtgcgcctgtcccggcgcctctgggacgaggcccaggccgacgccgggtacaccgtgctcacgcccaccccgcacctcgacctgggcccgcgggacgactcggcgctcgtcgcctccatgaggaacggcggtgccaccgaagtcgtcgccggggatgagtcgtcgtcctggccgtgggcaggcgtgttcagggtccccgacgggtggacggcggcgcggagcgagctgggcggggtcatgaaggccaccaaggccgtggccatgttccaggcgctcgccgtcaagagaggcgccgtcctcagggacaggactgaggtggtggacatcacctcctccaagcgaggagaggggtcaatcatctcggtgaggacgtccagcggcgaggagttccacggcacgaaatgcatagtgacagtgggcgcatggacgagcaagctgatcaagtcggtgaccggcctggagctgccggtgcagccggtgcacacgctcatctgctactggaaggtgaggcccgggcgcgagcaggagctcaccccggaggccgggttcccgacgttcgccagctacggcgacccctacatctacagcacgccgtcgatggagttcccggggctgatcaagattgccatgcacggcggcccgccgtgcgacccggacggcagggactggtccacgggcgcgggcgacctggtggagccggtggcccggtggatcgacgccgtcatgccgggccacgtcgacaccaccggcgggcccgtcgtccgccagtgctgcatgtactccgtgacccccgacgacgactacgtcgtcgacttcctcggcggggagttcgggaaggacgtcgtcatcggcgcggggttctctggccacggcttcaagatgggcccggccgtcgggaggatcctggccgagatggccttggacggggaggcgagcacggcggccgaggccggagtagacctccgccccctaacgatcggccggttcgcgggaaatcccaaaggaaacctgtctgccagccaaggctgatcggcgacggggctctgtttcatggtttgatgtcaaagtgtgtgctctgcttgccaacttgtctgttaagtgtcttttgggttgttggatttaaaaaacaaaagtgcgcgcatctcctcagtgttttctgcaggctgcagtaataaactggtttggtcagttctattgataatgacagcaataataagttcgttattgtgcag

SEQ ID NO: 144014 - DNA, 1827 bp, Zea Mays
gtagaagaagaagcagaagtactcaatcccgagactaacgccgagccgtgttgcggtctgcggagcgtgcttgccacactcacagtcgctcactccctgtgcagctgtgctcctgtcggttgtcgccccgcttcatctgtcgtctcctccagtgcagtccctcctccccctgtctccgccccaactctctccagtctcctcgcgtcggcagtcggcctggcagggctgaatcaatggcggtcgacccgcggcaggtcgtggcgggcttcctcaccctctccatgttcgtcatgctgggcaacatgatcaagcacgaccacttctctcccgtcaccgaggagatgggcttgaaggcaacaggtgcgcgatccaacacaatgaagcttgataacaatgctgaaatgaacagtgtcgatatggctggagtggaggacctgatggacactatcgaggaagttaaaccttgctggaccaaaccaagtccaaaaaatcagccatctaatggttttgttacattctccttgactatgggccctgaatatcacatctcacagatcacagatgctgtggttgttgcgaggtatctaggtgcaacatttgtactcccagacatcagaggaaatgaattaggaaataagcgaaaattccaagacatgtacaatgtggataaattcgtgaggagcctagatggtgttgtcgaagtaatagatgaaatacctgatgaagtgagtgctaagaagccagcagttatcagagtaccaaaccgtgtgactgaaagcttcatcatggacaccatccagcccatctttaaaaaaaacaagtacttaagacttgcggtcattttctcttcagtaagtttaaggccaaaggagacgagtaacaaggacttggatgcgactgcttgccttgcaatgttcagtggcctcgaactgaagcatgaatattctgaagtcgccagaaaaatgttggataggcttcaagaattaagcaagaaatcagatgggaaggtcttggcaatcgatttgcggaccgacttgctggaaaagaagagttgcaagacaaccagtggcgctcgaagaaaaggctgctataaccctaatgaggtcctggctttcctgaggagtgttggcttctctgctaatactaccatctacttgacagagacatggtggcacaaaggcctgaatgatctgaaggaggaatttccaaatacttataccaaggatgacattatgccagctgagaacaaaggtgaattcctgaaatccagcaatgcagacctagcaagcgctttggaccttgagatctgctcgcagagtgacgtgttcatccctgctgtcgctggcctgttctacgggcatgtcacaggtaagaggattgcatctggtcgtacccagatcattgtgccttctcagtccagcacctcgactcatgcttcagatttcacctccacctacatctccaacaagaaccacctagcctacacatgctactgttagcatgcttttgtactgccattaataagatcagctgaagtgagccgcagggtagtgctctgggtgcatatacaagtacctctcgttagtcgttaacatgctgttgtacactggttgatgttatgttatgaggaataaatattagcatatgttgtgtgttgtttacttgtttggatattaaactttggaacaacagcaaggagcataatgactgcttgtatgctgtaaaatgaacccgaggttaggcgtgtgaaaagagtttgcttcatgtaccttgattcatcaccttctgtctgctcaccaattgatgtagtaattgctccggaagtct

SEQ ID NO: 144015 - DNA, 600 bp, Zea Mays
atgggtgaggcgaggagccggggtgagatcggggcatggagaagctgggagccgtggcgagacggcgatagcagtgctccacaacaaggtcgcggccaggacgagcaaggagctgggcatggcgctgggcgatccaggatgcgcagggaacttcgcgagctaggcacggcatggggagtactgcagacggacgacggcggccatgggagacaagggcctcggctgggaggtgctcggcgcagtggagcaggggcggtcggccgagaggagcaggcggatgcctgggcgcgcgcgatggaagctggaaggaagaaactacggtgcgtagggaatggaagggaggaaaaggagcgaccgagccagagggaggtccgaccggtggctaccagagggaaatccagccggagctggagcagatgcgcaggggaggagagagatccggctggcaggagggagaagcaggggcgtcgcggcatggcgagtgcgccaggaaactccggccgcgagcagagcagagggatgcgcgaaggagcagagagctccggcgagctggagatggtcgacgttggggcagggggcaggaccgagctccagccatga

SEQ ID NO: 144016 - DNA, 711 bp, Zea Mays
atgggtgaggcgaggagccggggcgagctcggggcatggagaagctgggagccgctgcgcgacggcgatagcagtgctccacaacgaggtcgcggccaggacgagcaaggagctgggcacggcgctgggcgatccaggacgcggagggaacttcgcgagctgggcgcagcatggggagtactgcagacgggtgacggcggccatgggagacaagggcctcggctgggaggtgctcggcgcagtggagcaggggcggtcggtcgagaggagcaggcggatgccagggcgcgcgtgatggaagctggaaggaagaaactacggtgcgcagggaacggaagggaggaaaaggagcgactgagccagagggaggtccgactggtggctaccagagggaaatccagccggagctggagcagatgcgcagaggaggagagagatccggctggcaggagggagaagcaggggcgtcgcggcatggcgagtgcgccaggaaactctggccgcgagcagagcagagggatgcacgagggagcagagagctccggcgagctggagatggtcaacgttggggcagggggcaggactgagcgccgcctgagctccggccatgaagggagttccggccacagagggacgcagggagcgcaggaagctccaagcggaggagacgcgcagggaagaatcgagctggaggaagatgggcgcgattaa

SEQ ID NO: 144017 - DNA, 3199 bp, Zea Mays
gtcgccgagccattcgattcctctccgctgcccccaagcgagtcgccgccatttcgccgattcccggccgctgcctagggttttggtgccagcgcggtcggagggttgtgcctgtgggtcgcgttcccagtgtcgcgcgcggtggccgaaggtggagggaggagcggttctccggagaggaggtggaggtggtggctgcggagtgcggtctccacggagcgagtctaccagatgccgccgcggtctttgaggaggtagtgtggccgtgtggagtgaataggtggtggtggtggtggcggcggcggcagcgggactggcggaggcagccatgtttttcagcaggctcgatgactcgcccatgttcaggaagcagatgcaatcacttgaagaaggtgctgaattgctacgagagagatgtttaaagtttcacaaaggttgtcgaaaatacacggaaggactaggggaagcatatgatggagatattgcattcgcaagctcacttgaaacatttggaggggggcataatgatccaatcagtgtcacatttggagggcctgtcatgaccaaatttacaattgctttaagagaaattggaacatacaaggaagtattgcgctcccaggttgagcacatgctaaatgacaagctgctccagtttgtggacattgatttacatgaaatgaaggatgctaggaaacgttttgacaaggctacccttctttatgaccaggcacgtgaaaagtatttgtccttgaagaaaggtacaaggactgacgtagcaactgcagtagaggatgagcttcacagtgctaggtctttatttgagcaagctcgtttcaatctggtgactgcactttcaaatatcgaggctaagaaaaggtttgaatttttggaggctgttagtgggacaatggatgctcatcttcgttatttcaaacaaggatatgaactactacatcagatggaaccgtatatcaatcaagttcttgcttttgcacaacaatcaagagaaaggtctaactatgagcaggctgctcttcttgagaggatgcaagagttcaaacgacaaattgatcgtgaaagtcggtggtcaccaaatggaatgaatgattctcctaacggtgatggaatacaaacaataggtagaagttcacataagatgattgaggaagcaatgcagtcagcttcaaagggcaaggttcagaccattcgccaaggctatctatctaagagatcttcaaacttgagaggtgattggaaaaggaggttctttgtcctcgacagtcgaggaatgttgtactattatcgcaagcagaacagtagaccatctagtggatattctaaccaaagaactagcattccctcagaacatggttctgggttgctcagcagatggttctcttctcattatcatggaggcgtgcatgatgagaaatcggttgcacgtcatactgtaaacttgctaacatcgaccattaaagttgatgcagaccaatcagatctgcggttctgcttcagaataatttctcccacaaagaactacacgttgcaggcagagagtgcaatggatcagatggattggattgaaaaaattaccggcgtcattgcttctttgctgagctcccagtctcctgaacgacatcttatatcaagtcctaagggcagcagtcatcatcgaactgccagctcaagcagttcattcagtagctcaacagaacttgaacattcaataagtgaagattgtatgctggaaaaaaactcaggaagtggttatttcgagcattctgcaagagttgcacagcatcaccgaacaagcatgatgaaacctgacaagccaattgacttgcttaggaaggtggctggcaataattgctgtgctgattgtggtgcttcggagcctgattgggcatccctgaaccttggaattcttttatgcatagagtgttcgggggtacacagaaatatgggtgtgcatatatctaaggtaagatccctgacgcttgatgtcagggtttgggagcaatctgtaatcaatctctttcagtcaataggcaacacttttgccaattctgtctgggaagaaatgttaccttcatcaagctgtgttgaccatggtgatatttcaagggctgatggattagaaaacatgtcgcatggctttgcacccaagaagcctaaacaatctgattctattgcagtgaaggagaaatttattcatgccaagtatgctgagaaggatttcgtgcggaaacataacatggatgggattcaacttgcagaacagatgtgggacaatgtaagttcgaacaacaagaagggggtgtacagcttgatcgtggggtcaaatgccgacgtaaatttttcctatggtcatacatcattcaattcggctttgactctgggaaaagctctcctcctacaagagcaatcagcctctccatctaacggaagctctagatgttttgaccgcaatccactcgagaagggttgtaccggggattctgtttctcctgccagcacaagcgcccgtatagacgggccggacgattatgttgaaggattatctttgctccatctagcatgccgcgccgcggacctgggcatggttgagctgctcttgcagtacggcgccaatgtaaactccacagattcaagagggcggacgccgcttcatcacagcatcatgaaagggcgacatgtgtacgccaagctactgctttccaggggcgccgattctcaagccgcggatcgagatggtaggacagcgttacagtatgcaatcgacagcggaaccatagaggacgaagagatccttgttttgctagaggacccaagtagataaatcacgtaggtgtagtagtccaagtctcgagttcctgccgtcctgcggtggtgcattgtggctgccttttgcagtcacctggcacacacagggtccgaggatgccttgctagtattcagtctctgcctttgtggcaagaggaagttatagtttttctaggtctgtctgcggttttggtcgcgcttagggtaaaagtggcctgtttgtcgtggatgcagtttgcaagttgttggtttgcctttgtttgcagatgtcgcagtgtacacttgggaagtggctgccattgttgcgactgatgtacatatagcgatgtctgatacaggttatttatgcaagaatttagatcggtgaaaaaaa

SEQ ID NO: 144018 - DNA, 953 bp, Zea Mays
ctgccctgtcgccgagccattcgattcctctccgctgcccccaagcgagtcgccgccatttcgccgattcccggccgctgcctagggttttggtgccagcgcggtcggagggttgtgcctgtgggtcgcgttcccagtgtcgcgcgcggtggccgaaggtggagggaggagcggttctccggagaggaggtggaggtggtggctgcggagtgcggtctccacggagcgagtctaccagatgccgccgcggtctttgaggaggtagtgtggccgtgtggagtgaataggtggtggtggtggtggcggcggcggcagcgggactggcggaggcagccatgtttttcagcaggctcgatgactcgcccatgttcaggaagcagatgcaatcacttgaagaaggtgctgaattgctacgagagagatgtttaaagtttcacaaaggttgtcgaaaatacacggaaggactaggggaagcatatgatggagatattgcattcgcaagctcacttgaaacatttggaggggggcataatgatccaatcagtgtcacatttggagggcctgtcatgaccaaatttacaattgctttaagagaaattggaacatacaaggaagtattgcgctcccaggttgagcacatgctaaatgacaagctgctccagtttgtggacattgatttacatgaaatgaaggatgctaggaaacgttttgacaaggctacccttctttatgaccaggcacgtgaaaagtatttgtccttgaagaaaggtacaaggactgacgtagcaactgcagtagaggatgagcttcacagtgctaggtctttatttgagcaagctcgtttcaatctggtacataccctgtttagttgtcacttcacttcatgattccttatttacacagttggaatgccttcgtcttatctgtatttatattcaggtgactgcactttc

SEQ ID NO: 144019 - DNA, 157 bp, Zea Mays
ctatgcggctgtttggttgtcaggatcaggtgatccaggtcaaagcccagatgcaggctgggcatagcctgcatgcattcgtgcaaaccaaaacaagtctacttgtttggttgtttgtccacagttaaccaggatcagcagagccgctgtttggttt

SEQ ID NO: 144020 - DNA, 1229 bp, Zea Mays
cgcgggcgtgcgagcaaacggcttcaggttttaagactttagattcagccttgttacaggcccacaaaaaattagggagttttcttctcccgtccaccttgcgtgctcgcgcgcgagctctcgtggcgcagccacaactaggcgaccgccgccgcccctacgccacgtgctcgagtctagcctcgtcgattgcttccccagtttaattgatctacaagcttcagaacatgttcaagaatacatttcagtctgggttcctgtccattctttatagcctcgggaccaagccattgcagatatgggataaggaagttgtgaatgggcacattaaacgaccccaagatgaagatatccaatctaatgtacttgaaattgttggaacaaatgtacagtcaacttacatcacatgcccagctgatccttctgctactcttgggattaagcttccatttctggctattattgtgaaaaatcttaagaaatacttcacgtttgagatccaagttctggatgacaagaatgtccgacgtcgatttcgagcatcaaattttcaatctgtcacaagggtgaagccatatatctgcacgatgccgttgaaactcgacgatggctggaacaacatccagttgaaccttgctgatctgacaaaaagggcgtacggcacaaattacgtcgagacgctgcgggtgcaagttcatgcgaactgccggctccgcagaatctacttctctgaccgcctctactcggaggaggagctgccgcctgagttcaagctctaccttccaatccagaaatcataggatcccgagggcgtggagagactctggtgaccgggagacttatatcgtaccattgtgaggataacctagctgcacatctgcgccttcctgagatacagaaaaaaaatgtaccagaatgtttctgttagttttctgattgttgtgcgatgaatgattaggctgttctgttttcatagcaagggcgagtagccttagttggggctgttacccagtgacccctttgtgtgaacgagtagtcaatgttattagtccggaccctttggctactggtccttctggtccaaagcaaaacgtaccgttactgctcactgcctggtcatttaacgtgcttcttccatggttgtaccgtctctatgatagtatcatgtggccgctgatctattggatacatgttacgcgtgactcgcattaaaagcttcacttctcttt

SEQ ID NO: 144021 - DNA, 1323 bp, Zea Mays
cctcgctgaacacgaacgggcgtggcgaccgcccatgccgaaaacgtacgtggcgagcgcccatgccgaaaacgtacgtaacccgccaaacgcgggcgtgcgagcaaacggcttcaggttttaagactttagattcagccttgttacaggcccacaaaaaattagggagttttcttctcccgtccaccttgcgtgctcgcgcgcgagctctcgtggcgcagccacaactaggcgaccgccgccgcccctacgccacgtgctcgagtctagcctcgtcgattgcttccccagtttaattgatctacaagcttcagaacatgttcaagaatacatttcagtctgggttcctgtccattctttatagcctcgggaccaagccattgcagatatgggataaggaagttgtgaatgggcacattaaacgaccccaagatgaagatatccaatctaatgtacttgaaattgttggaacaaatgtacagtcaacttacatcacatgcccagctgatccttctgctactcttgggattaagcttccatttctggctattattgtgaaaaatcttaagaaatacttcacgtttgagatccaagttctggatgacaagaatgtccgacgtcgatttcgagcatcaaattttcaagtgttctgtcacaagggtgaagccatatatctgcacgatgccgttgaaactcgacgatggctggaacaacatccagttgaaccttgctgatctgacaaaaagggcgtacggcacaaattacgtcgagacgctgcgggtgcaagttcatgcgaactgccggctccgcagaatctacttctctgaccgcctctactcggaggaggagctgccgcctgagttcaagctctaccttccaatccagaaatcataggatcccgagggcgtggagagactctggtgaccgggagacttatatcgtaccattgtgaggataacctagctgcacatctgcgccttcctgagatacagaaaaaaaatgtaccagaatgtttctgttagttttctgattgttgtgcgatgaatgattaggctgttctgttttcatagcaagggcgagtagccttagttggggctgttacccagtgacccctttgtgtgaacgagtagtcaatgttattagtccggaccctttggctactggtccttctggtccaaagcaaaacgtaccgttactgctcactgcctggtcatttaacgtgcttcttccatggttgtaccgtctctatgatagtatcatgtggccgctgatctattggatacatgttacgcgtgactcgcattaaaagcttcacttctcttt

SEQ ID NO: 144022 - DNA, 1660 bp, Zea Mays
cctcgctgaacacgaacgggcgtggcgaccgcccatgccgaaaacgtacgtggcgagcgcccatgccgaaaacgtacgtaacccgccaaacgcgggcgtgcgagcaaacggcttcaggttttaagactttagattcagccttgttacaggcccacaaaaaattagggagttttcttctcccgtccaccttgcgtgctcgcgcgcgagctctcgtggcgcagccacaactaggcgaccgccgccgcccctacgccacgtgctcgagtctagcctcgtcgattgcttccccagtttaattgatctacaagcttcagaacatgttcaagaatacatttcagtctgggttcctgtccattctttatagcctcgggaccaagccattgcagatatgggataaggaaggtttgccatcttcttgatgtgtcctctttaatgctcaaatactgatttcctttgttccattttgttctgctgagtgctgacacgaaataagagcatcgattaatttggttaggattcgagctttcagttgctaaagcattatctgcttctgatgctgcctttcttaacttttgtttactttgtgtgtgggatagattatgaaaattgaaaaacatgaacttcatcagctagaatatcattggataattggattgttattgatcgttggcttccagcagcaatgttaaatcttcatgaaatatttgacatgaaagtgtaaacttgtccatcagcacatacactgcaacctgctagtttagctttttctgggacctaaacaataaatacatatgtgcttcattctcacgaacctgtgtcaaatgtaccatttccgtttcttaatgttttatccgtttgcagttgtgaatgggcacattaaacgaccccaagatgaagatatccaatctaatgtacttgaaattgttggaacaaatgtacagtcaacttacatcacatgcccagctgatccttctgctactcttgggattaagcttccatttctggctattattgtgaaaaatcttaagaaatacttcacgtttgagatccaagttctggatgacaagaatgtccgacgtcgatttcgagcatcaaattttcaagtgttctgtcacaagggtgaagccatatatctgcacgatgccgttgaaactcgacgatggctggaacaacatccagttgaaccttgctgatctgacaaaaagggcgtacggcacaaattacgtcgagacgctgcgggtgcaagttcatgcgaactgccggctccgcagaatctacttctctgaccgcctctactcggaggaggagctgccgcctgagttcaagctctaccttccaatccagaaatcataggatcccgagggcgtggagagactctggtgaccgggagacttatatcgtaccattgtgaggataacctagctgcacatctgcgccttcctgagatacagaaaaaaaatgtaccagaatgtttctgttagttttctgattgttgtgcgatgaatgattaggctgttctgttttcatagcaagggcgagtagccttagttggggctgttacccagtgacccctttgtgtgaacgagtagtcaatgttattagtccggaccctttggctactggtccttctggtccaaagcaaaacgtaccgttactgctc

SEQ ID NO: 144023 - DNA, 947 bp, Zea Mays
acgtatgggctttgacggggaggtagcatgcatgggcagagaggcgtcgtccctcctcggcgcggagaggggccaaaggtggaagcagcagcagggaacggctttctcggccacagttactccgcggcccgcgccgattacgacgtcgcggtcatggccgcggcgctcacgcacgtcgtctgcgccactgagccaccaccgccgcgcgggggcgaggcggcggcgcttccgccggggccgcggcaaggaggagggacgacggagctgcaggcggcggcgcgggcacatcagtacaggggcgtgaggcggcggccgtggggcaggtgggcggcggagatacgggacccggagaaggcggcgcgcgtgtggctcggcacgttcgccacgcccgaggaggcagcccgcgcctacgacgacgccgctcgcaggttcaagggcgccaaggccaagctcaactttccgacgactactgctactgctacgacgacgacgacatcgctgtcgtcgccccaccagctgctgcggtcagccgcggagtcggagacggcgggggaggagttccccgacctcgggcagtacatgcacatactccagagcagcagcgacgccgacgttcgggccgtcgcggccgggttgccgctgatgaaccgcctgccgccagtggacggtcgccaagaccatggcagcagcagcgcgagcagcgggcgctaaggcacgcgtgacgcttgtgatcgtcacggtacccatgagcccatgacctcagacctcccatgccaatgcagcgcgcgcggtccagcattatttggccatttgctgttatcaaacgtgttcggtgttccatgagcgtgcgtgacgtgacacctgaacacacctgattagagttgcttgccaagatgtggttggtagctagggcttaatgatcaggagactaatcgactataccacgc

SEQ ID NO: 144024 - DNA, 318 bp, Zea Mays
atggcgacattgatacacaccttgcatatgcacgaagtacaaacaagcattaaaggtgaaaattgtgaaggcaatgcagatccagaaagcctttctgacattgacgatgcagaggctgatgggtaccttcacaatgaggaagaaacacaatataaaaagattatctgggaggaaatgaacaaagagtaccttgaggaacaagcagctaaggaagcattggcagctgaattggcagctacagggattgatccagaagcgggaaagaaagtaaggaacaatttggggcgaccaaacttcttgtttaactttggcaactga

SEQ ID NO: 144025 - DNA, 1386 bp, Zea Mays
ctttgtttttctccctgtcttcttctcccacacggcagcagcccacaccttcttcctccctgcgcccagccttccccaagctctagcgtgcagggcagcagcgccccttctgctccatggccgagctcccttggagcagacgctcaccagcccaggcgtgggctccattttttccagggccgccgaactccatgtccatggcgtggagcagcagctcccattcctcggcgacatcctcctcgccgtcgtccatggcgcccctgctccttcttcctcgcaccgcagcagccgagctcgccctagcctccatttttccagtcggcctttccccctgcgagcagtttttcccattgtcttcatcctccagccgccatggacgcccaagccagtagcgccttgagctcgcccctgcttctctctctctaccaagcgccccctgcaatcttccccaagttgccttcctcctctccccaacggcgccctcctttttttcctctctgttccagaccggcatcagagcagtgcgcgcaagctctcccagccaaggacagcaccatcccctcccctgctgctgctcgcctcctacctccttttcccctagtgcgacagcaaggaacccctgttctgccggcagccatggcatccaagttctgtgcgcagcgatgccggtccaaaacagcagccttggatcccctctgcatcgcgtgcttcgctcgatctgcgcagtcccgacccacgccgtcgcattggtatttggggacagcccatgtcgtgtcgttgatctgtgcagttcgaccgtctacgcgtctcacttcgccggatctgcgcagccccaacatcgacgacgttcaccccggtgagacgacgatgatctttgtttgattccacatcggcattgttctccggtgattaaattgtgtatatgtgtttgttttgtttttattttgtggaggcgaggaaccccgtgttttgcgtggagaaggcaagtcgttcaacgctcgtcggatgctcggagcgatgcacaaatcggaatcgccatcgtccttacaaacatcgattgggtttatttatggtgagccgatgtatgtcgctctcggtcgactcgattaattattttgaatggatgtgtgtaaaatgtttcggttatgcgcattggtaggatcgcgtttgctattggagaacaagagattatttgatgtgtgcgaattgtagtgagtctaattaggttttgatcgatgaagtgcacgtgtgattatgtgtgtgaaaatacttttgtatgaatggaagcgtgtagagaggaaaatgaagtagaaaagaactctgatgtttttatatcttggtaggaaaaatatgtgatgtctggtttgatgcgaaaaactaagttac

SEQ ID NO: 144026 - DNA, 1146 bp, Zea Mays
atggcttcggttagtcgtcgcgtcctgctcgcgctgctatcccttctcctgctcgcgctccggcacacggcgctgtccgctctcggggccacattcccgggcgacaaggcggcgctcgcggcgctgaggtccgccgtggccgcgtcctcggtcccgccccactcctgtctctcgtcgtgggacttctcccgcgacccctgcgcggcgttcccgtgcggcgtccgctgctacactcctcccgccgccaactcctcctacctccgcgtcaccgccgtcgcgctcgaccccgcgggctactctggcgcgctcctagcggcgcttctgtcctcgctccccttccttgcgtccttgtccctcgccgacaaccggttcgacggcgcgctcccgcccatactcctacccacatccccgtcagggtattggctccttttctggtattctcgtttttctgaccttctggtggggtttctgtctgtcttggcgtgcgcagaggtttcgacgttcctgcacgcgtgcgagggggaggcattgacgaagctcaccaacgagaaggtggcctacttcaacgcgcccatctatctgcagaacaagacccagattggcaaggttgaagagatcttcggccccatcaacgaatcccctctgtggtggatggtggaggcaggctctccctcacgcaacatcatgcctcccatcctcgtctccgacgtagcttccgtctggctcaccatatcccgcagagcggccgtgaagatcgccgcgctccgcctgcagctcgagaacaaggaccgggaggtggagcggctcaaggacctgtgcctgcggcactgggaggagatcaggacgctcaaagacgtcgtcctgttcctgcacgtggagccggagccagagcccgatcgccgccttcaggacgatatttccacgctcaccgaccggatccagtgcctcgcgcaggagctcgcccaggaggctgagaagcactcggcaaggtcgtgctttgacgaggatggatactgctcttcccctaggacgccggggttcaacgaggataccgctttctctctggagtgcaacattgggaagctgagacgccgaactacggtagcccagacgaaatgttcagcaaggatcttaatccttgcctga

SEQ ID NO: 144027 - DNA, 210 bp, Zea Mays
atggccagggaaatccatggtcgccagatatgcgcctacttattcctctccagtccccaacgagagattcaggtgaaacgtgaagagctgcttgagtatgcccaaagtatcatttcaggattgaagagaaatgatgaaattgtgaggcttacacagacctgttttgataagagccaagcagcgattcttccatttcggaccacgacctag

SEQ ID NO: 144028 - DNA, 1532 bp, Zea Mays
cagcaaccatcgaccagcccccaatcgggaaagttttagatcagaaccgtcagagtaactcctagcatggttctgtacagagcaggagaggaggggcctcgcatggcgatgagagcactgctctggtagccaaggatgacttgcctgtggcctccatcagtcgcagaggacgctgttcttctgcttgtggttgtcgatcgcaggcagtctccttggctagcccgagcggctctcatccaccatgccaggctcgtctcttctatttcttcaacccgactcgttcacgccgccaggaacgaagggaaacggggaacgaacacgcgaagggtgcagatgacaggacgacgatggtcagagaccaattcatgagtttgacggcacttatttgcccctcctccccctgttcatttatttcttgctgcttcagagcacagagtgaagctagagagaggtggctatgcaatggaatacttcctttagttagagctttcttacgtacgatcctccggcagatgcaccaaatttaactgacagtatcaacgataaagatgatgcaacattgtatccactaataacagatctagaattgtggcacatggtacatagagtttatactagttcagtactctctcaaataacgcaacatagtgtcatagtgctagtgtggaaaatatgggccagcacgagcatggataaaaaaacagaagtctaaaatacacaccgacacaaaataatatggaccgggctagcacagcctaacaccgggtctgggccggacttaaattccggctcgtcgggctccatcacgacacacacgcatggtccggcacaacccaatgagatccatattgtttaattctttaatttagtaagttacaaacttaatgtggctgtaatatttagactttatgcggtcaaatgatactcatattgtttaatatctttaatttagtaagttgtagattttatgtggttgtaaaatttgaattttatatgattcaaatatatgggccgagcttgagccgtgcacgacccaacgaagccacgacatgttttagggccgggctggaccgctgtttctacattttaggctagcacgatacggtccaaaagttttttgtaccttcttggctcgagcctatttggtccgatgcacgatggactcggttatttcttaaaattgggaagaatataatggatatggtgagattacattttcaggcaaactatatatatatagtatttagagccctgagctctctctaactattggaagacccgaccagcaaaccactaggtgcgcggaccgcaccgtaccgaccaggtgcgcagactttttggctcactgtaccacctacttaattataactacgtgttatgctcaattgtggtttacacacttttttggtatgcgcatgttgtacacaagtttacgcttattttgtcatactgtctgaaaccacttcctgtactatcatataaaaccgaccgcgacgactgctttgcccgaaaggactagggtttcagcggcg

SEQ ID NO: 144029 - DNA, 732 bp, Zea Mays
aaccatcgaccagcccccaatcgggaaagttttagatcagaaccgtcagagtaactcctagcatggttctgtacagagcaggagaggaggggcctcgcatggcgatgagagcactgctctggtagccaaggatgacttgcctgtggcctccatcagtcgcagaggacgctgttcttctgcttgtggttgtcgatcgcaggcagtctccttggctagcccgagcggctctcatccaccatgccaggctcgtctcttctatttcttcaacccgactcgttcacgccgccaggaacgaagggaaacggggaacgaacacgcgaagggtgcagatgacaggacgacgatggtcagagaccaattcatgagtttgacggcacttatttgcccctcctccccctgttcatttatttcttgctgcttcagagcacagagtgaagctagagagaggtggctatgcaatggaatacttcctttagttagagctttcttacgtacgatcctccggcagatgcaccaaatttaactgacagtatcaacgataaagatgatgcaacattgtatccactaataacagatctagaattgtggcacatggtacatagagtttatactagttcagtactctctcaaataacgcaacatagtgtcatagtgctagtgtggaaaatatgggccagcacgagcatggataaaaaaacagaagtctaaaatacacaccgacacaaaataata

SEQ ID NO: 144030 - DNA, 97 bp, Zea Mays
ggccattctgcgttctgccattccctgttctgtctttccgattccctcctccccacgcacatccattctcatgttctgccaccattctatatctatc

SEQ ID NO: 144031 - DNA, 754 bp, Zea Mays
aaaagaagcctcagtagcagtgattcacggtcaacaaatagccgattacgcattcccgtgaaaggccgcatacaactggtggttagtaacccagagaagacaccacttcacacctttttctgtacctatgatttgagtgacatgcctgctggaaccaaggttctgacaatgggcatgagttggaaaagggacgttctgcagatatggaatgtttctccatggaatgtgacgttagagaaccaaatgaaaatggtacttcggggaattcagaaaatgatgctaatgctgaggggtgctgctgtcaaataaactcatgtgaaggtggaaagatatatttcaacagatctcccaaggtcaatgatattccagctggaggggttctgcggtatgctttgcacttacgttttctgagccccttctccaagaagtcatcaaagtcaaggtatcattgcaaattggatatgtcatcacaaccacacagtcgcagtaggactgaggaagagagaagattttatctttacaatgatattagagttgtctttcctcagaggcactcagactctgacgaaggcgagctgcgggttgagcatgacttcccagcaaatcccaagtattttgacataagcaactaagaactccttgcacactcgtgaagctgcagataaaatttgtacataccatttcgtcactaatcaatctttactgcttattaccatcgatgtacagactaaccttgcaatgaaattatttactt

SEQ ID NO: 144032 - DNA, 776 bp, Zea Mays
tctctctctcggttctcccgttcccccgcgcggcgatctctctcgtggcgaccagcgggcgaccgccgcacgcccaggtcgtcattggctcctcagccaggtgctgttcgggcccctaaactgggcgccggcgacgagcacgcgccaggactgtaatctgatctcgtggtggtatggttcgtcctaggattctcgtggcttgttcatgctccgagactccgagttgtgctttacctcgaattgctgcagtatccgtagggggcatgattgatggtggaacatcctcaccagtgtcagaaatgtcaatgtagctctaacgttcatttctcagtttgctgaagtaaacgatttcgggatgggtttgcctcaaattcctgtggttaaggaggaagagcctactgaagtgagtacacctgccggttctagtttcagtgtcgatggcccctgcgattcgggtaaacttctcgagggaagctcaagtggaagttggtttcagaacccatccatcagcgacttcaagagaaaatttgcaccaggtgctgcttcgaatggattaaatagtcagttcagaactagacatgccgttgatgatcctgcgggctaccaaagcctgaatcctaaaccaagagatccaaattatagatcatgcactaaaatcaaatctactctacatatacctgcaatgagggttgttgggtttgattcaggaactgatggttctaccgggggccctgatataatggtatctcacaaaatgcattcatctttagtcattg

SEQ ID NO: 144033 - DNA, 2178 bp, Zea Mays
ggccactccaccacggcggcggaggagctcctcgctgctgcccaggatatgacagatatgaggagctgttacgataacttgctttctgttgctgcagcaattgcaaatagtgcatacgagttctctgaagcacttcaagacatgggggcttgtttgcttaaaagaattacaccaaataaagatggaatcaatgataaagttttgctgttgcttgggaaatcacaatttgaacttcggaaacttgtagatagttatcgtgtgcatgttcttaatacgatcaccactccatcactgtcgcttcttaatgagcttcaaaccgtggaggaaatgaagcgccaatgtgatgaaaaaagagaattgtacgaattcatgctaaatgctcagaaagaaaagggaagatctaagaatgctaaaggtgataatgtagcatcagaacaattgaaacaagctcaggaagattatcaagaggaagcgactcttttcctattccggttgaagtcattgaagcaaggacagttccgaagtcttttcacacaagctgctcggcatcatgctgcacagctaaatttgttcagaaagggggtcaagtcccttgaggctgtagagccacatgttaggctcgctgctgagcagcaacacattgatcatcagtttagcgcacttgaggaagaggattatgttgttgaggatgagaatgatgacgagtacaacgacagtcatgatggagagttgtcttttgattatggagaaaataaggaaactgagaaatctggtatcgcttctaggaatcatacagaggatttttttaacagcagcaaagaagattattcttctgttccacatgaaagacagagaattgaaagtcagtcagcaccgctttttcctgggaaaaaggtcaatacagaagagagaataaaagatttgcggcgttctgcgacaaggaagttaaatacttatgttttgcctaccccaaatgatgttcgagctacttctcagatagcatcaggaaatcctatttctggacctctcgagagcaaaggtgccttccattcatctccactccacccttctgcagacataagagatttgagagacaataaactacctagtcctgcaagattgtctaatgtacagtctgtgctgaaagagagcaataccaatacagcagaaacaaggaaagtactcccagtgggtgatctcgctttacctggctattatgacctgaagactctcgacaacaacaaagtgaaaagagggtcattttctggcccaatagcttctagaccacggccaacagagaacaatgatgttatttctgcagcacccaggcatagctctgcacatcagccagtgcacatgagagtatcccccggcaactcgccgccacccatttcctcaccgaagatcaaggagcttcatgagcttcctcgaccgcctgttaatacatcaaaaaacacaacatttcccagtttggttgcccactcggccccattggtagcaaatcctgcatctctgacacccaaagttcaagaccattttagggcaagacaaatgcttcccagtactgcttcacctttaccaactccaccgcctggatccatatcccgcagtttttctataccttctagggggagaacaggttcagacggtaaggagatagaagatcagcaagacaagggagctgccagaatgagcctttcttctcttccttcagctcaaacattgttggaagatcgtcagccattgtcagcagctgctggatcggttagcaaaacataggagtattcactgcgaaggtggattactatcattatcaagcggcttgctgagcccttcctggaagaatgctgtacatattagcatgtgagccctggccagtatcgcggaagtagtaggttgtttctcgtgccctttggctaaggtgtagtctgcagatagtgggtttgcggaaataaattcccccaattttctcaccgcttggttgattgacgcgagatttgctgttgcgcgagcttgtttgcttgccttgaagcgaggtcggagtgccatctgttttctgcagcttctgtaattatcacctggtttcgtttcctgtggttatgtaattaccatccgcttcacccccgatcaaaaccacctgtggtaaggggaaaaaaaaggcaagaagcgctgtgttgt

SEQ ID NO: 144034 - DNA, 1923 bp, Zea Mays
ggccactccaccacggcggcggaggagctcctcgctgctgcccaggatatgacagatatgaggagctgttacgataacttgctttctgttgctgcagcaattgcaaatagtgcatacgagttctctgaagcacttcaagacatgggggcttgtttgcttaaaagaattacaccaaataaagatggaatcaatgataaagttttgctgttgcttgggaaatcacaatttgaacttcggaaacttgtagatagttatcgtgtgcatgttcttaatacgatcaccactccatcactgtcgcttcttaatgagcttcaaaccgtggaggaaatgaagcgccaatgtgatgaaaaaagagaattgtacgaattcatgctaaatgctcagaaagaaaagggaagatctaagaatgctaaaggtgataatgtagcatcagaacaattgaaacaagctcaggaagattatcaagaggaagcgactcttttcctattccggttgaagtcattgaagcaaggacagttccgaagtcttttcacacaagctgctcggcatcatgctgcacagctaaatttgttcagaaagggggtcaagtcccttgaggctgtagagccacatgttaggctcgctgctgagcagcaacacattgatcatcagtttagcgcacttgaggaagaggattatgttgttgaggatgagaatgatgacgagtacaacgacagtcatgatggagagttgtcttttgattatggagaaaataaggaaactgagaaatctggtatcgcttctaggaatcatacagaggatttttttaacagcagcaaagaagattattcttctgttccacatgaaagacagagaattgaaagtcagtcagcaccgctttttcctgggaaaaaggtcaatacagaagagagaataaaagatttgcggcgttctgcgacaaggaagttaaatacttatgttttgcctaccccaaatgatgttcgagctacttctcagatagcatcaggaaatcctatttctggacctctcgagagcaaaggtgccttccattcatctccactccacccttctgcagacataagagatttgagagacaataaactacctagtcctgcaagattgtctaatgtacagtctgtgctgaaagagagcaataccaatacagcagaaacaaggaaagtactcccagtgggtgatctcgctttacctggctattatgacctgaagactctcgacaacaacaaagtgaaaagagggtcattttctggcccaatagcttctagaccacggccaacagagaacaatgatgttatttctgcagcacccaggcatagctctgcacatcagccagtgcacatgagagtatcccccggcaactcgccgccacccatttcctcaccgaagatcaaggagcttcatgagcttcctcgaccgcctgttaatacatcaaaaaacacaacatttcccagtttggttgcccactcggccccattggtagcaaatcctgcatctctgacacccaaagttcaagaccattttagggcaagacaaatgcttcccagtactgcttcacctttaccaactccaccgcctggatccatatcccgcagtttttctataccttctagggggagaacaggttcagacggtaaggagatagaagatcagcaagacaagggagctgccagaatgagcctttcttctcttccttcagctcaaacattgttggaagatcgtcagccattgtcagcagctgctggatcggttagcaaaacatagggtgagtttgcactacctgtgatgttataacctcacagtttttttacatatgtgcacctgcagcacacaggaagctactgcctatgttcattgatcatgaattcatgatataatataaaaagtaaagcaaagttgaataatcct

SEQ ID NO: 144035 - DNA, 1185 bp, Zea Mays
ctgttcctattgtttttagaggaccaaatggagctgctgctggagttggtgctcaacactcacagtgttatgcagtttggtttgcacatgttccaggacttaaggttctcacaccatactcttcagaagatgcccgaggcttgcttaaagctgctattagggatcctgatcctgttattttcttggaaaatgaattgctttatggagaatctttcccagtttctgctgaagtgcttgattctagtttttgcctaccgattggcaaagctaagatagaacgtgggggtaaagatgttaccattactgcgttctccaagatggttggctatgctctccaggctgcagagatactgtccaaggaaggaatcagtgctgaggtgatcaaccttcgatcgatcagaccacttgatagagctgctattaatgcatctgttaggaaaaccaaccgattggtgactgttgaagaagggttccctcaacatgggattggtgccgagatatgcatgtctgttgtagaagaaagctttgagtaccttgatgccccagttgagaggatcgctggagctgatgtacctatgccctatgctgccaaccttgagagaatggctgttccacaggtcgatgacattgtgcgggcagcaaagcgggcctgctacagggcagtaccaatggccgcagctgcctgattggtgtacaggcctttctatttttctcccccctcagttttcgctctcgggcagcaagaaacatgtagtattcataaggtgccggcaaattggccggaccccagactccaagcgagctagtttttgtagatctgctatggtgtgctttattctgttagtcgatatatgttgcattgtttctagtttcaaagcccatttatttacttatctatgatttctacacacggcctaataatcttgctaaggccctgattgaatggaaaatatttttttgggagttttaggaaaatactacaattttgtgaaataccttggttttggagtaacatgaagatgatgtttggttagaagaaccaatccattctaaatatggtggtgtatcacgaccaatgttttcgagtcgagaagtcgaagttgactagttgaatatacattgatgaatatagttttatcatctaactgtcccacctcttatcaataatagattacttcatcaatt

SEQ ID NO: 144036 - DNA, 358 bp, Zea Mays
agacaaatccacgctttccttcgcctcctctcctctatcgcagtcgcggccaaggccaacgaaccaattcctctacggcccaccttcttcctacctgccattctcccatccagcacagcagggcgtctcctcctcctccctcccgcttttatcgccgcctccatttccaggacgcgtcgaattcctccatctaccgcgccggccgccgaggcccgagggggaggaggatgctgggcgccgcgaggaggcagcttggatccggtcccatgctgggacaggttttgcgaaggctccgcccggcggcggcggctgaggtggcgaggggctactccgctgcggcgaaggaggtgaggggccg

SEQ ID NO: 144037 - DNA, 1437 bp, Zea Mays
gggatcctataaattgcccgccttttcttctccaatccactcatcataaatctctctcgctcgctctccaggctccagctagactgtcctgctctgcttcggtgctactcactgtgcagtgtgcacagccagccagcttcagcagagtccggctcggctgtcggctgcgagtcctgctcctgcaggaatggacaggcctgcgcaggcgcccacgcagctgccgccggggttccggttccaccctaccgacgaggagctggtcgtgctgtacctccgccggaaggccctggctcgcccgctgccggccgccgtcatccccgtcgtccacgacgtcgccaggctcgatccgtgggacgtcactggggcgagcgaaggggagggctacttcttcagcctgcggcgagcgccggcgaccggccgcaggaggagggctgggagcgggtactggaaggccacggggaaggagaagccggtgttcctgcagtgcggcggcgagcagaggcagctgctcgtgggcgtcaagacggcgctcgccttccaccgccgtgagccgccgccgccgtcgtcgcggacaggctgggtcatgcatgagtaccggctcgccgtgccccgcggcgtggccgaccagaggaagaagaatgcgagacatggctgcgttgctgagccaggggagtgggtcgtgtgccgggtcttcctgaagaacaggccgaaccgggacgccggcagcaaaactctgcgacacggcgcctccgctcggcggcggcggcggcagcagcagccggaagacgtgagaggacagcagccgttgccattctcggcgccacagccgtcgtcctccagctgtgttaccgacgtcaccgactgcttgtctgacgaagacgaagacgaagccagcagcggcagcacagcccgagctgcccctcaaagagaggcctaaggatatatatactctatatagtactccctgtagcgttttcccctctatcttgccccattgcccgtacttttcctggatcctggcatcatataatcaggtatagggcatgtccagctcaagggtgatccccagatatatttggcagtcctgaatcaggaacaatacggcatctgtgaagcagcatgcatttcgataatcaggtatagggcatgttcagctctttgtgtgcatcctccgacgaagcgcctcgctgtgcagcttctgccgtcatcgttcagatcagccggtcgttatcctccacccgatgagaagcgcagagcgatggcctccgcgtgcttgccgtggcctctgagttgactgcctggacatcgatggcgctttacgaattaaccttcccaagattgatatcgcacgcggtggcgtctgtgccttcttccctcggcgtgccttggcgttgtgtggtgcagtgcagccctgcctgccttcgcaggtggtcgcgg

SEQ ID NO: 144038 - DNA, 1338 bp, Zea Mays
cgctcgctctccaggctccagctagactgtcctgctctgcttcggtgctactcactgtgcagtgtgcacagccagccagcttcagcagagtccggctcggctgtcggctgcgagtcctgctcctgcaggaatggacaggcctgcgcaggcgcccacgcagctgccgccggggttccggttccaccctaccgacgaggagctggtcgtgctgtacctccgccggaaggccctggctcgcccgctgccggccgccgtcatccccgtcgtccacgacgtcgccaggctcgatccgtgggacgtcactggggcgagcgaaggggagggctacttcttcagcctgcggcgagcgccggcgaccggccgcaggaggagggctgggagcgggtactggaaggccacggggaaggagaagccggtgttcctgcagtgcggcggcgagcagaggcagctgctcgtgggcgtcaagacggcgctcgccttccaccgccgtgagccgccgccgccgtcgtcgcggacaggctgggtcatgcatgagtaccggctcgccgtgccccgcggcgtggccgaccagaggaagaagaatgcgagacatttaacatcttgacgaatagaccgattcagaaagcagaaattccccgtcttggggggcaacggtggcagtttggcatcgactattcgactggagtactcgatccgctttgcaacctcgatcgcgatgttttgccgccgtagcttacatttgctccccccacgaatttggagggcaatgttttattcgttttgcacatgtatagtgattcctatatgcgtgccgttgccaatgactgcagggctgcgttgctgagccaggggagtgggtcgtgtgccgggtcttcctgaagaacaggccgaaccgggacgccggcagcaaaactctgcgacacggcgcctccgctcggcggcggcggcggcagcagcagccggaagacgtgagaggacagcagccgttgccattctcggcgccacagccgtcgtcctccagctgtgttaccgacgtcaccgactgcttgtctgacgaagacgaagacgaagccagcagcggcagcacagcccgagctgcccctcaaagagaggcctaaggatatatatactctatatagtactccctgtagcgttttcccctctatcttgccccattgcccgtacttttcctggatcctggcatcatataatcaggtatagggcatgtccagctcaagggtgatccccagatatatttggcagtcctgaatcaggaacaatacggcatctgtgaagcagcatgcatttcgataatcaggtatagggcatgttcagctc

SEQ ID NO: 144039 - DNA, 738 bp, Zea Mays
cgctcgctctccaggctccagctagactgtcctgctctgcttcggtgctactcactgtgcagtgtgcacagccagccagcttcagcagagtccggctcggctgtcggctgcgagtcctgctcctgcaggaatggacaggcctgcgcaggcgcccacgcagctgccgccggggttccggttccaccctaccgacgaggagctggtcgtgctgtacctccgccggaaggccctggctcgcccgctgccggccgccgtcatccccgtcgtccacgacgtcgccaggctcgatccgtgggacgtcactggggcgagcgaaggggagggctacttcttcagcctgcggcgagcgccggcgaccggccgcaggaggagggctgggagcgggtactggaaggccacggggaaggagaagccggtgttcctgcagtgcggcggcgagcagaggcagctgctcgtgggcgtcaagacggcgctcgccttccaccgccgtgagccgccgccgccgtcgtcgcggacaggctgggtcatgcatgagtaccggctcgccgtgccccgcggcgtggccgaccagaggaagaagaatgcgagacatggctgcgttgctgagccaggggagtgggtcgtgtgccgggtcttcctgaagaacaggccgaaccgggacgccggcagcaaaactctgcgacacggcgcctccgctcggcggcggcggcggcagcagcagccggaagacgtgagagg

SEQ ID NO: 144040 - DNA, 1044 bp, Zea Mays
gttccaacacagtgcaaatctgaagggcgtgaagaaactagaatcgcgaaagccaaacatgacaaatcttctctgcaggcaattccgatttgcaaagatacatatatacagtggataatccaaacaacagggggagttaaggggctcttctgttatttttgcttaaaacaccaaacgggaagcaaaccatcagaactgatgcgctctcaggacaactgagtaagaaagcactgcagacgtatatcctaggtggagtggagtgaaagcacatgtgcacagagagcgcccaaaggtcgcttcttcgttggtggtatcaggcaggtttcacaagaagatgcgtcaaagacgtggcgtagcttgctagtgagctccactggttgtgccatgggcactgctaatggagccccagtgagaatctccggtccccatctgcacagcaatgctgtccacggactccgaggtcccgcttctgtgaccccaacttgatcgcctcgaatgcataccagccctcccttccacaagctcaggaagggcatctctgctcagatccggggacgcatgggctatcctgccttctttctcgtccagtagaccccctagaccaacctccaagtccctgatatcagctgctgaccgaggttcatcccatgatactggcttcctactcaattcgaagtccccaacaggtttatccatgtttagactcatgaaaccccttgctggcgcacgcgattgctgtaaaccttgctctactgggaccctggctcggaagttgttcttggaaggagggactgcggtgcagaatatctccatgaagttgttcaagatccctatgttgtacgggttggcccgccgatcatagcgatatctgaagttctcataggttgtctgcgtagtataggaaaagtgattacaaattcctagcaatatgcttacaggtaaaaccaattatattaaaaagttgacagggtgccaacctggttggtgctcatgagatagaaatggaaaacagacagaccacccacaaaccacacacagatgaag

SEQ ID NO: 144041 - DNA, 1133 bp, Zea Mays
gaccattcattcacacaggggatatgattgggccggctcgacttcccgctacatgctcataaaagtgaatagaaagcccgcgcgactccgttccaacacagtgcaaatctgaagggcgtgaagaaactagaatcgcgaaagccaaacatgacaaatcttctctgcaggcaattccgatttgcaaagatacatatatacagtggataatccaaacaacagggggagttaaggggctcttctgttatttttgcttaaaacaccaaacgggaagcaaaccatcagaactgatgcgctctcaggacaactgagtaagaaagcactgcagacgtatatcctaggtggagtggagtgaaagcacatgtgcacagagagcgcccaaaggtcgcttcttcgttggtggtatcaggcaggtttcacaagaagatgcgtcaaagacgtggcgtagcttgctagtgagctccactggttgtgccatgggcactgctaatggagccccagtgagaatctccggtccccatctgcacagcaatgctgtccacggactccgaggtcccgcttctgtgaccccaacttgatcgcctcgaatgcataccagccctcccttccacaagctcaggaagggcatctctgctcagatccggggacgcatgggctatcctgccttctttctcgtccagtagaccccctagaccaacctccaagtccctgatatcagctgctgaccgaggttcatcccatgatactggcttcctactcaattcgaagtccccaacaggtttatccatgtttagactcatgaaaccccttgctggcgcacgcgattgctgtaaaccttgctctactgggaccctggctcggaagttgttcttggaaggagggactgcggtgcagaatatctccatgaagttgttcaagatccctatgttgtacgggttggcccgccgatcatagcgatatctgaagttctcataggttgtctgcgtagtataggaaaagtgattacaaattcctagcaatatgcttacaggtaaaaccaattatattaaaaagttgacagggtgccaacctggttggtgctcatgagatagaaatggaaaacagacagaccacccacaaaccacacacagatgaag

SEQ ID NO: 144042 - DNA, 1062 bp, Zea Mays
atgcataacaataatcaaataagcacgcaactgatccagctagcactagagcaggacatgcatgcatcgcgcgcggttcatcgcaggccatggtcagatggccttgacgccgcccttgcgcggcgaccccatcgcctcctccagcttctgcagctcggccagcaccggggccgcgcacgtgggcagtacggccacggccagctggtgctggtgggcggcgaggggcagctccatctccgcctccagctgctgtgccacggctgcggcggccgtcgtcgtcggcaggacgaccacggacgccggcttgcgcttccggtagcagcagtagagcaccatctggatgcacccgaagaagaagccgcccacgttcgggagcgtgacgtaggggtccttggtgaagaggccgtacaagaaccaggcgacggcgctgagggtgaggaagaaggagagggtgaagggcatgaactcggcactcttcgtcctgatcacaacgaagatgacgctcaggggggcgacgaagacggccatggagaaggcgaggcagacgctgccgagcaccctgacgcggtgcggctccgcgacgagcacgacggtgacgacggcgacgagcgagaaggcggccacgtcgaggaggaggaaggaggcgagcgccctcagcctggcgccccgcggcgcgtagacgaggtagaggaggatgtaggcggcctccaccacgcacccgaaggcgttgatggtcagcagcgggctggagttggtcttcaccagcgcgtacaggatccacagcgtgcagctgaacagagccaccacatacggcaccgagctgaacccctccgtcgacttcttccggtacacgcggaggaacgtcggcctagaatgccaaaaacagaggcccatgggtgctccatggagaagagacctcctgccattgcgacagtaacacgcacaggcaagccgaaaccctatacactggtgtgtctctgttcttctctttcccttgcaggggaaagatcagagaccaactttgctcctacgccactacactcttgcccctgtatgcgatga

SEQ ID NO: 144043 - DNA, 243 bp, Zea Mays
atgtgctgcgtggaggccccgaggcccgggacgttgcaggcggcggaggagctccggacgagcgtggcgcggcacgccgaccggagctcgtggccctcgcggcactcgaagccgtccacggggggcacgtccagcttgtacacgccgtgctggtcggtggtgcgctccgcttccagggacagctcttcggacgacgtcgagttcaccttgaagctgcacttgatcagcaccctggcccctgca

SEQ ID NO: 144044 - DNA, 1567 bp, Zea Mays
atgatgctggtcgcagtactgccgtgggcatcatcacccgtgccgccgatgaagctttgcagcggcaagaggacggcgagcgcgatgccgctggcggccaagaagcgctctgcttcgtcggcacaccacccaggccgcggccgtgccctaacggcagcgacggcaacggcgcccgcctcttgccatgacgacgagcagcggccgcggctgcagaccctggaccttctgcggttcctggaggaggacgggtgggtggaggaccagatgctgtcgctgctcacccccgtggacgaggcatggcagcccgccgatctcctgcccaccttcgctgtcgccgcagaggagcagcgggtccaggtggcggagctccaggcccgcgcggcgggcgtgcccgacgagctcctcgtgtgcctcgtgggcaacatgatcacggaggaagggctgcccacgtacatgaccatggggaaccgggtcggcccggcggaaggcgtcaccgacgccaccggccgcgacggccacggctgggctcgctggctgcgcggctggaccgccgaggagaaccgccacggcgacctgctcaaccgctacctctacctgtgcggccgcgtggacatgcgccaggtggagaggacggtgcaccacctcctccgccgcggcatgagcatgacggagccctcctgcccctaccacgcgtccatctacggcgccttccaggagcgcgccaccttcgtctcccacgcccgcaccgccaggcgcgccgcgctccacggcgacgcctgtctcgccaagctctgcggggtcatcgccggcgacgagaagcgccacgaggtcgcctacaccagggtcgtcgccaggtgcttcgaggccgaccccgacggagtggtgcgggcgctcgcggccgtcatgcgagccaaggtcaccatgcccggcgagcgaatgacggacggccgcgacgacagcctcttcgaccacttctcggcggtggcgcagcgcgccggggtgtacacggcggcggactacggcgacatggtggagcacttcgtgcgcacgtggagggtggcggggctccaggggctgtctggcgaggggcgccgcgcgcaagactacgtgtgcgggctgccgcgcaagatccgcaggatggaggagctggcccacgaccgtgccgcccaaaaagaggcccaatctgtcagcatcagctgggtgttcgacaggcccgtccgtctgcactgaaggaaagttgaaggacatacaccaatcctcaactgaagccccaatcactactactactactggaggcgttggaaatgcaccttactagttaaatgctcctatattctaagttttctatatatatcatataaatatcatataagtaagctttattttaataaaacctaaaatatatgtgttattgttggttagatagatgctaatgtgaagccaacgatcaaagttcaaacccccactttatacacaataaattgtgctttatatagtagagatattgtaaccgagcttggctgatatgcagtgtacaactataaatgtgaacttctccctccgtgac

SEQ ID NO: 144045 - DNA, 939 bp, Zea Mays
tggccccagcagtatttcaacagcaacagcgcccatgttcccttcaatgcttccaatccttggtctccagctccgcctcgcgtcttcctttccgctgcaggaaagtgcaaacccccactcaactaaaaaaagccgcaaggcaaagagaaaaagcaacgcgaagcaaaccaccatttcggcctccccacccccatcccatctcatcccctccgaggctccagggacggcgtgatgaggccagcggcgccggctgcggcggcggacgcgcaccagtcgcggctgctctacgagctctgcgcgctcctgctgaccgtcctcggagcgtcgccggacgacggggcgggggcgcggccgctgctgccgcggcaggtgacacctgccggggtggcgtccatgctgctgggcgcgtccatggcgctgatgctctgcggctcggtcaccttcatgctcggattcttcctcatgccctgggtcgtcgggctcggcttcctcttcctcttcgtcggcttcgtcaccaacctctccgggatctggagggccatcctcctctggccctccgccgcgtgctcgcccaaggaagcatcctccccatggcatatacttcccaagccttcattcatgtcgatgtgaatgaaggcaatcacaaagccgggctcccacggaggtgtatagaaacaggggaattcgagcagactgttttgtctttggcagcctatattttccttcctggacaaccttttcttttttaccatgtaacgccgcagcaagtttggaaatggttttatactgtggggctaggaggatacttgtctgtacatacggaaaagatgatctggtctaaacatcacgtggagcttgtaattgtttcagaaacgttgttccttggcaaagaaaacgagaggtcccgtatcgctgttccaccaaaaaaaaacagaatag

SEQ ID NO: 144046 - DNA, 890 bp, Zea Mays
actcttatacacgtgaccgtctgccaagaagacccagccatatataatctcctatattttccgtgactaatcttccttaattatgtaggggtgacatctgaaatatgtcgaatgatcatcattcatctcatataggcatgaatgatttagtattttgtatctttcaaatgttgatcaaacaattttctcattttgcagacacagcatatgcttgatcagctcactgatcttcagaggagggtatgctcttaacatgataaaatctaaagatttatatctttagatattttttggacgatttttgcttagataagagcataagtactgtttgaactacttaatgatatcactgaaccatgtccaggagcaaatgatgtgtgaagcaaataagtgccttagaagaaagctggaggagaccagcaaccaggtgcatggccaagtgtgggagcacggtgccaacttattactcggctacgagcggcactcttcaccacagcaagccccatcacatgttggcaatggattattctttcatcccctggaagctgcagcagagccaaccctgcagatcgggttcgctcccgagcatatgaataatttcatgccggcatggctaccctgaagatggatctttgaggcaaagggaataaataaagatgcgatgcatgtcagaatcatattgtactgcaagagtgacaattgtgtgttccactcacatatatgacctagttttgtgtgtctatatgtcgaaaccatatgtctgtgattttattatatgtaatgtaagcacagatgaaacatgcagggctagttgcttttgcttgtctatgtatctgtatctggctgtgcgccactggatatgcgtcctagaacaccgcctccaggcttca

SEQ ID NO: 144047 - DNA, 1186 bp, Zea Mays
aacccaatcgtctctccaccacccaactcctcctgcctgtgctctcctcctttttctccactccgcttttgcttggttccatcgggccggagaggagaagctagctaactagcagcagctctgttggtgtgtgtgtgtgtggagggtagctgcagctggggctagctggaaaggtcgggagccatggggaggggccgggtggagctgaagcggatcgagaacaagatcaaccgccaggtcaccttcgccaagcgccgcaacggcctgctcaagaaggcgtacgagctctccgtgctctgcgacgccgaagtcgcgctcatcgtcttctccaaccgcggcaagctatacgagttctgtagcggaccgagcatcacgagaacacttgagaggtacgaaaaaaacagttatgcaggcccagatactgctgtacagaacaaagagaacgagttagtccagaacagccgcaatgagtaccttaaactgaaagcaaaggtggataatttacagaggactcagaggaatttgcttggtgaagatctgggttcacttggtgtcaaagagcttgatcagcttgagaagcaaattgattcatccttaagtcacataagatccacaaggacacagcatatgcttgatcagctcactgatcttcagaggagggagcaaatgatgtgtgaagcaaataagtgccttagaagaaagctggaggagaccagcaaccaggtgcatggccaagtgtgggagcacggtgccaacttattactcggctacgagcggcactcttcaccacagcaagccccatcacatgttggcaatggattattctttcatcccctggaagctgcagcagagccaaccctgcagatcgggttcgctcccgagcatatgaataatttcatgccggcatggctaccctgaagatggatctttgaggcaaagggaataaataaagatgcgatgcatgtcagaatcatattgtactgcaagagtgacaattgtgtgttccactcacatatatgacctagttttgtgtgtctatatgtcgaaaccatatgtctgtgattttattatatgtaatgtaagcacagatgaaacatgcagggctagttgcttttgcttgtctatgtatctgtatctggctgtgcgccactggatatgcgtcctagaacaccgcctccaggcttca

SEQ ID NO: 144048 - DNA, 188 bp, Zea Mays
ttttttttgtatattttgtactgaactacctgtcattttgcagttagtccagaacagccgcaatgagtaccttaaactgaaagcaaaggtggataatttacagaggactcagaggcaagttgagtctactcttgatttctatcttcatgacaaaaagaatttccttctcgtacccaattgaattgacg

SEQ ID NO: 144049 - DNA, 1213 bp, Zea Mays
gtggtagtccgggctcctcctgagagaataatagttctgttttgaatttgaaatttgtttgatcaggtttcacttgctcgcggagtttgacgaggccaagcgcagctgtagaaagaggctcgatgggcacaaccggcgtcgcaggaagccgcagccagataccatgagctctgggagctttatgacgagtcaacaagggacgaggttctcgtcgttcccggttccaaggccggagccgagctggcccggagtcatcaaatccgaggacagcggctcatactacgcgcaccagcgccacccggtcctaagcagcaggccgcacttcgccggcgggggctccacgccgccggcctactcgtccaaggaaggccggcgcttcccgttcctccaggacggctgcgaccagcagcaggtcggcggcttcagcgcgggcgcgggggcgcagcagctcgaggtctcttccacgtccacggtgtgccagcccctcctcaaggccgccgccgccgccgccccaccgccgccgccagagagcagcagcagcaacaagatgttctccgacgggctcgcccccgccgtgctcgactcggattgtgctctctctcttctgtcatcccccgccaactcctccagcgtcgacgtgggccggatggtcgtccaccagcccgcggagcacatccccatggcgcagcccctcgtccccggcggcctccagcagcagcagcagcaccacccgttcggcggctcccccgcctggttcgcctgctcccaggccggctccagcgccgtctccgccggcggtttcgcctgccccccgggcgtggagagcgagcagctcaacaccgtgctggtgccgagctccgacggtggcggccacgacatgaacatgaactaccacggcatattccacgtcggcggcgacggctcctccgacgggacgtccccttcgctcccgttctcgtggcagtagctagctttccaattcaagcgtccagcagtctatcgtttcagctgtactagtggtcgttttatttatttattcgctgctccctcgctccgttttaacttgtcctgtcgtttgctcgtttcttcgttttgcatgcctgatgcatatgcggcctggaaaaaaaactcgcataaaattactgagaccgtccgtgtgtctggttctggaagcgtacctgtctccatcaaccgaatcgagacaagtttgctg

SEQ ID NO: 144050 - DNA, 987 bp, Zea Mays
gtctgaaagctgagctgagctctagctgatagaggtagccctccacaccacaccactcgcaatccacacaactacactgatacacctgcgctgcacttgcctctgcgagcacgtactggctgtggctgtgcctggcctcctcttcctcggtggtggtggtggtggtggtgcactggtgctggtcttgcgcctgcttgttcggttgttcctcacttccacttccacggctcccctcccaccaagcagactgcagtagcacatccccctccgcgcaccactcgcttcgacaccaccgggcaccgcccggcatctagctctagcggcagctcatctccctccctctggctggctgtttgtttctctctctctctcctccccatcaggataagctcagcagccccccctgctgatctgcggcatttgccctgttcccgtgctcgatttgttcgcttctgtgcgcgcgcggtggtgcccaggcaataactcccctcggtgtctggctggctcgttgccaccctccccgcggcagagcggcctataggatgagagggacaggggaacccaacaaaccggccgcggcactgtcctggccgtgaaagacacgcacacagagctccagctcggccacgggcacgggcacgggcacgggcacgcggcgcctagctctgcactggccgacggggaaacggtcgagcttgctatccatcgcccgcgccgttcccattcatggattgggatctcaagatgccggtttcctgggacctgcccgacctggagcacgacgccgtgccgccgcccatcgccgccgccgcctccgccgcgccttcccccgcggcggcgtcgggcattgccgccgcagctgctgggcctccccccgcggcggcaccgcgcggggcgccgagccgggcggagtgctccgtggacctcaagctcggcgggctcggcgagttcggggctgcggacgggacgaaggagccggtagtggca

SEQ ID NO: 144051 - DNA, 211 bp, Zea Mays
tttgagttcatgtgacttattttagaaacttgagctcacaaactttctcttatttggtctctgtatggtggaattatgtcattttataatctctgttcgttcagtcagtctttgtgaactctcttctaatcgctcacttcattggccgtgttgtaccatgatatattgcatggagtaaacaataacatcagttagtcaaataaaaaaaata

SEQ ID NO: 144052 - DNA, 1720 bp, Zea Mays
ttgcttatgctttgcgtcggatactcggattccagctggatcggcgtgcgccaagcgttccgcgaatcggccattggctcgtcctgcccacgaccccggagcccaaacgttcagagttcagacgcacaaacgccgggagccaccgcaatgcccgccacacgtcggccgccgccgagttggagtactgcgagttgtgccgccatcaccacgaccatggtcggcgccatcgctacatcatgaagcacatgtgaaatctcaacgacgcgctcacctccttctgctccaatctctccgacctccgctgtgccttcctccatggctccccctcttcccagccgccgcgggcccgtcattggtgtcccttctgctccactgacatcgtcgacctcgacagccgctccgctggtaacaatgccatttaccatatggcaagcagtcagcacctgaagggtgtgaataatttcctgcagaagcatgggggaaggatgaggtggacttgcttaggatttcagaggaagtgcttgccaagtgggagaaaggctttggatccttgagcacacgagcgaagacaatgtggcatatgaccctattagtacagcgtgtcatcgagcttccagttctggaagtgccccttattcttctccatatggagcttgtggtctgcccatcacacattggggatcggccgaaacacataagcagcagggtatgctgtctgcaaactggtttcacagcagcggtcctgcaactaaaggtcatcaatctaccgtccttgtaaatgacacaaggcaattgatttcttgtactgatcatgctcaagcaaatgtacatacgggtgctcctcctcggttaaaagctaacggacatgatctaaagaatttgtcactcagaagctgtggtcttccttctcggaaaggaaatttgaggaaactcaatccaaagagggttggtgctgcatgggcagaaaaaagaagagctgagcttgaaatggagaaggaaggtgaaattgttccaataacatctgattctagttggctacctaattttggtagtgtctggcaatcaggcacaaggaaggaatcaaggaaagaattcgagaaaaaccacaagtttcatgacacgaagagcaacatgacttatccttggagataaaaccatatatcagcaaacggatgcgcatagccacctaccacagtaaacagatgtacaacacttcgccagatgttggtatggatcttattacactcgccactcggtaaaagaaaggttcaggtttagcaattaccagccacttttaaggcttgcatattaattaatcgcaagatagagatctatatatgcgaacgtttgtcagtaataggcgaaccacagctacagcaatttctgattacacacttcaatgtccccagcaatgaatatgatacgggtgacgggggttggggcaatagtagtagtactacctgggctagctcgcaggactcctggagtaattgcgccccttggatctgtttatttgttgaatcgccatgcagggcagatgttccaaactttctactcactgtttggcacctgcagatggatgctggcccagggggcggcttgattggcgattggttccctgccaactcgtctaggaggcccggttataggccgcttgtaccgaatttaaagccaatctttgacagctacgcagtcaatatttttttgttctggtcacgaa

SEQ ID NO: 144053 - DNA, 708 bp, Zea Mays
atggacgccgtaagtcctaacccaagtgcacatgctgcagaaaatactgagggaggtgaagataagaaagaggagccccctgctgtagagaatactgaagaaagcaccaaaggccaagcacagcttaataatgttgctgtcccagaatctgagaataaaggagaagtaaagccaggtgaatccgaattagcttcccctgcatttgttgatgaagcagcctcccatgtaattgttgatgaagagaaagaggaaaatactgagaatgagaacattggcgacgctcgcggtcaccatcccacccatctcgccgaaggcgttcccgtaccagctggtgccccctgcgccgccagccaccgctcacgcttccagcggcaccttcccccaccaaggcaagcgtggctgcccgtccaccgcaaggcggcgcccaagccggctgcgtcgtgtgcggctggcttccagagtgcaacccacgccacaccaaaattcactcgtgcctcccaatccacaaaccctaaagcccagatggacagatcgaagcacgagatcgggttcagggactcacaggtcgcagatcttagagtggtcgcgcgtgaggatgctgtatccgacagagaggcgggtgtccgccgcgacgacacagtaatcggcgccggcgatggccacgcaggtcctgcaggaccaaacagaccctcgttagagaacacatag

SEQ ID NO: 144054 - DNA, 109 bp, Zea Mays
cgtttgggactttttttttttgcttttttcaccggttcaatgcagcacgcatgcagtgggaagatgaagcgtctctcggtaattagtcatgtctcggagaatatatgga

SEQ ID NO: 144055 - DNA, 1563 bp, Zea Mays
agagatttccttgttccttccttttccccaccgccagcacgtcgtccagcacgtcctcgttcctatcgccccgtgcgcccggtccaccgcccgccaccgtccctggcccctttttcatatccactgtgcagtgcccggctgcccgccgcgccaaccccaccccgctccgcccgtgtaaaccaaaccccgcttcggcggcggcggcgactggcccacgagccttctcgaaccgacgcatccgccacccatgctgcgctgccacacgccaccgcaatgcgcccgcgcgccgctccgccaccacggaaggtgggagtcgcctccggcggcggcgcccgcggtggtagtgcggtgcgcgcggggtgcgccgcaggtgtccgggatcgaggcggcttcgccgggccacgcggctgtcacggcggcgttagctaaggcggaagggggtgacgcgcggcccagcctggccgagcggctgcggttggggaacctcctggaggacgggctatcgtacaaggagagtttcatcgtgcgctgctacgaggtggggatcaacaagacggccaccgttgagaccatcgccaatctcctccaggaggtaggatgtaaccatgcacaaagtgttgggttctccactgatggcttcgccacgaccactacaatgagaaaacttggacttatttgggtgacgaacagaatgcacattgagatctacaagtacccagcttggggtgatgttgttgagatcgaaacatggtgccaagaagatggaagaattggtacccgtcgtgattggatcctcaaggacctagctaatggtgaagttattggcagagctaccagcaagtgggtcatgatgaaccaaaatacacggagacttcagcgggtcagtgatgacgtgagggatgaggtgtttatgcactgtccaaaggctccaagcattcccagaggaaaataatggcagtttgaagaagattccgaatctttcagaccctgcagaatattcaagacttggactagtgccaagaagagctgacctggacatgaaccaacatgtcaataatgttacttacataggttgggtcctcgaaagtatacctcaagatataattgatacacacgagttacaaacaatcactctcgactacagaagggagtgtcaacaggatgatatagttgattctcttacttgcatagaggaaggagaggagaaaagcatgaacggctctgcttctgcagcagcgcctcacaaagaagagcggcagcagttcctgcattgcttgagatttgcagccaacggacacgagatcaaccgtggccgtaccgtgtggaggaagctagctagataaaagtgttctttcgtcataaatgatctcctccatttctctgctcacggctggcggcccttgtaccacaattttgtgatgtattgttgccctttggaatgtactcagccatgtatcggtgccgatttgtgacatttcttggagctgtagctgtctgtccgttttgtaccagtggacaatgtttgtgacatgcaataaactgcgtttctccggcaactctcaa

SEQ ID NO: 144056 - DNA, 1671 bp, Zea Mays
cactcgcaccgcacaccgcacaccgcacgcgaaatccagtcggcgcgacgacatcaccaccgccgtagagttgtggaccaccaccggcgcatgcacagggtccagagatttccttgttccttccttttccccaccgccagcacgtcgtccagcacgtcctcgttcctatcgccccgtgcgcccggtccaccgcccgccaccgtccctggcccctttttcatatccactgtgcagtgcccggctgcccgccgcgccaaccccaccccgctccgcccgtgtaaaccaaaccccgcttcggcggcggcggcgactggcccacgagccttctcgaaccgacgcatccgccacccatgctgcgctgccacacgccaccgcaatgcgcccgcgcgccgctccgccaccacggaaggtgggagtcgcctccggcggcggcgcccgcggtggtagtgcggtgcgcgcggggtgcgccgcaggtgtccgggatcgaggcggcttcgccgggccacgcggctgtcacggcggcgttagctaaggcggaagggggtgacgcgcggcccagcctggccgagcggctgcggttggggaacctcctggaggacgggctatcgtacaaggagagtttcatcgtgcgctgctacgaggtggggatcaacaagacggccaccgttgagaccatcgccaatctcctccaggaggtaggatgtaaccatgcacaaagtgttgggttctccactgatggcttcgccacgaccactacaatgagaaaacttggacttatttgggtgacgaacagaatgcacattgagatctacaagtacccagcttggggtgatgttgttgagatcgaaacatggtgccaagaagatggaagaattggtacccgtcgtgattggatcctcaaggacctagctaatggtgaagttattggcagagctaccagcaagtgggtcatgatgaaccaaaatacacggagacttcagcgggtcagtgatgacgtgagggatgaggtgtttatgcactgtccaaaggctccaagattagcattcccagaggaaaataatggcagtttgaagaagattccgaatctttcagaccctgcagaatattcaagacttggactagtgccaagaagagctgacctggacatgaaccaacatgtcaataatgttacttacataggttgggtcctcgaaagtatacctcaagatataattgatacacacgagttacaaacaatcactctcgactacagaagggagtgtcaacaggatgatatagttgattctcttacttgcatagaggaaggagaggagaaaagcatgaacggctctgcttctgcagcagcgcctcacaaagaagagcggcagcagttcctgcattgcttgagatttgcagccaacggacacgagatcaaccgtggccgtaccgtgtggaggaagctagctagataaaagtgttctttcgtcataaatgatctcctccatttctctgctcacggctggcggcccttgtaccacaattttgtgatgtattgttgccctttggaatgtactcagccatgtatcggtgccgatttgtgacatttcttggagctgtagctgtctgtccgttttgtaccagtggacaatgtttgtgacatgcaataaactgcgtttctccggcaactctcaa

SEQ ID NO: 144057 - DNA, 1845 bp, Zea Mays
agagatttccttgttccttccttttccccaccgccagcacgtcgtccagcacgtcctcgttcctatcgccccgtgcgcccggtccaccgcccgccaccgtccctggcccctttttcatatccactgtgcagtgcccggctgcccgccgcgccaaccccaccccgctccgcccgtgtaaaccaaaccccgcttcggcggcggcggcgactggcccacgagccttctcgaaccgacgcatccgccacccatgctgcgctgccacacgccaccgcaatgcgcccgcgcgccgctccgccaccacggaaggtgggagtcgcctccggcggcggcgcccgcggtggtagtgcggtgcgcgcggggtgcgccgcaggtgtccgggatcgaggcggcttcgccgggccacgcggctgtcacggcggcgttagctaaggcggaagggggtgacgcgcggcccagcctggccgagcggctgcggttggggaacctcctggaggacgggctatcgtacaaggagagtttcatcgtgcgctgctacgaggtggggatcaacaagacggccaccgttgagaccatcgccaatctcctccaggaggtaggatgtaaccatgcacaaagtgttgggttctccactgatggcttcgccacgaccactacaatgagaaaacttggacttatttgggtgacgaacagaatgcacattgagatctacaagtacccagcttggggtgatgttgttgagatcgaaacatggtgccaagaagatggaagaattggtacccgtcgtgattggatcctcaaggacctagctaatggtgaagttattggcagagctaccagcaagtgggtcatgatgaaccaaaatacacggagacttcagcgggtcagtgatgacgtgagggatgaggtgtttatgcactgtccaaaggctccaagattagcattcccagaggaaaataatggcagtttgaagaagattccgaatctttcagaccctgcagaatattcaagacttggactagtggtcagttgtccacttcgtgtataatccagttcttaggcaccacgcaccaatactactatttgagtgttgacatacattgattttcaaattgcagccaagaagagctgacctggacatgaaccaacatgtcaataatgttacttacataggttgggtcctcgaagtatgttccactagacttttcttattcctgatcccacttttaagctttggtttatgtggagatatctaatctgagtagagtttgcaacgacttgttccgtaccatttctgttttacctgtagatgtaaattagcatctttgttgattgcaatggtttataatagttcttttcctaccttacaaattgcagagtatacctcaagatataattgatacacacgagttacaaacaatcactctcgactacagaagggagtgtcaacaggatgatatagttgattctcttacttgcatagaggaaggagaggagaaaagcatgaacggctctgcttctgcagcagcgcctcacaaagaagagcggcagcagttcctgcattgcttgagatttgcagccaacggacacgagatcaaccgtggccgtaccgtgtggaggaagctagctagataaaagtgttctttcgtcataaatgatctcctccatttctctgctcacggctggcggcccttgtaccacaattttgtgatgtattgttgccctttggaatgtactcagccatgtatcggtgccgatttgtgacatttcttggagctgtagctgtctgtccgttttgtaccagtggacaatgtttgtgacatgcaataaactgcgtttctccggcaa

SEQ ID NO: 144058 - DNA, 763 bp, Zea Mays
ttcttgccttcttggcttcttgtatgcatgtgcccgtccaggtccaggcatccaggctcagcgtctagggaccagccccagccctggcggccggcgtggcggcacacagtgcccggcgcctccgtccacttcccggcccggcgcgacgttggccccggcgcctcgctcatccgctttcgtcttccggtgcagcacaggcgagtagcgcttgcgacgacccggcccgtcggtctccgctcccttccatcaaggcaagcagtcaggaagacatctgaccgggtcagacgatacagcccatatacgtacgtcgagtcctcaaagttcgattctacgaccatcgcacccatcttggcccaaagtacttccgcgccgcgctacgaacgaggccatccgccgccacacgccgtaggccatgccgctgaggtcggagaccggcactgctggggagggcgatgaggagcagcggttgcgggctgctctgcgtcacctgcaggcggaggcgggggtgctggagcgcctggtgtacaagcaccggaaccagcaccgtggcgccgcctatttccaatacctcctcaaggtgaggagggacctcaagcttctgctcggcgccggcctcgcggaggtcctcaacgccgtgttcccagttctcgcatgccgcaagccggccaacacgatcctcgtccccaacaagcagactaagaagaaacctggtgcaaaccacagccatcaccagaggcttttgggtgtagcccgcttgttatcc

SEQ ID NO: 144059 - DNA, 1080 bp, Zea Mays
atggtgcggcccattctacagcccatcctacggcgcctgccttctacaccccacgctacggcgcctgccgcctccactccagcgacggcgcgagcaggatgcccacgacctcgacctcctcctcacaaccacgaccacggcctcaaccgctccgccagctccgccatttacgcacacgacttcaacctcgtcaggctcaggctccgcgacggccgccacctcgcctactgcgagagcggcgtgccccgggaccaagccaggttttcagttaagtgcagaaactacacttattttttcgatcaaacaagcatttgtaagctaccagctcctggcttcagcttcaaccatgcacaaatctctgtccacaaaattcgactacttggttgggccaacaattactggagataccacggagccgtcaccgccgtgaaggaccagtggcagtgcggcagctgctgggccttctcggcagtgggcgcggactcaggtgggagacttcaaaagcatgtactgctgaagcgtgacaatggagatgtcgatctattgaaacaagtggatgctcagccggtgaatgtgaaggatgtggatagaatgcgtagggagatgcaggctattgaagatgacattgccaacaccgagaaggggaaagcagcactggaggataagttctgggaagttgaagctaagctggttaccaagcttgaggagcttgagaggcatgctcatcagttcaaccaggccctcaaacagttgaaacctactgttgcttttcagtacatgatagattcaaaaggatcttctcctgctgagatgctaggtactggttccaaaacagtactaaaacctgcacttctggctcatgctgaggagaacaaaaggatctgtctctcaaatcttgaaaacttaaatgatctacagaagcagctgcaaggaaacgcgaagctatgttgtgcagtagtgggaacttttttaggttctggaaggtcaggggatggacttccacgaactgatcgagatctcacacggcgaccgacggcggtaaatgaatattcttgtggtgtagacacactcaacatttga

SEQ ID NO: 144060 - DNA, 1011 bp, Zea Mays
agagaaagatgagtttgtcaaatagaattcttatgttactgtatgctcatcgaccatatgagtgcaacagtacttacaggattacagtaaaaagtaatattgagtgcatctcaagtctcaacaaatgaagtttttacataacatgcatgttatatcctgtctttagcttgtctgccaagatgtgatctttgtgaccttaaactgttgttatttcagagttgtagctacagcaatagcttacttcaggcgtgtgtatacaaggaagagcatgtcagactatgatcctcgtttggttgcacctacttgtttgtatttggcatctaaggttccgatgataagtatcggtttgaaattaaggatattcttgaaatggaaatgaagctcctggaagctctcgactattatttggttgttttccatccatatcgtcctctcttacagttgttgcaggatgctggcataacagacctgacacaatttgcctggggccttgttaatgatacatacaagatggaccttatcctcatataccctccctacatgattgcactggcctgcatatacatagcgagtgttttgaaagataaggacaccacagcatggtttgaagagctccgtgttgacatgaacatagttaagaatatctctatggaaatattagacttctatgacacctacaagattgatcctcaaaggggcatccctgaggataagataagccccgtgatgaacaagttgccggcaaaggcttaactcagatttggcgagcttaggagttgtaaactagtagtaaactacatcatacttccaccatgtgtgtactcagcctgcactgtcgcttgagacgtgttgatgaactacttgatagattcgatgcaaaaaccccatggaattgtttgtgtatgctgctggagtttattcaagttagtagcatctgcatctattaactatttattacgattgttattccagggttcttgacattaatatgaaaggtgctactttgtttta

SEQ ID NO: 144061 - DNA, 1933 bp, Zea Mays
tcgaattccccgaggcggcccataatgctggctgggtcgtcctgaccaattgatggttctgcttctgctttaccactcaatcttgttgagagtcgccggcgccggcgattcctcctccaccgattcgcccggcgggagtctccgcagggctcaccgggaccgcgggtccacgatggccgccaacttctggacgtcgtcgcactgcaagcagctgctggaccccgaggacgtggacctggtgccggcggcggaccgggagcgaggcatcacgccggaagagttccgcctcatcaagatccatatgtcgttccgtgagctcctatcctcgctagtcttttcctgacaccttgcattatcatttcccgatgtgaatcagctttagattctacactgcttctgtattgtgcactaaaaaagatcataccaaactctgagctgttagatgttggaactgctaatcttttatgatattagacgcatcaaatgcagactgatctgatgttcaaacgattgctggttttccacgactgtgacaagtaacttgtgtatatgtagttagacccacgagcatcctgctatgtgcctttatatcatgggtttttatgtgacgctaagatcaaacgtctgcctgccatttcagttgagaaagaaagaaaaatacgatgtttttcttgttttcaccctactgatttcaaacaaacaagttcatagtccttggttgtgttattgtgcctttttgcaatccttgcttttattaattcagtgcagtcttaattcatagtattagtgtatcgctaaattagactccatgtttttaaggaaaccaaacacatagttcattttcatacatttacatccatcacagtatctcacattttcacattattgatgtccattttgcattaggacacctggtgtatttttgaatgccttatcaatacaagcatttgatgatttcagatatctggaggctagcacagcaggttaaagttaggcaaagagttgtagctacagcaatagcttacttcaggcgtgtgtatacaaggaagagcatgtcagactatgatcctcgtttggttgcacctacttgtttgtatttggcatctaaggtggaggagagtacagtgcaagcccgacttcttgtattttatataaaaaagatgtgtggttccgatgataagtatcggtttgaaattaaggatattcttgaaatggaaatgaagctcctggaagctctcgactattatttggttgttttccatccatatcgtcctctcttacagttgttgcaggatgctggcataacagacctgacacaatttgcctggggccttgttaatgatacatacaagatggaccttatcctcatataccctccctacatgattgcactggcctgcatatacatagcgagtgttttgaaagataaggacaccacagcatggtttgaagagctccgtgttgacatgaacatagtaagcagttctattattggtttcccggctatttattctgtattgttttcttcacccaactctgtgacttgcaattcccaggttaagaatatctctatggaaatattagacttctatgacacctacaagattgatcctcaaaggggcatccctgaggataagataagccccgtgatgaacaagttgccggcaaaggcttaactcagatttggcgagcttaggagttgtaaactagtagtaaactacatcatacttccaccatgtgtgtactcagcctgcactgtcgcttgagacgtgttgatgaactacttgatagattcgatgcaaaaaccccatggaattgtttgtgtatgctgctggagtttattcaagttagtagcatctgcatctattaactatttattacgattgttattccagggttcttgacattaatatgaaaggtgctactttgtttt

SEQ ID NO: 144062 - DNA, 1203 bp, Zea Mays
tcgaattccccgaggcggcccataatgctggctgggtcgtcctgaccaattgatggttctgcttctgctttaccactcaatcttgttgagagtcgccggcgccggcgattcctcctccaccgattcgcccggcgggagtctccgcagggctcaccgggaccgcgggtccacgatggccgccaacttctggacgtcgtcgcactgcaagcagctgctggaccccgaggacgtggacctggtgccggcggcggaccgggagcgaggcatcacgccggaagagttccgcctcatcaagatccatatgtcgttccatatctggaggctagcacagcaggttaaagttaggcaaagagttgtagctacagcaatagcttacttcaggcgtgtgtatacaaggaagagcatgtcagactatgatcctcgtttggttgcacctacttgtttgtatttggcatctaaggtggaggagagtacagtgcaagcccgacttcttgtattttatataaaaaagatgtgtggttccgatgataagtatcggtttgaaattaaggatattcttgaaatggaaatgaagctcctggaagctctcgactattatttggttgttttccatccatatcgtcctctcttacagttgttgcaggatgctggcataacagacctgacacaatttgcctggggccttgttaatgatacatacaagatggaccttatcctcatataccctccctacatgattgcactggcctgcatatacatagcgagtgttttgaaagataaggacaccacagcatggtttgaagagctccgtgttgacatgaacatagttaagaatatctctatggaaatattagacttctatgacacctacaagattgatcctcaaaggggcatccctgaggataagataagccccgtgatgaacaagttgccggcaaaggcttaactcagatttggcgagcttaggagttgtaaactagtagtaaactacatcatacttccaccatgtgtgtactcagcctgcactgtcgcttgagacgtgttgatgaactacttgatagattcgatgcaaaaaccccatggaattgtttgtgtatgctgctggagtttattcaagttagtagcatctgcatctattaactatttattacgattgttattccagggttcttgacattaatatgaaaggtgctactttgtttt

SEQ ID NO: 144063 - DNA, 1284 bp, Zea Mays
tcgaattccccgaggcggcccataatgctggctgggtcgtcctgaccaattgatggttctgcttctgctttaccactcaatcttgttgagagtcgccggcgccggcgattcctcctccaccgattcgcccggcgggagtctccgcagggctcaccgggaccgcgggtccacgatggccgccaacttctggacgtcgtcgcactgcaagcagctgctggaccccgaggacgtggacctggtgccggcggcggaccgggagcgaggcatcacgccggaagagttccgcctcatcaagatccatatgtcgttccatatctggaggctagcacagcaggttaaagttaggcaaagagttgtagctacagcaatagcttacttcaggcgtgtgtatacaaggaagagcatgtcagactatgatcctcgtttggttgcacctacttgtttgtatttggcatctaaggtggaggagagtacagtgcaagcccgacttcttgtattttatataaaaaagatgtgtggttccgatgataagtatcggtttgaaattaaggatattcttgaaatggaaatgaagctcctggaagctctcgactattatttggttgttttccatccatatcgtcctctcttacagttgttgcaggatgctggcataacagacctgacacaatttgcctggggccttgttaatgatacatacaagatggaccttatcctcatataccctccctacatgattgcactggcctgcatatacatagcgagtgttttgaaagataaggacaccacagcatggtttgaagagctccgtgttgacatgaacatagtaagcagttctattattggtttcccggctatttattctgtattgttttcttcacccaactctgtgacttgcaattcccaggttaagaatatctctatggaaatattagacttctatgacacctacaagattgatcctcaaaggggcatccctgaggataagataagccccgtgatgaacaagttgccggcaaaggcttaactcagatttggcgagcttaggagttgtaaactagtagtaaactacatcatacttccaccatgtgtgtactcagcctgcactgtcgcttgagacgtgttgatgaactacttgatagattcgatgcaaaaaccccatggaattgtttgtgtatgctgctggagtttattcaagttagtagcatctgcatctattaactatttattacgattgttattccagggttcttgacattaatatgaaaggtgctactttgtttt

SEQ ID NO: 144064 - DNA, 949 bp, Zea Mays
tcgaattccccgaggcggcccataatgctggctgggtcgtcctgaccaattgatggttctgcttctgctttaccactcaatcttgttgagagtcgccggcgccggcgattcctcctccaccgattcgcccggcgggagtctccgcagggctcaccgggaccgcgggtccacgatggccgccaacttctggacgtcgtcgcactgcaagcagctgctggaccccgaggacgtggacctggtgccggcggcggaccgggagcgaggcatcacgccggaagagttccgcctcatcaagatccatatgtcgttccatatctggaggctagcacagcaggttaaagttaggcaaaggttaggccttgtttgcataacctgatttatttgcttcttttgtgatgctaaaaggaacgtgtttgctatcttgattacttactatattttgcacttcgcatgtttccttctacatcttgtaacttatatagatggtaaaagaattagagatcacatcatataggttgttggtttattaactgaaaatcagcacacagagatatttagttggtgtttggcgagtggaaaatgatgactgtggatgggatatgaggaatcggttatatctaaaccccaaatttgcatagcgtgaaagggatgtgctgtagaatcgtgaatgggaaatgaggagcttttatccaccgatctaaagaggcgagggaggtgggttttgggtggggcccttttaatcttatacagtagattcacaattctatttgcttggctactggggacacaacttactggttggatctatgttcacttgttttgtcacttcttttttgtatgcttctttggagcaattatttgcagttccaggttgaagaacgcttcagagatgtcatgaagagaatcttcagatttcgcaacaagatttgttttgctgtggtcatactta

SEQ ID NO: 144065 - DNA, 122 bp, Zea Mays
ttcttctttatattaataaatatctaccacagcaggggcttcccctgttgtacattttcaaaaaaaaattaggaactcttgatccagttctttttttacccataagagttatgatcatgtcc

SEQ ID NO: 144066 - DNA, 1016 bp, Zea Mays
atctcctccttcttggggatcaggaccagcggcaccagcctcttcctggagaaggtgaccttctgaaggaacgacttggccgcggcggcgacccccggggtgacgtcgacgaccgtggccctgtcggccagaaccggcgcgaacaccgaccagggggtgccagtcgcgcagtgcgccaccgcgtcgtacctggtgcccgacgggctcagcagcctggcgccctcgggggtcttgtagtccagcacctcgtcggcgcccaggcccgcgacgaggcccaggttgcgcgcgccgcaggtggccgtgacgcggagccccgccagcttggccagctgtacggcgtagtggcccacgccgccggaggccgcggtgaccagcacgttcttggggccgtcactgtcggcgccagagccggagccggagccggagccgccgtcgaagctgcttacccccgcggccttgagctgctgcagcgcggtggacgcggccgtgggcagagacgcgccttccgccgcggacacctccggcggccgtgccactgtgagcgacgccggcgccaccgcgtactcggctagcccgcctccattcttcctccagagatggtaggtaagtttgtcgctgctggatcgatgggtaacgcaatagtaaatggaattcgaagtgaggataatatattaccgggaaactgatggagatgaccttgtcacctggcttgaagtcggtcacaccgctgcctagctctaccacttcgccagacatgtctccaactgttttttttttggcacagaaacaagatggagttctcgcattattacatggtaaggtgcaatatattttaagtcttgaacatcgtccacggaccacggttggtatgatcaacacgttgttctagtgcagtttgtatccatgatgaaggcaagggttccgaattagagtatatacagcaggatcaaaattagagtatatacagcaggatcagaaacactaagtgagctgaagcaaaacaaacaaacaaaaaa

SEQ ID NO: 144067 - DNA, 859 bp, Zea Mays
aaggagccacttgtagagctttcaagccccccaagttagcccagctgtccaactcagagaagtaatgcaggcaccagaacatgacctcccactcattctctcgctctcatgttctctctctgcttcatcactctccctgtatatactctctcgaccaacataagcatggttttgttcttcactgtggttttcaatttgatacaatgagtagatttagtccccgccaaggcattaagggagggttggggaaagtcttcaccgaatatctttgctacagccatctcattcaggatttcaggaggtctccatttagctctttatccaagtcattaagaataagaaccacaaccttcatttgaggatttctgtgttatttgagtttgcttctgtctaagactctttgttggattttagcaacgacaaatgctctgtacactgtacaaggcacttcagtggcaagctggcagctgtgcatggtaatatcatattgcaaggactggagttgagacatgtattcttccactgtccctattttttcttctcctgatctccgactccgagattcctctcgattctacatggctttgtgctttgagggacgggaaggtagaggctaatcctcaaataggatgttttgaggaaattgaaaggatcgctgagggacgggaaggtagagggaatcggctgctcttgggagatgtgaggagctctgatgtgtctcggagaggatctataatgcctggttctttgattgataagacggatgtatcggatactgatatcagacagggcatgccttcgaacatgcttacaagtacgtactgtgaacgtaaacaattgtgtcagtcagtactcagta

SEQ ID NO: 144068 - DNA, 2115 bp, Zea Mays
ctcagctagcctgcttgcttcgagcctagctgtctccgtccgtctagctccagctctccctcgaggcccggaacgcgaggacgacgaagagcagagccccaggcagccacaatgccgtcgtcggggatcaccgcggtggacgcggccgccaaggggatgaagctggagcggtacgccagcgggggcgcgctgctgctgcgccgggcgaccagcgccaagctcgtgtccgcgtcgtcgcacctgctcttccgcgccaccgtgctggccacgctcgcgctcgtcttcctcttcacgctgcactacccgtccctcctctcgcgctccttccacctctccgccggcggcggcggcggcgccgacgacggcgcgcgctcctccgcctcgcaccgcagcctgctcatgtcctcggcgtcgtacgggggcgccgcgtgggagaaggaggtgcggcggagcgccaggccgagccgggacgggggcatctccgtgctggtcaccggcgccgcgggcttcgtgggcacgcactgctcgctcgcgctgagggcccgcggcgacggcgtcctgggcctcgacaacttcaactcctactacgacccgtcgctgaagcgcgcgcgccaggcgctgctggccagccgcggcgtcctggtgctcgacgccgacatcaacgacgccccgctgctggagaggctcttcgacgtggcggcgttcacgcacgtgctgcacctggccgcgcaggccggggtgcggtacgccatggaggcgccgcagacgtacgtggcgtccaacgtggccgggctcgtcagcgtcttggaggtggcggccaagcacgccgacccgcagccggcggtcgtctgggcctcgtcctcgtccgtgtacgggctcaacaccgacgcgcccttctccgaggaccaccgcaccgaccgcccggcgtcgctgtacgcggccaccaagaaggccggcgaggccatcgcgcacgcctacaaccacatctacgggctctccatcaccggcctccgcttcttcaccgtgtacgggccgtggggccgccccgacatggcctacttcttcttcgcccgcagcatcgtggccggcgagcccgtcacgctgttccgcgccgccgacggctccgacgcgcgccgcgacttcacctacatcgacgacgtcgtcaagggctgcctcggcgcgctcgacaccgccggcaagagcaccggctccaggtccggcagaaaaagcgggccagcgccgctccgcgtctacaacctcggcaacacctcccccgtgcccgtcacccggatggtggccatcctcgagaagctgctgggcaggaaggccaacaagcgcgtcgtcaccatgcccagcaacggcgacgtgcctttcacccacgccaacgtcagccacgccgcgcacgacttcggctaccgccctaccacctccctcgaggccggcctccgccacttcgtcgactggttcgtcagctactataagctcgacgccaagatcgccaagcccgccgccgccgacgacgacaagcccgcgaagaagaagaagaagaacaaagccatgtcggcgtcgtcgtgatcgtacgttcatcgatcaagcacacacgggcacacagaaacagagcaccgccaccgccaagcacagtcaccaagtgtgtattctctagctagttctcggaggcctttttcttttctttttgtctgtaaccatgtattgttcaagccctcgctacatacttgctcctcctccttatgctgatagtgcttagtaggaaggaataatgatgcaaataactgttgcattcatattggtacgtagatatataaaaaaaagatcaaacagaggaggagtgaggacagattgaagaaagatcaagtcactggctccccccctctagctccctaccctaccagtcaaattgttctcttgttctgttcttgtttcaccatctcgtgatctgaaaaaccatgtacgtcaagattctatgccggaacgggtggacgccaaaagcaaaaccgtgcaccgcggctacgatactttcagctctactcgtacgctgcgtttctggatccggaacccttcccccatccagagccagtatccgaacagactcgcacg

SEQ ID NO: 144069 - DNA, 1509 bp, Zea Mays
atgctgtcttctcgcccgctctgcaccccttcaaggcgaccccgacgagctagggaacctgcaggatccatgacttgggtctttgatagtctgctctgcgaggttgttgaagtagcacgtcgctccagtcttctcgaactgctgccagtacgaattgaaagcatagctggcgtgcgccgccgttgtgttgggcgtgtagcacgttttcccgggctgaatggcgtcgcaggtcccgtttccctgcccgcacgcgtacgacagcgcgttccccaccgccgtctcgttcagcttgttgctggcggcggccgagagcacgcaccatatcggtcctttgtacggtgtgttgttctccggcgccggcaggggcgggtacgaccccagtggccgccgtccggtgaggtcgatctcgtagactgccgtgccgttggcgtagtacagtccccagtgtcgctcggtgcccggccctggcttgaggtcctcgttgtagagcgagaacacgaacaccggcatcttcgcgcccggcctcaccggcgtgcccgggttcttagccatccgcgccgcgaggttcctgttgtagatggcggcgttgtggacgttgccgccaatctggttgtagtcgcagccgttgggccacccggtctccgcgatggccagcttcacgtgcccgtacccaagcttcgccatcgcgatgaccaccgcgtcgagcatttcgtcgagcaggttggtgtacgtgagcccggtgcccgggtcgacgtagcgtgtgcgtccgccctggaagagcgcgtagtcgagcgagacggtgaggttgttgtcggcccagacgaagtaggggtacgcgtcgacgaagtagtacgagttggtcccgttcaagaagtgcagcagcgggcgcacgactgcctcggcgatgtcggcgcggaacgcggcggccgacggtgggcgcgggaaggcgccgtcggcgagcgcgtccatggcgagcgtggtgccgatcttgacgctgctgatgctcctctttcggaggctccggtggatgttctccatcgccgggacaaggtgtggccaggtggagttcgcgatggacaagtcggagaggatctcgttccccacgagaaggaacttgacccgtgtcgccgggtagtaggggaccaggttctcggcgacccaccggtccgccgcggccgcagaggcggcgaggtccggtatgatctggtttggcaccatgatggagacgggccagcgcgtcccagccagcgcgcggagcacgcccgggttggcgtcgtagatcttgaccgacccggcccccgccgcgcggagcagctccacggagcgccacggcgaagggatgtcgtccgccacccggccgtagttgacgccgagcccgtagccaccgcttgccccatacgcctctgcaaaggcgacggcgacgcagagaaggaagaagaaggggaagctcaagagcggcggaccggccatggcttctctgctatgttggcgtttgcctgggcgttctga

SEQ ID NO: 144070 - DNA, 1168 bp, Zea Mays
ttatggcattgttgaacttcagccatcctaatttggttagagactattggtggaaccaccattcgggatgtagagtcaacttgttttctcgattcaacaacatttggtacctccaaaaagcagctctcagtgggaagttcaaataagtcgtcattcctgtcatcgtctagattaaatggattcttgacagaaggtactcgatccattagtaaagtgtcatgtttctgacccctagaaaattgatcttctgtagggatctcagggttaatctgcttgttgcagacttcctctttagtgaacccgttagtcttctgtatggaaagattttcttctacagtatctgtctgtggcttctcatgaaaggtgaattctacatcgtccacattagtaacaggagtatcatccatcttggtaacaggaagatcatcctcaaaaacggcagtgggacatctcaaagttttcttgctagaattctcaacaggttgactatcacctggaacatcctcaacactccagttcagtctggggagctccatggaacaatctgtagcagtattatcagtgtaaacaacattcagatcactcccagttgacatggggttagtgctaggattggttattgtttccaactgaacattatctgatcctactacttttgattttggtgatgcttcaggcatggtaagaagaacatgcattctatcttccataaaaccttccaccattttcgagcatgtagactctgattctggttccaaaattgtcaggcgggtttcctgaagggatgcttcatcagatttactatcaaccatatctgtgtaagtgtagtcaacattcacagattgttcatatggacccccaagcttcaggtttacttcatgtttagccaatctaagagctccttcctccaaattacgtccagctttagagtcagcagatatttctgtcatattgggttccccagaaatttgatctttgagtaatccatttgttcctagagaatttacatctgtagttacacttgaccctgatggaatagcattcaaattactcatttctgtagaaaatgcagaacttggtgcagcgccatcttcagaatctgatggatgaagaaacggagatgcatcctggtattcatcaatgctgtcttctcgctcagctggacgtt

SEQ ID NO: 144071 - DNA, 517 bp, Zea Mays
tttgcttcttttcgttgccgcaaaattaccagcaggccacaccgagcttaatccggtacaagattccaggcctgttcagtccacagaaacactagctgaatctgaacatcaggacagattcacgcgcaaatgtctaacaagtcaggtagcggatacatcaaaattgcactgattcaaaatatcagatactagattgcagactatctacacaaagacggatagcattagttacagcagcacatgtatgtagagttgtcaactgatgcaaaatatattatcagcgcacggagtggcagcagatgaacggcatccacggctgcttcttttctctggaaatcttgtcaacgtccttatgtggcagtttggctggggagctccaatggtggtcatcagggccagatttgcgtgaccccgatttcactgacaagttgttgtccttggtcacctggcgccggaacgacagcattcgttccttagtgctgggtttcttcacttggttctccatgcttgcctcggc

SEQ ID NO: 144072 - DNA, 861 bp, Zea Mays
atggacgtagtccttgggcggttcgactgccggcttggcggtcttccccttgcccttcttctgcgctttgagttcaaccgaggcgtcgctcgccgccacctcctctaccttcggcttcaccgggctgtcgctgccgcccactctgcacctcttcccgtccggacccttggcctccgcagcctgcaaaccaatattcagaacggcaccagcgcatcaagaaccagcaagctaaattcgaagcgctcggtatctgaagaatccagtctgcgctggtcgtttccgcaccttgcccgggcaggcttccttgccgccggcggaccccgtgggcggcgccttgcgcttcctgacattgtcatcgcccctggcgcgcgcccacgccgggtcggacaccgacgacccctccggggacacgccgccacacccggcccccgcggcgaccccggacaccccgaagaggccgccgccgccgccgcagagcgtttcgaggaacccggcgtccagcgcggcgaagtcgagcgcaggggcggatgagcccatgcccatgagcaggctggcaacgtagtcgctgtccattgaaagagagaaaggcgctgccgcaggaattgcgcaggaagcaaaggggggtgagaaagtcttgggtcgtctcgtctcctctcctccgagctcgagcccgcggtggatttgggggaaagcgaagcgaacgaggccgcggagccggtaggtggggggattgctttatagagcggttgttgccgctgcggttgggttgtgggccgcgcgccgcgtccgtcgcgtagctcggcgcggtgggatgcttgcggcagtgggttaccaccgggttctactgcggcggcgctcgcg

SEQ ID NO: 144073 - DNA, 2271 bp, Zea Mays
cgccgctgcttaccgcctatctcgccagcaccgccgcatcaccgaaggttcgcaaagatggcggtgccgctgctgacgcagaagatcgtgaagaagagggtcaagcagttcaagaggccccatcttgatcgctacaagtgccttaagccaagctggcgcaggcccaagggtatcgactcccgcgtcaggcgtaagttcaagggatgcaccttgatgcccaacattggatatggctccgacaagaagaccaggcactaccttcccaacaagttcaaaaagtttgttgttcacaatgtctccgagctggagctgctgctgatgcacaacaggacttactgcgctgagatcgcccacaacgtgtccacccgcaagcgcaaggagattgtggagcgtgctgcgcaactggacatcgtggtcaccaacaagctcgccaggctccgcagccaagaggacgagtgaaatgttgagtagttttgattgtgctctgctggtgttgaagatgttactgagattgatgttcttctgtaccatttctatgcttatgatagacttttcatatcgacaaaattatgctatgagtgaaaagagttatggggagtgccatctagttttgaccggactccatgcagtgtggagccttgcaagtaatgataatgaacctttgagtctcaatctgcatgcattttctgaggttcagagctcgtcctagtaatgaatacaaggttggagactgaacccaacattttttgcaccgtgacgggcctaacgacgcgagcccatttaaggcccagagacgggatggctaggctcgtttccatgtacccataccacgcgcggggtcgcctttgcaatttcgccacggtgtgtcggccgctgtatcctacgcctggtcgccggccggccgcctgcggcccgcacatcgctcgacgacgagcgtggccacgtagtctccccagaccacattcgacgacagccacaggacgcggcgggaccatgcaaggaggagagcccgggaccatgcagggataatttctaactggagaagccccctagtagatggcggcggtcaatcctattcctcgtgtcctgaatcacctccgttgcgggcgccgaggagacctcaggcctccgcgcagaagttgctgtcaaggagaccccgcgatcggctggacggagaagcaatccgcaatccggccaagcccgtctccagcaatcattccattcgtcatcattgcacgttatcctctgctgcctctcgctctcggcggtggagcgcgagcggtaggaggtagctgctctattctccgtgccgtgcgcagcgcgcgcgcgcgcgcacacacacaatcggatcagagcagagcgcccattcaatccgttctctccgatccgcccgccgggcaggaccatacgacggaacaaaactacgctgtgatctccatcacgcattcattcgtgtcccggggcgggggcggggcatcatgagcgcagcgggtggagccggtgatcggtcggatcgggacgagggccaccgccgccacccgtttgcccgcttcgcgcatggccgcagatcgcgcactgcacaagcgtgcagtgatcctgatccgtcgtcgctgatgatctcaggccaggtaggcagcctgccctgcgtgctacagtcctccgatccctcccctgactccttaggccttgttcgtttgtgtcggattgcatccggaatcgtttcaacaaatcaaaatttatataaattagagaagcaatccggctaggaatcgttccgacccacaaatccggtacaaacgaacaagaccttacccatccgatcgccctcggtcgctgtcgctccaacccatccgcagccgcgcaaagagagggatccaacgacgccgacgccgacgcgctccatcatccaccggagcggcgagacgagagggcgacggcgctgggaaacccgaccctgactcgggttgcactcgcaccgtacgcccgcccacccgtccgccgccgtgacctgtggacgcgcctccgagaggagcagcaaggcgggaaagccttggcatcatgaccggaccggtgaatttgacagccgacggcgacgcccatggcggactgcctttcgccgcgattgtgggcgaggaggccgaacaccatttccggcggattgacgggggaccataccaacagttttgctagctagcaagccctaccacagctggacaggtcgacgtcaacaaatagacaggccgacgaagacagatgtttagttagtttgtg

SEQ ID NO: 144074 - DNA, 764 bp, Zea Mays
ctctgctgcctctcgctctcggcggtggagcgcgagcggtaggaggtagctgctctattctccgtgccgtgcgcagcgcgcgcgcgcgcgcacacacacaatcggatcagagcagagcgcccattcaatccgttctctccgatccgcccgccgggcaggaccatacgacggaacaaaactacgctgtgatctccatcacgcattcattcgtgtcccggggcgggggcggggcatcatgagcgcagcgggtggagccggtgatcggtcggatcgggacgagggccaccgccgccacccgtttgcccgcttcgcgcatggccgcagatcgcgcactgcacaagcgtgcagtgatcctgatccgtcgtcgctgatgatctcaggccaggtaggcagcctgccctgcgtgctacagtcctccgatccctcccctgactccttaggccttgttcgtttgtgtcggattgcatccggaatcgtttcaacaaatcaaaatttatataaattagagaagcaatccggctaggaatcgttccgacccacaaatccggtacaaacgaacaagaccttacccatccgatcgccctcggtcgctgtcgctccaacccatccgcagccgcgcaaagagagggatccaacgacgccgacgccgacgcgctccatcatccaccggagcggcgagacgagagggcgacggcgctgggaaacccgaccctgactcgggttgcactcgcaccgtacgcccgcccacccgtccgccgccgtga

SEQ ID NO: 144075 - DNA, 733 bp, Zea Mays
cgccgctgcttaccgcctatctcgccagcaccgccgcatcaccgaaggttcgcaaagatggcggtgccgctgctgacgcagaagatcgtgaagaagagggtcaagcagttcaagaggccccatcttgatcgctacaagtgccttaagccaagctggcgcaggcccaagggtatcgactcccgcgtcaggcgtaagttcaagggatgcaccttgatgcccaacattggatatggctccgacaagaagaccaggcactaccttcccaacaagttcaaaaagtttgttgttcacaatgtctccgagctggagctgctgctgatgcacaacaggacttactgcgctgagatcgcccacaacgtgtccacccgcaagcgcaaggagattgtggagcgtgctgcgcaactggacatcgtggtcaccaacaagctcgccaggctccgcagccaagaggacgagtgaaatgttgagtagttttgattgtgctctgctggtgttgaagatgttactgagattgatgttcttctgtaccatttctatgcttatgatagacttttcatatcgacaaaattatgctatgagtgaaaagagttatggggagtgccatctagttttgaccggactccatgcagtgtggagccttgcaagtaatgataatgaacctttgagtctcaatctgcatgcattttctgaggttcagagctcgtcctagtaatgaatacaaggttggagactg

SEQ ID NO: 144076 - DNA, 736 bp, Zea Mays
cgccgctgcttaccgcctatctcgccagcaccgccgcatcaccgaaggttcgcaaagatggcggtgccgctgctgacgcagaagatcgtgaagaagagggtcaagcagttcaagaggccccatcttgatcgctacaagtgccttaagccaagctggcgcaggcccaagggtatcgactcccgcgtcaggcgtaagttcaagggatgcaccttgatgcccaacattggatatggctccgacaagaagaccaggcactaccttcccaacaagttcaaaaagtttgttgttcacaatgtctccgagctggagctgctgctgatgcacaacagcaggacttactgcgctgagatcgcccacaacgtgtccacccgcaagcgcaaggagattgtggagcgtgctgcgcaactggacatcgtggtcaccaacaagctcgccaggctccgcagccaagaggacgagtgaaatgttgagtagttttgattgtgctctgctggtgttgaagatgttactgagattgatgttcttctgtaccatttctatgcttatgatagacttttcatatcgacaaaattatgctatgagtgaaaagagttatggggagtgccatctagttttgaccggactccatgcagtgtggagccttgcaagtaatgataatgaacctttgagtctcaatctgcatgcattttctgaggttcagagctcgtcctagtaatgaatacaaggttggagactg

SEQ ID NO: 144077 - DNA, 1262 bp, Zea Mays
ggcacgtactcacagctctcaggcaaggctttcttcataccacacacacacacacacacacacacacacacacacagaacacagtcgtcgtccgctccgaaatggcctacgcgacgcagcatcggcgccgagccattcttgtcctggccgccatcgccctcctcctggtgtctcccattgcagccgcagccgccgtcgccgccgggtgcgagggcgacaagctccccgcgggccggatctacgcgcactgcgcggcgctcccgtccctcggcgccaggctgcactggacgtacgacgccaagacggggtcgctgtccgtggcgttcgtggccaagccggcgggcgcgggcggcgccgggtgggtgtcgtgggcgatcaacccggcgggcgagggcatgaagggcgcgcaggcgctgctggccctcaagagccccgccgccccctcgtcgtcctacgtagtcaacacctacaacgtgaccgggtacaccgcgctgggcgccgcgtccacgcccatcgcgtacagggccgcggagctcgccgccgacgagagcggcggcggggaggtgcgcatctacgggaagctgcagctggcacccggcctggagaaggtgagccacatctggcaggtgggatccacggtggccaacggcgcgccggtcaagcacgcgttcgacacggccaacctccaggccaagggcacgctcgtcctctccggcgccgcgctgcccgtggaggcggcgccggctcccgccccggtgggctctggtggtgcctcgccggcgaagggaggaggcgatagtggagccgccccgtctactggcgggaccagcaactcggcggctgctaaggccaccacctacgtgtgtgtttcagtgctcacgctgctggcggcggcattggcaggttccttggcgatgtaacaaacagttccgaatcatacggccaagcagttcctgccttcttggcggtggcacgtacgtacgctgacaagcgggagagagatgacacaacacacacatgagattattagcatcctcttgtcttgcatatgcctgcgcgcaatcctgttctcgttagctgttggcacgcgttcggtttcgccatctgatttaccctgtatgttgtgttgttccgagtgttgtctcgttcttaaatacgtagtacggcagaactcatgtccctgttagtaggattatttcttcttctcttcttcagttttggcccaaaagaagagagagagactgttcttccatccaattcat

SEQ ID NO: 144078 - DNA, 200 bp, Zea Mays
gcggctgcaatccggctgcggctgcggcttctacagtatttttctctctatggattgcagctgcagcagtccaaacagctgcaacagtgtcggcttgtagccagccgaacacgcccgttgagtgtaagcacaacgacacaagtctttggccatactagttgtattatcctggattttgtcagtgtcaaattaacttaaac

SEQ ID NO: 144079 - DNA, 551 bp, Zea Mays
gaagagactcgatcttatgtatctacttattgtctttttgcctttgctcggtagttccgtagccggttttttcggacgttttctaggatctgaaggaaccgctataatgaccaccacgtgcgtttcatttgagtttggattaggaagaacaaggtctgcttcttcgtgactgctgccaagactgccccggctttggaacacaggaatttcacaggaattagttcaaaaacataggaaaaacacatgattcaggaaattttgtttattccaaaggagctgtaagccatgcttaggcaggaaactgaccatcatctgcaactttgtcttgcgttcagttaccccccagaatggagtcaatatattactagaaagtgacttaagagttaattgctgccccatgtctgtattgacacacactgaatctgtagtttgatttcaaatttttgatagaacaaggatcaactcaattgtattactcagtagtgtttctgtaatactcaatcattgacagaagagctcaggtaggtgagaattgagaactagctcaatat

SEQ ID NO: 144080 - DNA, 2572 bp, Zea Mays
attccaagcatatgttgcagttatcgattgcactgggattcctgaaaatgaggctggcagaagaatttttcgtgctagattttcatctgttactgagaaggacatatcgagcgccatggataatcttgttctgccaaacaaagatgaatcactatctgtggatgctcgccaagaaattgacttaaaggttggagtagcatttactcgatttcagacccgatatttccaaggaaaatatggaaaccttgattcaagagtgatttcgtatggtccatgccaaacacctacacttggattctgtgtacaacgccatcagcaaatcaccacatttaaaccagagaaattctggtccttgaaaacgtatattatcaaagatagtgatgaaatacagctagaatgggaccggaagaaactttttgattttgatgttactgtaatgtttcagaagatggtcatcagtgatgggactctaaaagtagcagatatatctgtgaaggaagaatgcaaaacccgtccatctggccttaatacagttaatatgcttaaggttgcatcaagtgcacttggtattgggcctcagacagccatgcacttggctgagcggctttacactcaaggattcatcagttatcctcgtacagagagcactgcatatccgtcatcatttgattttcgaggtgcacttgctgcactattaaataatcctctatggtccaatgatgtccggaaattactggatgctggttttgttaagcctcgtcaaggtcatgatgctggggaccatcctccaatcactccaatgaggtcagcaacagaagcatctttgggaactgatgcttggaggctgtaccaatacatatgccagcacttcattggaactgttagtcctgattgtagatatacaaggactgccattgagttcacttcaggtggtgaaacattccactgtgttgggtatcgagtcacttctaaaggatttacatctatcatgccatggctggctgtcagcgagaacagtcttcctgcatttaaaaagggagactctgttagtattcataaggctgacatatatgagggaagcactacaccacctgattacctcactgaaagtgaattgatttccctcatggagaagaatggcataggtacagatgcatcaattcctgtacatataaacaacatttgtgaacgtaattatgttcaggtgaattctggaagaagatatcagaagctttattgagcaacagattactctaattgcaaaaggaaaagctgatcatcttcgagttgttcaacatgtcattcagcaatttatgaaaaagtactcttactttgtgaaaaagattgaaaacatggatgctctgttcgaggcacagttttcacctttggcagactctgggcgcctactaagcaagtgtggaaaatgtggtcggtatatgaagtacatttccactcagccaatgaggttgtactgtataacttgtgaggatgtctattatcttcctcagaacggttcaattaagctttacaaggaaatcgtatgccctcttgatggttttgagttgcttttgttctcgatggtgggacctgatgcaaaatctttcccactgtgccctttttgctataattgtcctccatttgaaggcatcgacaaactctttggtgctctcaagctcgatgacaccggcaaggttgggaaaggggccggcatgccatgcttcctttgtcctcacccgacatgcaagcaatctatgatcactcagggagtttgtgcttgtcctgagtgtagtggtaccctgattcttgatccagttagtgcacccaaatggcggctttactgcaacatgtgtaattgcattgtattgctcccacatgctgctcacaggatcaccactacagataagaagtgcctaacatgtgaatctactatcattgaagttgatttcaacaagaaaaccacccctcttcaagatggagctacattgcatgagggatgtatcttatgtgatgatctgttgcattcactcattgaaatgaagcatggtaagtcattctttattcggagagggagaggaagaggcagagggagaggtcggggcagaggaagcagccggggtagaggaagacgagggaactcaaggtatgatgatcctaaaatgagtttccgggatttttgaagattttggacaaccaacattcggtcactactcactactttgtctgcttcttcgtgactgctgccaagactgccccggctttggaacacaggaatttcacaggaattagttcaaaaacataggaaaaacacatgattcaggaaattttgtttattccaaaggagctgtaagccatgcttaggcaggaaactgaccatcatctgcaactttgtcttgcgttcagttaccccccagaatggagtcaatatattactagaaagtgacttaagagttaattgctgccccatgtctgtattgacacacactgaatctgtagtttgatttcaaatttttgatagaacaaggatcaactcaattgtattactcagtagtgtttctgtaatactcaatcattg

SEQ ID NO: 144081 - DNA, 394 bp, Zea Mays
cactcttctcttgggttccctcccattcccccccccccccccccccaatccgccggtctctatggcgcccaaggttctcatggtcgcggagaagcccagcatcgctctttccatcgcctccgccctctccggcggccgcatgtctacaagaaaaggaagcacagatgtccatgagtttgatggaacatttcagggttcttatgcgaacttcaaagtgacatcagtcattggacatgtcttaagtgtagatttcccccctgcatatcagaactgggaaggaactgatccaatggacctatttgaggctccagttctgagatctgaatgcaacccaaaggtaatgtgttcatttacaactctagttgagacagaatgcaacttagttaactgttag

SEQ ID NO: 144082 - DNA, 3564 bp, Zea Mays
atggatccggacgacgaggcactgaaggtggcgcgcgccccgccgcagcagcgccgcgggatctcctacagccagccgctgtcgcgggacgccgcgtccgcgcgccgcgccgcgccgcgcaatcacagcctcgacgacgagcacattctgccgacctcccactccatcaactacccgctgcaccacgatccctcgggcatggtgcccatgggctaccaccccccgctcccgccccaccagcgccaccccagcgcgtcctattcatccaacacccgacgctccgctggcggcgtcagcgaggactccatgacgctcgagcgctccatgtcagagtacggaggcggcaacggcagcctcccggagttcgtcggcgcggggggcggcaagggcatcttccgtgtgccgctccgcgccgccatgcacccgggccgtccgcccccgctcgaggtgcggccccacccgctccgcgagacgcaggcgggctccttcctccgctcgctcgctgccgagccgcatcgccgccagctctgggccgggaccgagtccgggatcagggtgtggtcgctcgacgaggtgttcgcggagtggggcgcgggcgcgcgccgcggcgacgaggagagcgcgcccttccgagaaggcatgcccgcgccgcccgcgctctgtgtcgtcgtagacagggccaaccgcctgctgtggacggggcataaggacgggaggatccgctcgtggcgcatggacctcgacgcggccgctactgcgcctgcgcccccggctgctggtgcaggcgacggcggggggagtagtcacggcgggggaagcaataatgcgccagtgttcagggaagccctgacgtggcaggcctatggcaggacgcccgtgctctccatggtcatcacttcgtatggtgagatatggtcgggttccgagtgtggaaccataaaggcatggccttacgatgccattgccaagtcgctgtcattgtcaccagaagagagacatatggctgctttgttggttgaaagagcgtacatcgacctgaggaaccattgcacagttggtaacgtttgctcgttgcccgcttctgatgttaagtacatgctagcggaccattcacgggcgaaagtttggactgtgactagcatgacatttgctctctgggatgctcgtacaagggagttgctgaaagtatttgggatggatggccagtttgagtcagcaaagctagagacacctgtcatgccagagcaacctatggaggaagaggtcaaccctaatcctaaagcaaaaccttcgaagaaggacaagtcacaaggttctttgaacttcttccaaaaatctaggaatgctttaataggagcagccgatgcggtgcgcagggtggcaacaaaggggacatttgtcgaagataaccgcagaacaggagcggtggctcaagtaacggatggaacaatctggtcaggatgcacgaatggcgccattattcagtgggatggaaatgggaatagagtgcaagaattccagcatcatacttcttctgtgcagtgcataaaggcactcggagaaagggtgtgggtgggatatgccagtggcatgattcaagtcatggatgctgaaggtaacattattgcaggatggactggacatagctgtccagttataaggatggcaattggttgttcttacatttacacactagcacatcatggtggtattcgggggtggccactaacttctcctggaccccttgacgatattatacgaactgaattgtctaacaaagagctgtcatacactagaatggagaagataaacataatggtagggagttggaatgtagcacaagggaaagcatctgctgagtcattaagatcatggttgggtagtgtagcatctgatgttgggttggttgttgttggattacaagaggttgagatgggcgcagggtttcttgccatttctgctgcaaaagaaacagtagggcttgagggcagtgcgaatgggcaatggtggatagacaatattggcaaagcgcttgacgagggaacatcattccaccgagttggttctaggcagttggctgccctgcttattgctgcatgggcaagaaagagccttaaaccatatgttggagatgttgaagctgctgcagtgccgtgtggtcttggacgtgctattggcaataagggtggtgtaggattgagaataagggtatatgatcgtaaaatgtgttttgtgagtaatcactttgctgcacatctagaagctgtgagcagacgcaatgctgattttgaccacatttatcggacaatggctttcaacaaacctcatggatctacagcttctgctacatctgtccaattgcacagaacagtaaatgtcaatggaaatcaggttgaagaagtaagacctgacctagcagaagctgatatgattgtatttcttggtgatttcaactaccgcctctatggtatcacatatgatgaagcgagggacatggtttcacaaagaagctttgattggctaagagagaaggatcagcttcgagcagaaatgaaagctggaaaggtattccaaggaatgcgtgaagctgtaatcaattttcctccaacatacaaatttcaaaagcaccaaccaggtctcggaggttatgattcgggtgagaagaaacggatacctgcttggtgcgatagggtactatatcgtgatagccgttctgtatcagtagctgaatgctcattagagtgccctgtagttgcttcaatcacatcgtacgtggcatgcatggatgtcacagagagcgatcataaacctgtgaggtgtacattcagcgttgatattgcaagagttgatgaattaataagaaggcaagagtatggagaaataattgagtcgaatgagaaagtacggtctttgttacaagatggttgttttgttccggacactacagttagcataagcgagatcacactggagaagcaagaggatattgtattccaaattgcgaataaatgtgaaacaagcagagcagctttcgaaatcctgtgtgacgggcagtcaaccaaggaagacggtactaaatcagagcttcttccaagggcatcgtttggcttcccactttggctcgaggtccaaccagccgtcggtctgataaaaccaggtgaaacggtagaaattactctgcatcatgaagatttttacacacaggaggaatttgtcgacggaataccacagaactggtggtgcgaagacaccagggacaaggaagccgttctcagaataaacataacgggcaacagctcaaccaaaaccaagacgcacaccatcaacgtccaacatcgctgcccaccaccatcggcgccaccgccggcgatgaaccaacaaccggtggctgccgcgccaccaagcaatgtccttgccagcgagggacactcatcaaagcgttcctcgaagaagagccagtccaagcaccgggaacagcagcaggattacccgcagtttgggacctcagaggtacacgacctgtgccgcatgcggtgcccttgagacctgtacagactactctta

SEQ ID NO: 144083 - DNA, 472 bp, Zea Mays
tactaaaattgcatttttacttccgttttacttatgtcatttgctttgagagcaaaccttttcttttctgaaaaatgcagtattgaatcaaaccccgatatttaagactgtcccttctgaagttgacgtgacatgctcgagcgctggagcgcgtcgacatcaccggtttctaccctgagtgtgtcctattaaagtgagaagtacctgctggacctagcatgatgtatgtgtccttgagtcttgagaccgcaacatatcaacatcactcgaagaggctgggcacctactgatcagtgatcacataacacagatggagagaaatatatgtgttcctgttttttattttgtattctagtaaaaaaaatactagcttctacagtttccatcatcaaacgcttatcccacttttctgcctcctggatactttgtgtcacgtacgttctctattgccacttggtgatgctgcttgtgt

SEQ ID NO: 144084 - DNA, 1892 bp, Zea Mays
attgataccagcagaaaaaaacaactcaagcctcgcccggtcgcccctccctccctccctctgccccgggtttccagggaaacccacccccagatccaaatccagcgaagcgacagagatcaaggatggagctggaggtgggtgcgccttcgccggcgaggtacctggtgggggcagcgatcatgatggccggcgtggtgctcccgctggcgtacatgatcttccgcagcaagcgttcgccttcctccgcctccgccgcggggccctcctccttctccaagcagacgtaggaacaaagggctcatctgatctgagcgagtgggtgaatcgatcgccttcccctgatgcttgtcattctgtctgttttggcaccgcgagatcctccaactgcttctcgagactgggcatcatcacgtcaaatactagctgattagtagtcagttccttttgtaccttgtgtagatcagatcgattgcttatttggctgatttgatacaattataaacaatgggtttacttttgagtgcactacttacaagcatcattcatacggatttcagtttacctaaacaaaccacttgccctcttctgctgcttggctggtttattacgataactgtgcagaatttctctctatgctagttctccctcaattccaaaatgtaagttgttttagttttgtctgagttaagcttctctaagactaagtttatagaacatcaaattggtttcgctgagaccaccaggaaatatgtcttgccacttgacagtgcatttatttggtattgtagacgttaatatattttctatagacttcatcagaattagagaattttgacttaggacatgaaaacggcctatgttttggaaacatagggaatactatgtttgtggtttaataaggagcacacttgttgtgccattcatccttttgcatcatcagctgttgatggtctagttgttgcattgtcagatctaacagcattgggattgaattcggcactgatcctgcccttctgtgtagttgtgattcctatgcgatattttcttcagtgcttccctcttcaaagtttggtttgctctcttcagtccccttctttattctattctaacggaggcctttcatgtcattcgcttccaggagctgacacatacattgttgctaagtgcattagtttgttatctgataatccacacctccagatgtgccctgtatgtttgtgttcttataagttggctcctattgaattgtctgtgttcctgcacatgaaggtagtaaacaaatcagtgtgctgccccagaaaagtcaggttggttgatattattgtttttcggttattggctaacctatatgataaccatgatgcattgcatttgcactttagatggatcgattgtttttgtggctacatgaagggcttgcggcttgccttgtggcttgtgatcaagatggtaattctcatggaggctactgggtattcagggcctacccttcctcagtattgaatcaaaccccgatatttaagactgtcccttctgaagttgacgtgacatgctcgagcgctggagcgcgtcgacatcaccggtttctaccctgagtgtgtcctattaaagtgagaagtacctgctggacctagcatgatgtatgtgtccttgagtcttgagaccgcaacatatcaacatcactcgaagaggctgggcacctactgatcagtgatcacataacacagatggagagaaatatatgtgttcctgttttttattttgtattctagtaaaaaaaatactagcttctacagtttccatcatcaaacgcttatcccacttttctgcctcctggatactttgtgtcacgtacgttctctattgccacttggtgatgctgcttgtgt

SEQ ID NO: 144085 - DNA, 933 bp, Zea Mays
attgataccagcagaaaaaaacaactcaagcctcgcccggtcgcccctccctccctccctctgccccgggtttccagggaaacccacccccagatccaaatccagcgaagcgacagagatcaaggatggagctggaggtgggtgcgccttcgccggcgaggtacctggtgggggcagcgatcatgatggccggcgtggtgctcccgctggcgtacatgatcttccgcagcaagcgttcgccttcctccgcctccgccgcggggccctcctccttctccaagcagacgaacaaagggctcatctgatctgagcgagagctgacacatacattgttgctaagtgcattagtttgttatctgataatccacacctccagatgtgccctgtatgtttgtgttcttataagttggctcctattgaattgtctgtgttcctgcacatgaaggtagtaaacaaatcagtgtgctgccccagaaaagtcagatggatcgattgtttttgtggctacatgaagggcttgcggcttgccttgtggcttgtgatcaagatggtaattctcatggaggctactgggtattcagggcctacccttcctcaggtaggtataaatccaaaacagtggttgcaagtaatatcatcataacaactagttaattactgtatggcactagtattggctgtgggatacaaatattttggatggcactttatcatatttgtcccttgattgcacaagaatcttctatggccatatgtgtgtcataactcataaacctgtgagaaaagcagcacctttttaagatttttgactacggaatagtgatagctttagttgtctctttacacaatgtgtgaaattaaggtgcctgcatcaaagaaactttcttcatgacaggcaaccttggtgcttcgttcaacttgtggcaccctttg

SEQ ID NO: 144086 - DNA, 749 bp, Zea Mays
attgataccagcagaaaaaaacaactcaagcctcgcccggtcgcccctccctccctccctctgccccgggtttccagggaaacccacccccagatccaaatccagcgaagcgacagagatcaaggatggagctggaggtgggtgcgccttcgccggcgaggtacctggtgggggcagcgatcatgatggccggcgtggtgctcccgctggcgtacatgatcttccgcagcaagcgttcgccttcctccgcctccgccgcggggccctcctccttctccaagcagacgaacaaagggctcatctgatctgagcgagtgggtgaatcgatcgccttcccctgatgcttgtcattctgtctgttttggcaccgcgagatcctccaactgcttctcgagactgggcatcatcacgtcaaatactagctgattagtagtcagttccttttgtaccttgtgtagatcagatcgattgcttatttggctgatttgatacaattataaacaatgggtttacttttgagtgcactacttacaagcatcattcatacggatttcagtttacctaaacaaaccacttgccctcttctgctgcttggctggtttattacgataactgtgcagaatttctctctatgctagttctccctcaattccaaaatgtaagttgttttagttttgtctgagttaagcttctctaagactaagtttatagaacatcaaattggtttcgctgagaccaccaggaaatat

SEQ ID NO: 144087 - DNA, 384 bp, Zea Mays
atggcgtcgccaggcgacgacgacggtctcccggggctgccgcccatcaagacaacgcctccgcctccgcctccgccgccccccgctgtctgccaccagtgccacggccgcggcctccccgtcgccgccggcgtcgtcgtcggtggacagcgccaaggccgcggagggcgaggaccacgagccgtcgacgccgacatcggaggcgagcaggctgcggccgcccgccgcgtgcccgccggctccgcgcaagccgccggcgccgcggctgcccgtcaggcggaagccgccgctgccctcgcccgcgcgggtgttcgtcgccgtcccgcgcgacctctccacgtcttccgggcgctgccccccaagaagcgtatacgggtgtcgtga

SEQ ID NO: 144088 - DNA, 707 bp, Zea Mays
attctcgttctgttcctctttctcccatctcacgtcttggttcctctaaacctttcgtcttggttcctctaaatcgctttgttcgtcaactccagatcatggacaagttgttaaacacaggtttgtttttcatcggatttccattttactagatccgcttgcaccagattcgaagccccatattttttgaaagcgattgaggcgaagtaaatcttctttctgaggccacaccgtctaccggcgcgccgccgcctgtccacgcgtcgatctcgcccgaggtggccgcggcgtgcgggtccacgacgcccgcgtgcttcgcggccggccaccacgtcgtccccggcgtcggggaccaccgcaagtgccggcctcggggaatcctggcgatcgcgggggaggggttgactagccaagacctcgacgaggagttgtctcgcgcgtccatccactggttgtcctcaccgtcgggggcggtggcctggacgtcctcgacgaaatgtggcaacgaggaggcgtcggtgaactggctggtgtccccgtgtaacacccggattttaggggtccaaaacccggggttaacataaacaccaggtatgctgggaccaagtctcatacatatgatgtatagtggcacaggatcgaatgtcacaactttatatataacaggagttctttacaaaataaataattacattataaggagacaa

SEQ ID NO: 144089 - DNA, 507 bp, Zea Mays
atggccgatggctgcgagcagcaaccgagagcgtcacgagaaggcgtcacggcaacgacacaacaacaacacaggatgcggataatggcggtcagcagaacggcaggcgcgagtagcaataagcaggcagttagtctcggcactggcgaagcagcgaggaaggactgcgacgaagggagcaccatatctgatgacgagcagatatggcgagtagcgaccaaggtgattagcaaggtgacgacgcgaacaggggctcagcgcggaggtttcaagcgagcgaggtggtggcgtgacacgctgctcgctgcaagcgcagcagcaggcgagcatgtgctaaagaagagcggaggagatcgacaacgcttggcgctgcgtgcaggggtgagggaagctgggcgtcggcatgaaggcatgactgtgtggacagggaggcacgatggagaagaggggaggctggaaatcaaacacgatggctgcgacggtggctttttatggatcaaggaataa

SEQ ID NO: 144090 - DNA, 77 bp, Zea Mays
acaagcaaaaaaaatctcaatcttatggatcgacagagcaaaaaaaggatctcaatctcataaacatacagcctcac

SEQ ID NO: 144091 - DNA, 8242 bp, Zea Mays
gccgtcgtttatcattgccgcgggtcggccatgcctgtggcccttaagccgtcggtgtaccacccggtcgccattcaccgcgcccccgggcacactcaccccatggtaactcgtcgtgtcggcggtgtccttcggcctgtcgacaggctgatcctagccaccgatacgaccgctactccaccggacgcctcttcggtcccctcctctgtccgcaccgccctcaccgaccctcacttgcgtcgggccatggaggagatgtggccctgctggccaaccacacctgggacttggtgccacgtcctcacggcaccaatgtggtcactggcaagtggctctttcgccacaagctgacttcggatgactccatcgaccgctacaaggcccgctgggttcttcagggcttcacccagcgccccggcgtggactacgatgagaccttcaaccccgttgtcaagttcgccatcgtctgcgccgtcctctccctcgccctctctcgaaactggggtgatccaccagctcgacgtcaagaacgccaaccttcataacactctgacggagactgtctactgcagccagcccatcggcttcgtcgacggcgtcaacccggacctagtctgtcggctaaaccgctcactctacggcctcaagccggcgccgtgggcctggtacagccgcttcaccacctatttggcctccatcggcttcgtcgaggccaagtcggacacatctctcttcatctaccagcggggcgaggacatcgactacctcctctacgtcgacgacgttgtgctcatggcattcaccgccgacctcgccgccaatccggacctggtctgtcggctaaaccgctcactctacggcctcaagcaggcgtcgtgggcctggtacagccgcttcaccacctatttggcctccatcgacttcgtcgaggccaagtcggacacatctctcttcatctaccggcggggcgaggacatcgactacctcctctacgtcgacgacattgtgctcacggcattcaccgccgacctcctacagcgcacgatcatcgccctccagcgagagtttgagatgacgtccccccggtcgccgacgcaacgtcttaccggagcttaacaggcgcactccagtacctcaccttctatcggcccgacatcgcctacgtggttcagcaggtgtgcctccatatgcacacaccacgagagccccacctcaccgctctcaagcggattatgcgctacctccggggctcactcgactacggcctcctccgaccatcctcgacgtcagatcttgtggtctacaccgacgctgaatggggccgactgccccgacacgcgtcggtccacctccggctatgtcgtgttcctaggcgccaacctcgtctcttgggtcgccaagcggcagcctgtcgtctctcgctccagcgtcgaggctgagtaccgcgttgtggccaacggcgtggcagaggcttcctggatgcgccagcacctccacgagctctacagccccctccagcgcgccaccctagtctactgcgacaacgtcagcgctgtctacttctccactaatcttgtgcagcatcagcgcacgaagcatgtggagatcgacctgcacttcgtccgggagcgtgtcgcagcaggcgacgttcgggtcctcagcatccccacaacgctgcagttcgccgacatcttcatcaaggggctaccgtccaatgtattcctagacttccggtctaatctcaacatatgtacaggatagagttgtgactgcagggggagttgtgactgcaggatagacttccggtctaatctcaacatatgtacaggatatgttaagtacctattagggtttcggtacttcccatgtgtatttactgttttgcccccattgtaatgggctcagcccatctaactcaggctatatatccatctcccaaccccttgttagggttagggtttcctattctaactgcaactacataagcataagcattcatggacatatcatttcatgtagagctcccagaagaagtggatattcaagatgaagtggtagctgaaggggagtctactccagtgcctgctcatcaagaggatagagctatctaaatgatggttgggtagagggatatagcacctcttctctgcaacaaaggcaagccccagtgcatttgccccttgtgttttaaatgctttatcaccttatatgatacattaggtgataggagttgtgtgataaacaatcgatgcattaccattccttgtaatttgattactattccttgatccatgttttataaaaagaacgattactgcttagtcatgcttagaaactcaaaaatcgtttgtttttcaaaagaatgatgtgtaacattggttgtgggattttcctctgaaaaatcatagcaaacttatgatggtgagtccatcagggcctagatgggctcatcgttcgaaaagagtacccctatcgggtaccaaaaatggggaaatggtttgaataaatcgagaccagacgctaagcagacaaggtcgaccgtctgtgtcgattaaggaccgtaccgtttactggcctaatgtggttgagactttgcaactagcaatataccctggtgtagggcagggtaagcttgaacccggctattccatacgtgaagagacaatcacacactgggagtgaagagatggcgggagtagcatataccctcctggcatagtagcacgcctggtagggtaatgtgctctcgggtggcgcggacctgttcatgtagtggaggactccgtgggaacggttgacatatgaaagggttaagtgctacatatgtcgtgttgttagagatctccaactggatataatcggtttgaatcgtcgttgctcctcggttatggagactcatcccgatgaccatcatcgtagttagcaagtgaaatatgagtatggataaaatgcagctaatacaggccaagtgcttgaactagattaggcaaatctatgttcaggtaaatacctgatttgtgaattaaaacttggcttagggatcaactggtagtaagtttctctgccaaaaagggtcttcggtaattgataagctttaccttgagtctcaaatccagcatactcttgaaagtctttttctttagtcgggtaagtcttgctgagtaattgcctacttagggttttattccctatgttgttgcaagaagggttattgctatctttagctcttgatagttgcttcgtgtggaggccttaaagattttaatgcttaggtgtatttcttatggaaaggcttcacattttccattgtgtaataagttatgcactttaagtactgtcaggacttgtaataattacaactctttctatgatgtaaaacttgagatttggaattgtagaatgtgttttgtaaagtctttcgctctatctccaatgtatgtgtgtatcaaaggtgattactgtaatgtacctgttttgtgggagatctctgggataatgagttcaagttgttgaactcgatagccttgttaagttatcatgtacacgtgtacagccatctgaggctgttaaggcaaggattggtgcacgtgggcctgataacttgggagtgctgtcacaaagaacctctatgttaagtgtgcttggcctagagcaattttggaacggatgaccgaccgggaagttttccccgatgcgcatgagtgaggacaaagtgcgcataaaagactcatgttggtttgtggcaatggtctataatcctagagggctaccacaagtaatgtcggtccaggagtggacgaggtgttacaaatgatatcatagccaaccctcgcggacgtgtgtgataagggttcaggcatatggcgcatgtggcccggagtgggcacatggcatagcatatgacgacactagacacacatacatgaccaagagagggggttcctagcttggggttgaccgacgacgacttcggtcttctaagaggggaggattgtgatatcctggcccaggtggattatatgatatgctggtccaaggctaaatagaattaatagagtactcatattaacaagatgcatcttctttttcagaagtctgtcttaaaagaacctctaggttaaacgtgtttggcctagagcaatttcggtatgggtgatcttttcccggtgcgcatgagtaaggacaaaatgggcataaaaaactcgtgttggtctgtggggatggtctagtatcctagagggctacaaggagtaagtaatgtcggtccaggactagacagggtgttacaaatggtattagagccacccctcgctggcgtgtgtggtaagggttcgggcatatggcgcatgtgggcccggagtgggcacatggcatagcatattgacgacactagacacacagacgtggccaagatgggaggttcctggcttggagttgaccgacgacgacttcggtcttctaaggggggaggattgtgatatcctgacccaggtggattatgtgatatgttggtccaaggctaaatagaactagtagagtactcatactaataaaatgcatcttttttcagaagtttgtcttaaaacaacctctaggttaagcgtgcttgacctagagcaatttcgggatggtgaccttttcccggtgcgcatgagtggggacaaagtgcgcataaaagaatcgtgttggtctgtaatgattggggatgctctatgatcctaaagggctaccaggagtaagtattgtcggtccaggtgtagacagagtgttacaccaactaatcatgattagacaatgactaattggacgacaagattttcggtcaaccattcaaccaaatcaagtagcagagcctcattgaggtcaaggaacgattagttcccagattaattgtgattagttggatgagttgataacactgaccagcaaacaatatcaactacctaaaggaattctttgtgaatatttagtttcctccataatctttcctctgagaagctagttgaggagatttagggatgaaaatatgtaacagcacctaatatatactcacataactaatgcaatcatatctcggatcaaccagacaagagctatcttaaggatagatgctatattgaagcaaaaccaaggaaggtatgaccgctcctgctatgggctaaaccgatggcctaagcactagttgagaaggcctccaaattctcaacacaatagggatcttcagttttcctgagaagtcatttggggaagcatactcatgaaaaattctaatatgaaattgaaactctaaagtaaacagaatataatctatagaacccgattctgaccggctgcaaaacaattggtgatctggtggaagtcttaacttttataaagttcatttctgtagagtttgtttaaaagaataaactctaatagtctgattacaaagttgtcaaatacaacatataatattatttttcagttggcatgagaactattaacattcttcttgctaaagtttatgcacgtatttttttaaataacacaactaggaatagtagagcacatatttttaaaatattaagtaacaggcgtatgagccactgaagctacaacataacgaaaaatttgtagctctgaatgtgactgaatatatgcagaaagaggttcgccagtacgagaaattatattaacaagcaactcagtgtaatcaacaagagtcattctttccttcggaagcttctggtcattccatttaaacctttcttccatctcaaggcaaatgaaaaactcagtatacgctcattaataatgtcaaacccatatttcttattactgtaatttatcttcgaggaacagcccccacagatctttccctgatcagccagtagtaaaaccgcagattggataagttttccattctcaatgtagttctagagctcttcaagttgattatttattttttcagtaagaagtctaactgtatccataaatattttctgtaaaacaacaagtaacacaaatctaagtgtcatgtagaatttgtatgcaaacaattagtgttgaataactttaaatgtatcacttcattttctcctatcaaagtaattatggcttaggaacattttcaaagccaaggaaaaaacagttactagcaacagtttttgtatattttattgaaaaatccttgtttttgctataacaacatgcactaacacatgaagacagaagattaacagcgccaaactttactttctctaacaagtggagataaatgatgttcagtccttagtatcactaatccattataacgtctgtctcatatctatagcatgactacaattacattttatgtcatgtgacataaaaagatcttcgtacataaaagagaactgaaacaaaccatttcaggtaaacacagcaaatgaataagcttgtagacataataattcaaattacgctcaaagaaagattgtcatccagatacttatgcatgcaagtattttttaactgcaacatagagcggaagtaggttctcaatgacagtattgtcaactgtgtttacatcgactgatgcactatgacgtaaaagcaacttgatcatgtcacaaaaaatttgtcagcagttttatggaattgggaagtactcatacaggtttatgcagttaggattggcgtgcattccacagagctcaggtggcttgcccttcaatacaacttttacacatcgtagagcattattattgaccatgaaggttaagatttctgaggtgatactaaaacttcataccatgtccttgcctgaacagtccttgaataatcggagaagctacctccttccagataataaaaaaaacgaaaggatagaattaaaatttaaggttcctcgttacattatctggaaagaggtagcttcctgcaaagaagataatattaatggtaaagatgaatcaattccgtttatgctagattttgtttctatcgccaagtacagggcaaatgacataatcatcccagaccctgttccacagcgggtgaatggtgtatttattgacatatatggaaaattggttcccatccttcaaaatgatagtgtctggtgcttcctccgattattgaaggactgttcaaacaagggaatgacatggacttttagcatcacctcagaaaccttaaccttcatggtcaatagtaattctcttcgatgtgtaaaagttgtattagagggcaagacacctaagctctgtggaatgcacgctaatcccaactgcataaactcatatggatacttcccaatccataaagctgctgacaaattcttttgtgacatgatcaagttgcttttacgtcatggtgcaccattcgatttacacacagttggcaatgatgtcattgagaacctacttccgctccatgttatagttttgaatacttgcatgcataagtatctagaggacaatctttctatcagcaagatcttcatggatacaattagacttcttgctgaaaaaacaaataatctacttgaagagctctggaactacattgagaatgtaaaacttatccagtctgcggttttactactggctgcttaggggaagatctgtgggggttgttcctcgaagataaatggcagtaataagaaagatgagtttgacattatcaatgagcgtatactgaggttttcatttgtcttgagatgggagaaaggttcaaatggaatgaccagaagcttctaaaggaaaggattgttcttgttgattgcactgggttgcttgttaatataatttctcgtactggcgaacctctttctgcatatattcagtcactttcagaggtacggatttttcattatgttgtagcttcagtgcctcatacgcctgttgcttaatattttaaaaatatgttctctactattgttagttgtgttattttaaaaaaatacgtgcacaaactttagcaagaagaatgttaatagttctcatgccaactgaaaaataatagtatatgttgtataattgtatttgacaactttgtaatcagactatcagagtttattcttttaaacaaactctacagaaatgaactttataaaagctaagacttccaccagatcaccaattgttttgcaaccggtcataatctggttccatagattatattctgtttactttagagtttcaacttcacattagaatttttcatatgagtatgcttcaccaaatggcttctcaggaaaactgaagagtcctattgtgtt

SEQ ID NO: 144092 - DNA, 846 bp, Zea Mays
atgaaggttaagatttctgaggtgatactaaaacttcataccatgtccttgcctgaacagtccttgaataatcggagaagctacctccttccagataataaaaaaaacgaaaggatagaattaaaatttaaggttcctcgttacattatctggaaagaggtagcttcctgcaaagaagataatattaatggtaaagatgaatcaattccgtttatgctagattttgtttctatcgccaagtacagggcaaatgacataatcatcccagaccctgttccacagcgggtgaatggtgtatttattgacatatatggaaaattggttcccatccttcaaaatgatagtgtctggtgcttcctccgattattgaaggactgttcaaacaagggaatgacatggacttttagcatcacctcagaaaccttaaccttcatggtcaatagtaattctcttcgatgtgtaaaagttgtattagagggcaagacacctaagctctgtggaatgcacgctaatcccaactgcataaactcatatggatacttcccaatccataaagctgctgacaaattcttttgtgacatgatcaagttgcttttacgtcatggtgcaccattcgatttacacacagttggcaatgatgtcattgagaacctacttccgctccatgttatagttttgaatacttgcatgcataagtatctagaggacaatctttctatcagcaagatcttcatggatacaattagacttcttgctgaaaaaacaaataatctacttgaagagctctggaactacattgagaatgtaaaacttatccagtctgcggttttactactggctgcttag

SEQ ID NO: 144093 - DNA, 116 bp, Zea Mays
aaagggagaggcaaaagacttgccgctccaatatattagaaggagtaggactaacaggaaattacaagaaaccaagacgacttacaagactagaagcgaactcctgaacaaatttg

SEQ ID NO: 144094 - DNA, 2224 bp, Zea Mays
cgatcgagcgaagcagaagcgccaaggcagccgacgcgcatggggaggacggacggcaacgcaacggtgtcgccacgtgcacagccgctagcgaaaccgggcaggaaggaccgcagtagtatatagagacctctccggccggcgcgcgcgacgtcagcgacgacgtccgcgccacgcgggcggaacttcgtagtttgcgacggggcacgcacgcacgacgcaccccacgcattttcaactatataaaaagcaccccccgcgagcgcggccggccggcgaacagaggagaggagaggagagactagacccgctagctgaggccggccggcgcgctggacacgaacatgatggggagaaaggcgccgctcggctgtgctactactcttctcctcctcttggccgccgccgtcgctccggccgagctcagcgtattaggcctaggcggcggggcggcggctgcctcgggcgcggtcacccgggccgacttccccgccgggttcgtcttcggcgtcggctcctcggcgtaccaggtcgaaggtgcagttgcagaggacggaagaaagcctagcatctgggacacattcacacatgaaggctactccctcgacaacgccacaggcgacgtaactgcggatcagtatcataagtacaaggacgacgtaaagcttctgcatgagatgggtgtcgatgcctaccggatgtcgattgcctggcctcgacttatcccagatggtcggggagccgtgaatccgaaggggctggagtactacaacaatctcatagatgagctccttagctacggaatacagcctcacgtgacgatataccatttcgatttcccacaggctcttcaggacgagtacagcgggctgatcagtcccagattcatagaggacttcacggcgtacgcagacgtgtgcttcagcaacttcggcgacagggtcaagtactggagcaccgtcaacgagcccaacgtcgagacgatcggcgggtacgaccagggaatcctgccgccgcggcggtgctccttccccttcggcttcggctgcgaggaaggcaactccaccacggagccatacgtagcggcgcaccacctcctgcttgcgcacgcgtctgcggtgtccctgtacagagacaggtaccaggctgcgcaaggaggacggatcggactcaccttgcttggttggtggtacgagcctgggacgcagactcccgacgatgtcgcggcagccgcacggatgaacgacttccacatcggatggttcatgcatcctatggtgttcggggactaccctccggtgatgaggaggaacgtcgggtccaggctgccgaccttcacggacgaggaggcggcgcgagtgagggggtctttcgacttcgtcggattcaaccactacatcgtcgtctacgtcaaggctgaccttggccgcctagacgaccaagtgcgagactacatgggcgatgcagccgtgaagtatgacatgccgtttctcaagtcacgcaaccagttcccgttcggcgccttgacgagcgacttcatgacgtccaccccctgggctctcaagaaaatgctgaggcatctccgggtgacatacaagaaccctgcagtcatgatccatgaaaacggagctgccggacagcctgatccatccggcgtgaacagctacgacgacgagttcaggtcacagttcctgcaggactacatcgaggccacgcttcagtccatcaggaacggatcgaacgtgcaaggctacttcgtgtggtcgttcctggacgtgttcgagtacctgttcggctaccgcctccggttcggcgtctacggcgtcgagttcaactcgacggcaaggacaaggtaccagaggcactcggccaagtggtacgccagcttcctccggggcggcgagctgaggccagtcgctctgcctgacggagcatattcacagtgaccagttacacgtgtacgctccggctccaggggaatatctggcgatcagcgctctcggtgaggtggagagaaaatagagagtttgtaagcaaggatagtcggggtggtatatatagcagtgcttagatacggttttcttgggtaaatgtggtacgagttgaataagttgtggcatgtttggttagaggttagaggattggctctacccgaaaccagctgattcagatggtcgtttctatatatttggttagggggatggagtggatccattttttgttt

SEQ ID NO: 144095 - DNA, 926 bp, Zea Mays
cgcaacatgtatttagaaaatgcggttcagaaaagttggggggctgtcgtttctttctgacttgtctgcatatataacctgaatataagatggtcggggagccgtgaatccgaaggggctggagtactacaacaatctcatagatgagctccttagctacggaatacagcctcacgtgacgatataccatttcgatttcccacaggctcttcaggacgagtacagcgggctgatcagtcccagattcatagaggacttcacggcgtacgcagacgtgtgcttcagcaacttcggcgacagggtcaagtactggagcaccgtcaacgagcccaacgtcgagacgatcggcgggtacgaccagggaatcctgccgccgcggcggtgctccttccccttcggcttcggctgcgaggaaggcaactccaccacggagccatacgtagcggcgcaccacctcctgcttgcgcacgcgtctgcggtgtccctgtacagagacaggtaccaggctgcgcaaggaggacggatcggactcaccttgcttggttggtggtacgagcctgggacgcagactcccgacgatgtcgcggcagccgcacggatgaacgacttccacatcggatggttcatgcatcctatggtgttcggggactaccctccggtgatgaggaggaacgtcgggtccaggctgccgaccttcacggacgaggaggcggcgcgagtgagggggtctttcgacttcgtcggattcaaccactacatcgtcgtctacgtcaaggctgaccttggccgcctagacgaccaagtgcgagactacatgggcgatgcagccgtgaagtatgacagtaagaatctcagcagggcctttttgctttgcttttgtcggccgtgcgtgctccaggccaggatcccttcaactggaaccacgg

SEQ ID NO: 144096 - DNA, 1374 bp, Zea Mays
atggtggtgaccgctccctatgatgcccatgacagggtgctcgtcggagtcgtggtggcagtatccatgcctcgaggagaggtcgacatggagggagaagggatagaggaactcgaagtcgtggcgacaatatccagcagctccgggagagaactcggtagggaagggacaaactggcaacgagaggacatggcctcgttggttatcagagatcaaagatgcttccttgtccggcggaagcggatgacctcgatgtctcccccaagcgctgcgggcgacgactctgaccaggtcctttttctatacattttggtagaagtgaatggctttacaaggacactgattttgaataggccaaagcagttaaatgcactctcctcgaccatgattatgggactcttgaggtgtttcactgcttatgagaaagacgatggagttaaattgttgattatgaagggtaaaggaagagcattttgtgctggaggtgatgttgctgcagttgttcgatctatacataaagacagctggaaatatggtgctgatttcttccgaaatgaatttttgttgaattacataattgcaacttataccaaacctcaggtttctcttcttagtggaatcgtcatgggtggaggtgctggcgtttctttacatggaaggtttagagttgccactgataacacggtttttgcaatgccagaaacagctctgggtctctttccagatataggggcctcatattttctgtctcggcttcctggattctatggagagtatgttggtcttgctggtgccagattggatggtggggaaatgcttgcatgtggtctggcaactcattttgtccagtcaaatgtaggttgtgtatgtgctagtctaataactcctagtaaatactctgttcctcagagtctgctatcgctggaagaatcacttaaaaaggtggatacttccaatgcttttgcagtgtgtggtatcatcgatcaatttgctcaacaaccatcactgaaagaaagcagctctttgaataggttggaaatcatcaacaaatgcttttccaaaaggacagtcgaagaaattatatccgctcttataagagaagggaggacacaaactgttggggagtgcttgcagcgggaatatagaatggtctgccatgtcatgcgtggtgacttcagcagagacttctttgagggatgcagggctatattgctggataaagaccgaaacccaaagtggatgcctccaaggttggaacaagtgcatgacgaggctgttgaacagtatttctccagaattgatgatccacagtgggaagacttgaacctacctgctagacgctcccacggaagaaatatcgagtccaagctttga

SEQ ID NO: 144097 - DNA, 828 bp, Zea Mays
tttcatagcccttccgccacactatagactccacctggttgtggctcaacgaagctctcttctatagccaccaactcaattgtatactgaactatgtcacgaggcagggatcctttggcattgagccaggtaattggtgatgtgttggatcctttcataaagtcagcaacgatgaggattaattatggtgacaaggagataacaaatggcactggactacgagcatctgctgttctcaatgcaccacatgttgagattgaaggccacgaccaaacaaagctctacacacttgttatggtggatcctgatgcaccaagtccaagcaaaccagagtacagggaatatctgcattggttggtaacagatataccagaggcaagagacatacgttttggcaacgaaatagttccctatgaaagcccaaggccaccagctggaattcatcgaactgtttttgtgctattcaaacaacaagctagacaaacagtttatgcaccaggatggcggccaaatttcaacatcagagacttctcagcaatttacaatcttggaccaccagttgctgcattatacttcaactgccaaaaggaaagcggtgttggtggcagaaggttcttgggatcaagctgaagaacagatacagagaaacatctacatcaaggcagtaccattcacaattcagtaatcaatccacataaaacagttgaaaagatatgaaacgttagttgacagttaagctctagagtaattgactcatattatatgaaacaaactagcatttggaggtcatcttcctatggtacccaccacaataaagatcacgatgtt

SEQ ID NO: 144098 - DNA, 876 bp, Zea Mays
tgttctttttattatatttcagtatttcatttatttttattctctcctgtgtgtcaacaacaaaaccaaacatataaaattcggtacaggaatacattctcatgaaagagactacagggcaacagtaaaccttactagatcaaggagtacgaaaaacaatcaagtttacataatgaaacattgtagtctaggaaactggagagtgtaatctcgaccctcacttctcttggtgtgatgccggtcaccatggcgtcggggatccctgtggtgcgagtgagagttgcctagtccctgtaatctcgactctcgcttctcttggtgcgatgccggtcaccatggcgtcggcgatccctgtggtgagagtgtctgctctcatatgtatcctccctgtgatgccgatggtgatggtaccaatcagggctgcgaccaagttcgtctgaagttctttccctttcatagctactgtcttcctctagtggagatacgcctggctcttggcttcgtctgcgcttgcgatgatccctgtggcgtgagtgtctgctctcatatgtaccatccctttgatgccagtggtgatggtaccgatcagggctgcgaccaggttcgtctgaagttctctccctttcatggctacagtcttcctctggtggagatacttcgcccggttcttggcttcgtctacgcttgcgatgatccctgtggcgcaagtgtctgctctcatatgtatcatccctgtgatgccagtggtgatggtaccgatcagggctgcgatcaggttcttctaaagttctctgcctttcatagctaccgtcttcctctgctggaggagatacttcgcccggatcttggcttcgtctgtgcttgcgatgacctttg

SEQ ID NO: 144099 - DNA, 2388 bp, Zea Mays
cgcgcgcatcgcaagcaccgaaattagaccgaggaagagggtaaggaaaggtcgaggcacgagggggctagcggcggagatagcgagcacccggcgtcgggcgacggtggcgccatgggtggctgccactccgccatcgcggccaccaagctgaagattctgcgccgcggaggccggggtgccgctgccgtcctccccgtcaccaaccacgacggcccgtgctgctcctccgaccacggcagcaaggagaagaagaagaaaaagaagggcgccaggaagggcaggaaacgcgcctccatcctgggcgacgccggcaccttcgacccggacttctcgcggcggtaccggctcggcgcggagctcgggcgcggcgagttcggcgtcacgcggcggtgcgaggacgccgccacgggggaggccctggcgtgcaagacgatccggcggaagcggctgctcctgcgcctcgccgggcccgacgcgaccgacgtgcagcgcgaggtggagatcacgcggcgcatgtcggaggtgagcgggggcagggtcgcgtgcctgcgcgaggcgtgcgaggacgacgacggtgtgcacctcgtcatggagctctgcgagggcggcgagctcttcgaccgcatcttcgagcggaagcactactccgagcgcgccgccgccaagctcgcccgcaccatcgtcgaggtcgtgcagctgtgccacgagaacggagtgatgcacagggacctgaagccggagaacttcctgttcgtgaacaagtcggaggagtcacctctcaaggccatcgacttcggcctctccgtgttcttcaagcctggagatcggttcaccgaagtggttggcagcgggtgttacatggctccagaggttctcaagagaagctatgggccagagatagacgtgtggagcgctggtgtcatcctgcacatccttctctgcgggttccctccgttttggggaggctccgatgagaaaattgcacagtcgatactccgtggggtaattaacttacagaaggatccatggcccaaggtctcccagagcgcaaaggatcttgtcacgaggatgcttgacccagatccttgtacacggttgacggcaaagcaagtccttggttagtagccttaagttcaatcttataagtttactgaaaaccaaatagaacgggcaggctgcatccgttcctagaaaaaaaaacaaggtttttcttgaagagcctgttattgccatcattgaagaaaaaaaaccgaaatggtttaatcatgctgcgtatttaaccataagcactttatcgtggaaaaaaacagagcacccttggctcaagaatgctgataaggcttcaaatgtgtcactcggagaggttgttcggtcgaggctgaagcagttgtcgtctatgaacaagcttaagaagaaggcacttggagtaagttgcagataactcgctgttactacccttaattccttcaagcgacaggccgactgatctctctctttttttttttgccaatgattaatgcaggtcgtcgccatgaatttaccgatggaagagattggcaaattcaaagagatgttccatacaatggacaaaaacaaggacggtagtttgtcacttgaagagctgaaggagggtttccggataaacgatcatcctgttccagaggaagagataaagatgttgttacaagcgggcgatatacatggaactgacacattagattgtgaggaatttgtgacagtcttgcttcacattaaaaagatgagtaatgacgagtatctacctaaagctttcgagttcttcgacaaagacgggaatggttttattgaaatgtccgagttaatggagactctaagtgatggtgaactaaagcctgatgagcaattggttaacgacattattcaagaggttgacaaggataaggatggtcgcatcagttacccagagtttgaattgatgatgaaaagtggatcggactggaggaacgcctctagacgttactcaacagagaatttcagcagcctcagtcaaaaactgtgcaaagatactttatgaaacaagaaagtagtttccaagcagcaattactgactgaagtaccacaccctcaactaaacagcatcagaagacaacgcaaaagcaggattactggatctggtggaaataagggttgaaggagatcacatataccagttgcatgcttgacaaacttcgtcaactagcaagccctctggcattgtcctttgctctggaagtaaaatttactattccaatagaatacatgacttagacatagacagatgtaaaggatgccccagcatccatgcaatccactaaccaaaatttggcattttactactgtcaaatatataaagaaaagaagatgtcc

SEQ ID NO: 144100 - DNA, 1737 bp, Zea Mays
cgcgcgcatcgcaagcaccgaaattagaccgaggaagagggtaaggaaaggtcgaggcacgagggggctagcggcggagatagcgagcacccggcgtcgggcgacggtggcgccatgggtggctgccactccgccatcgcggccaccaagctgaagattctgcgccgcggaggccggggtgccgctgccgtcctccccgtcaccaaccacgacggcccgtgctgctcctccgaccacggcagcaaggagaagaagaagaaaaagaagggcgccaggaagggcaggaaacgcgcctccatcctgggcgacgccggcaccttcgacccggacttctcgcggcggtaccggctcggcgcggagctcgggcgcggcgagttcggcgtcacgcggcggtgcgaggacgccgccacgggggaggccctggcgtgcaagacgatccggcggaagcggctgctcctgcgcctcgccgggcccgacgcgaccgacgtgcagcgcgaggtggagatcacgcggcgcatgtcggaggtgagcgggggcagggtcgcgtgcctgcgcgaggcgtgcgaggacgacgacggtgtgcacctcgtcatggagctctgcgagggcggcgagctcttcgaccgcatcttcgagcggaagcactactccgagcgcgccgccgccaagctcgcccgcaccatcgtcgaggtcgtgcagctgtgccacgagaacggagtgatgcacagggacctgaagccggagaacttcctgttcgtgaacaagtcggaggagtcacctctcaaggccatcgacttcggcctctccgtgttcttcaagcctggagatcggttcaccgaagtggttggcagcgggtgttacatggctccagaggttctcaagagaagctatgggccagagatagacgtgtggagcgctggtgtcatcctgcacatccttctctgcgggttccctccgttttggggaggctccgatgagaaaattgcacagtcgatactccgtggggtaattaacttacagaaggatccatggcccaaggtctcccagagcgcaaaggatcttgtcacgaggatgcttgacccagatccttgtacacggttgacggcaaagcaagtccttgagcacccttggctcaagaatgctgataaggcttcaaatgtgtcactcggagaggttgttcggtcgaggctgaagcagttgtcgtctatgaacaagcttaagaagaaggcacttggagtcgtcgccatgaatttaccgatggaagagattggcaaattcaaagagatgttccatacaatggacaaaaacaaggacggtagtttgtcacttgaagagctgaaggagggtttccggataaacgatcatcctgttccagaggaagagataaagatgttgttacaagcgggcgatatacatggaactgacacattagattgtgaggaatttgtgacagtcttgcttcacattaaaaagatgagtaatgacgagtatctacctaaagctttcgagttcttcgacaaagacgggaatggttttattgaaatgtccgagttaatggagactctaagtgatggtgaactaaagcctgatgagcaattggttaacgacattattcaagaggttgacaaggataaggttagcactcagtaaactaattagtcaaaattattatcacttaaatattgatcacactgtaattgcaacaaaaggaaaggaaaagaagtgattcacttcact

SEQ ID NO: 144101 - DNA, 1118 bp, Zea Mays
aacttatcagcgacccagcacccctcagtccctcagcgactctggggctctgggctctgggctctggcctagcctccactgtctcccagtccccaggtcctcatcggcctccggtcttctggtctccccagatctcccaccggggaaccctacccgagcatcagccatggcgatcgcggcgcgcgtcctgcgccgcctcccgctccacctctacccctcgctcgctcgctctttctgcgcagtttccccggccgccgcctcggccgccccggcgtccgcctcggccgccccggcgtccgccaaggtcgccgatcgcatcgtgcgcgtcctcgccatcgatctcgagggggcgcgccgcgaggtcgtcggcctctccgggcagacactcctccgcgcgctcgccaacgcggagctcatcgagccggcctcccaccgcctcgaggatatcgacgcgtgctccgccgagtgcgaggtccacatcgcgcaggagtggctcgacaagctgccgccaccgtcctacgaggagcggtacgtgctcacgcgcgcgtccaggaaccgcgagctcaacaagcacgcgcgcctgggctgccaggtcgtcctcacgccggagctgcatggcatggtcgtcgctgtccccgagcctaagccgtgggacatcccgtaatggcctgccgcgacgaatggcaaggtgcggctttcgacgctgtgagccttccttcattcccctggctcggtcaagcttgtgcgcctctgccatacccttttatgttacggatttgatgaagaataatagtttgatgggaaaaacctgccattggttaacttttgttcttttgaatgtggagtgtaatggatgctgtaatgtggaatcccgttgcaattaccgcagttcaatgtttcatggttttaagttttgtactctgatgaatagttgattggtcttttcatttccatcttcagaagaaaatgcagaacaatagtagaatacgaagactggtctaatgtaagcatgtgcctaaacgattttctatgttctctcagagttcttgatgtgcctgcaaggtactaggtacatgtgtagtaactcatagttccgaaactgaaaatcttttgatgcc

SEQ ID NO: 144102 - DNA, 1350 bp, Zea Mays
aatcgatctggcacattgttagtactcctgctacgtactatgtttctagtagcccacaagatctagcccagtccaaacctttcgatccgtggtgtgttggatctgaacccaagctccgagtcgctttcggggtgggcattctcctcttcgtcttcggttgcaagaaagaaaaaggtcacccctctaacaccacgccgccgccgtttgctgctcggcgcctctcctcacaacccgtacgccaacgtctccaatctcgtatactttcgtgctcagcatcatggacggcttccccaagagcgtcggcggtggcggccctaacattccggcgggatcccaccccgcaggcgggagccaggcggcggcaggaggaggcgcgacgcagcggacgcagtatccgtatgtgactggtaattcagtcattgccttgaaatacaaggatggtgtgatcatggcatgtgacactggagcctcttatggatcaactttgagatacaagagtgtggaacgcattaaggcagttggcaagcatagcatcattggagcaagcggagagttcagtgacttccaggagattttgcgctatttggatgaactaactctgtctgatcatatgtgggatgatggaaactcgctgggccccaaagagatccacagctatttgacaagagtgatgtacaaccggcgcaacaagtttgatcctctctggaactcacttgtacttggtggggtgaaaaagggtccaaagggtgatgagaagtatcttgggatggttaacatgattggtacccacttcgaggaaaaccatgtcgctactggatttggaaatcatatggcaatcccgatactccgtgctgaatggcgcgatgatatgacttttgaagaagctgttaagctggttgagaagtgcttggtggtcttgctgtaccgagacagatcatctatcaacaaattccagattgccaagatcacaagtgaaggatcaaccatctacccaccatattccttgaagacctactggggcttcactcacttcgaaaacccagcccagggcgctgtgggatcatggtagatttatgctctgcatgccgcgtatcatgccatgaacttaggggagagcaatctgtgctgctgaaatcaaaacccttgtgaacgtttgttctgaacataactggaactctgcatttgcttgtatgacatgcgtatggttcaggaagtttaattccaatatttggtcactaaaaatggattgtgcggttgtgttctcagatgccgtttttgtgttgattgtgctatgtggagaacttggaatgctaactctgttttttttttactgtgtcattcttttgcttt

SEQ ID NO: 144103 - DNA, 1223 bp, Zea Mays
tcggtctaaatcgatctggcacattgttagtactcctgctacgtactatgtttctagtagcccacaagatctagcccagtccaaacctttcgatccgtggtgtgttggatctgaacccaagctccgagtcgctttcggggtgggcattctcctcttcgtcttcggttgcaagaaagaaaaagcatcatggacggcttccccaagagcgtcggcggtggcggccctaacattccggcgggatcccaccccgcaggcgggagccaggcggcggcaggaggaggcgcgacgcagcggacgcagtatccgtatgtgactggtaattcagtcattgccttgaaatacaaggatggtgtgatcatggcatgtgacactggagcctcttatggatcaactttgagatacaagagtgtggaacgcattaaggcagttggcaagcatagcatcattggagcaagcggagagttcagtgacttccaggagattttgcgctatttggatgaactaactctgtctgatcatatgtgggatgatggaaactcgctgggccccaaagagatccacagctatttgacaagagtgatgtacaaccggcgcaacaagtttgatcctctctggaactcacttgtacttggtggggtgaaaaagggtccaaagggtgatgagaagtatcttgggatggttaacatgattggtacccacttcgaggaaaaccatgtcgctactggatttggaaatcatatggcaatcccgatactccgtgctgaatggcgcgatgatatgacttttgaagaagctgttaagctggttgagaagtgcttggtggtcttgctgtaccgagacagatcatctatcaacaaattccagattgccaagatcacaagtgaaggatcaaccatctacccaccatattccttgaagacctactggggcttcactcacttcgaaaacccagcccagggcgctgtgggatcatggtagatttatgctctgcatgccgcgtatcatgccatgaacttaggggagagcaatctgtgctgctgaaatcaaaacccttgtgaacgtttgttctgaacataactggaactctgcatttgcttgtatgacatgcgtatggttcaggaagtttaattccaatatttggtcactaaaaatggattgtgcggttgtgttctcagatgccgtttttgtgttgattgtgctatgtggagaacttggaatgctaa

SEQ ID NO: 144104 - DNA, 1688 bp, Zea Mays
agttctagcaagggatggataactccattgcagcattgctccgcctcctcggaggtcgtaggctcgcagcagcagttgaagccgcaattccccgctcccctgtccccattcacagctgaggagatcggacggttagcttgaggttttctcgttctttgatccatctcagccgttgatttccatataggacgggggaaatgcctccgtgatcggtttaagttctttcgctgcggagatggcagcggcggcggggccgtacaaagagatgctggaagtggtgaacgcgtgcgcggcccggatccggtggcgccttcgtccagcttccaagcgccgcctcctcaacggctgtgctgtggttgttgatgaacaaacctagttgttgccagatatcctgtttctctgcactgggttgcggcctgtggtactggtcgactatggtggcacaatgcctcagctacaagaaaatctttgtggcctgctatatcatgcccggcaggaaacaagcatattgaatccactccgcgtgatgattattggagatatgctttacttgatccatgttaaaggacttgcggaacatgcatcaccaaacgcaaggtcgcagcaagggctagctttcgtggacctagagaaaagatgttgcaatctgcttacaaccatagaagagaatgacactgtgctggagcttgtatccatacaagatcaattcacagccaaatttcctctagatctgtctgatgttcgacctggaataacaaagcaaatgtcaggaaatccacagagtactgttgttgcagagtgcactgacaatcacgttgaggacaggaccctattggtcgttgatctgagtagcttcctcgagaacacccagattgccttgccttctctgaatgggtggcttttaggttatccggtaacatatttgttccgcaatgcaagttctgaggcagcgatacagaacctctcaaggcagtctctgcatatctaccgagtatatgtgtgcggaagttatcggtcagctggcgaacgaagagaagaggaactgatgagtttttcagttccatgtggcgcgagcacgaagcgtgatgaagaagtatgggctagatcgttcatagctcgcatgaatgagaagctcaggcgatgcagccaagtctgggcatccataaggctagaagtcgaggttttccagagccagtcgcaggtcattgtgttgtagttgagatcagtatggctgttattacgggctgatggcataaactccttatacaaagcgacgtgtctcagaagtatcactgccctgggccaaataaacgagttggatacaagtcatgcatgcagaggccggaggtcatatccattatatattttatatatttatctaaaaaagccattatattatgctcgaattattgagcagtttatgtcactataaattcaaattcgttttagtcgtttctgttgactttgtataacctaatccttgacgccgacatgtcttttatatttacatcaaaatcacaaaggatgaatgctcgagttacaatttgaagttgttgttgttttgttccacgtgctcttggactcaagggtctgtttggttcaggtgtttgtttccaaaaatctgatttcgctgagttgtgactgttagaaagatgtcgtgagctgatgattatgaaaaaaataaaata

SEQ ID NO: 144105 - DNA, 1606 bp, Zea Mays
tacatttacaacagatatcttgaatagtaatgttattttatttctttttcttaaatagtcctcatatttaactttgtttttatatcatactatgatcttagttcgtaactctagccacaaaaaataaaaaaaacgggggtgtatatctttaggattggagggagttgtgatgggaagtcgaagtccggtggccggtgtaggtagtggctgcggcggccttccctccacttccgcgtagagatagatcggatctcactagtctgtgtatggatgaggatgtacaatgaatgttggttcgcgtaccggccttgatccctatttatttacatggtatgaaagggggccaccaccaacacggtcaggatgcgagtgaggtccgactcgatcctctgacagagtccggatgagatcaacccaacaaaactgacctgtgtcctgttcagtttccaactgtttccataaccaaactactatctttagtagaggttatttggatgtcctctgtatatccaactgcatccagtttcggcatattgagtcatgcttgacttgcaggaaacaagcatattgaatccactccgcgtgatgattattggagatatgctttacttgatccatgttaaaggacttgcggaacatgcatcaccaaacgcaaggtcgcagcaagggctagctttcgtggacctagagaaaagatgttgcaatctgcttacaaccatagaagagaatgacactgtgctggagcttgtatccatacaagatcaattcacagccaaatttcctctagatctgtctgatgttcgacctggaataacaaagcaaatgtcaggaaatccacagagtactgttgttgcagagtgcactgacaatcacgttgaggacaggaccctattggtcgttgatctgagtagcttcctcgagaacacccagattgccttgccttctctgaatgggtggcttttaggttatccggtaacatatttgttccgcaatgcaagttctgaggcagcgatacagaacctctcaaggcagtctctgcatatctaccgagtatatgtgtgcggaagttatcggtcagctggcgaacgaagagaagaggaactgatgagtttttcagttccatgtggcgcgagcacgaagcgtgatgaagaagtatgggctagatcgttcatagctcgcatgaatgagaagctcaggcgatgcagccaagtctgggcatccataaggctagaagtcgaggttttccagagccagtcgcaggtcattgtgttgtagttgagatcagtatggctgttattacgggctgatggcataaactccttatacaaagcgacgtgtctcagaagtatcactgccctgggccaaataaacgagttggatacaagtcatgcatgcagaggccggaggtcatatccattatatattttatatatttatctaaaaaagccattatattatgctcgaattattgagcagtttatgtcactataaattcaaattcgttttagtcgtttctgttgactttgtataacctaatccttgacgccgacatgtcttttatatttacatcaaaatcacaaaggatgaatgctcgagttacaatttg

SEQ ID NO: 144106 - DNA, 1558 bp, Zea Mays
cgactgagggaatcgctcaccttgaggttggggctgacgagggccatgaccgcagttctagcaagggatggataactccattgcagcattgctccgcctcctcggaggtcgtaggctcgcagcagcagttgaagccgcaattccccgctcccctgtccccattcacagctgaggagatcggacggttagcttgaggttttctcgttctttgatccatctcagccgttgatttccatataggacgggggaaatgcctccgtgatcggtttaagttctttcgctgcggagatggcagcggcggcggggccgtacaaagagatgctggaagtggtgaacgcgtgcgcggcccggatccggtggcgccttcgtccagcttccaagcgccgcctcctcaacgatatcctgtttctctgcactgggttgcggcctgtggtactggtcgactatggtggcacaatgcctcagctacaagaaaatctttgtggcctgctatatcatgcccggcaggaaacaagcatattgaatccactccgcgtgatgattattggagatatgctttacttgatccatgttaaaggacttgcggaacatgcatcaccaaacgcaaggtcgcagcaagggctagctttcgtggacctagagaaaagatgttgcaatctgcttacaaccatagaagagaatgacactgtgctggagcttgtatccatacaagatcaattcacagccaaatttcctctagatctgtctgatgttcgacctggaataacaaagcaaatgtcaggaaatccacagagtactgttgttgcagagtgcactgacaatcacgttgaggacaggaccctattggtcgttgatctgagtagcttcctcgagaacacccagattgccttgccttctctgaatgggtggcttttaggttatccggtaacatatttgttccgcaatgcaagttctgaggcagcgatacagaacctctcaaggcagtctctgcatatctaccgagtatatgtgtgcggaagttatcggtcagctggcgaacgaagagaagaggaactgatgagtttttcagttccatgtggcgcgagcacgaagcgtgatgaagaagtatgggctagatcgttcatagctcgcatgaatgagaagctcaggcgatgcagccaagtctgggcatccataaggctagaagtcgaggttttccagagccagtcgcaggtcattgtgttgtagttgagatcagtatggctgttattacgggctgatggcataaactccttatacaaagcgacgtgtctcagaagtatcactgccctgggccaaataaacgagttggatacaagtcatgcatgcagaggccggaggtcatatccattatatattttatatatttatctaaaaaagccattatattatgctcgaattattgagcagtttatgtcactataaattcaaattcgttttagtcgtttctgttgactttgtataacctaatccttgacgccgacatgtcttttatatttacatcaaaatcacaaaggatgaatgctcgagttacaatttg

SEQ ID NO: 144107 - DNA, 1843 bp, Zea Mays
ctgcttgttcgtagatgtgcatgcttgtccctcttgcactgcttgtctgttacctgcagcaatctttgccaaacggacacagggaacctatgcccccacaggattgcacaacacgtgggataggtaatgcaggtattgcccccgctggctgtggctggccggtgtgcaattcactaggctgccaaatgagccctaaaggccccagcatgggcgaccctctccagagtgattcttatcaatcttgcattggaaaaacacggagcctattattatcagggaagcatttgagccaaagtactatgtacatcaccatgcttttatgtgactatatatataaatataacaaataaagttttattggaccagttctttgaccatgccattggtatcaacgttccaaggtcccgcttcctaccagttaaggcgacatcagatttgaagctagtacagtctgatctatataccttggttgatggcttcgttacacgtaattcagccagaacaaatccatcaaatccctcaattgaacttggtcctgagttcaagaaggttgggagcttccttggtcgcttcaagtccatacctagcattgttgagcttgacatcttgaaggtttccggtgatgtttggttcggttctggaattgtactgaaggggaaagtgaccatcactgcaaaacctggcgtcaagctagaaatcctagacggagcagtgattgggaataaggataattttggaaaaggaaagagaaaacaataccagatgccttacaacctgaattagggatgaaactgctaattgcacatggaagtcaccaagaacttggtaaaggtgattcaatgacaaatctaatgattaacatgtgcgatgtggttcacatgttaatgcatgcaactgaagtgcattaccaatgtcccaagagggtaagggtacagtctgatgtatctgaaaggattgctaatggaactagtgttcatgtaaatactcatgttcaaaatttgaatctggatattgaagagcaatcacacaaacactcgatttcacacatcgaggagccaaacactaataattcagaaggatccctggctggtgctgctgtctgggatgtatttcgcaggcaggatcttccaaagcttaatgaatatctagctgttcatcgggaagaatgtgcagctagatgtcaagcagtgtcttctgttaaatatcctatttatgatcaaacagtgtaccttaacgattatcataagaagatgttgaaggatcaatatgagggactgaagacaatcgagcagattacaatggactcagcttcggtcgagaccaatatgttcaagctctgcaaggtgaggtttgttcagtttggccaaaaaggcatcccctacctgaacacctacgatggtcgcgccatccgctacctcgacccgctcatcaaggccaacgacaccatcaaaatcgatctggagaccaacaagatcatggacttcatcaagtttgacgtcgacaacatggtcatggtgactggcgggaggaacaccgagcgtgtaggagtcatcaagaacagggagaagcacaagggcagcttttgctgcttggagctttttgctatgtctagttttctcctatttgttgtacaggaaaacttagaatagaattcaaatttggtggtcacaaaagtgtggagactttaattcatatataaagttaggcttaacattagtgcaaacagttgtattttagtttagatttagagtacacttatgtatgcgttgtttgacaatgcttatttatgatatattgaatggtacttatttatattatattaattataatgttgttcaatata

SEQ ID NO: 144108 - DNA, 1280 bp, Zea Mays
tccacaaaccctataaccctagcaccgccgccaccatgtcctcgtctccatcttcagtgaaccgccgtcccccgggcccgctagcgttggggctggagtccttggcgaagaagaatacacataggaagaagctcaccgtcaaacctcatccagatccagtcgttgccctccaatggtcggatatggaacgtctcgtctcttcctttggattcagcagccggtgctcctcctctggatctggtggtcaactccatcacccgcagcttctatggcacctcccctagtccccctccatcgtcgccttcacccaccgcttctatatcgccacctctctcattgtagaagaagacactgaggatctgttctttgaccatgccattggtatcaacgttccaaggtcccgcttcctaccagttaaggcgacatcagatttgaagctagtacagtctgatctatataccttggttgatggcttcgttacacgtaattcagccagaacaaatccatcaaatccctcaattgaacttggtcctgagttcaagaaggttgggagcttccttggtcgcttcaagtccatacctagcattgttgagcttgacatcttgaaggtttccggtgatgtttggttcggttctggaattgtactgaaggggaaagtgaccatcactgcaaaacctggcgtcaagctagaaatcctagacggagcagtgattgggaataaggttcacatgttaatgcatgcaactgaagtgcattaccaatgtcccaagagggtaagggtacagtctgatgtatctgaaaggattgctaatggaactagtgttcatgttaaatatcctatttatgatcaaacagtgtaccttaacgattatcataagaagatgttgaaggatcaatatgagggactgaagacaatcgagcagattacaatggactcagcttcggtcgagaccaatatgttcaagctctgcaaggtgaggtttgttcagtttggccaaaaaggcatcccctacctgaacacctacgatggtcgcgccatccgctacctcgacccgctcatcaaggccaacgacaccatcaaaatcgatctggagaccaacaagatcatggacttcatcaagtttgacgtcgacaacatggtcatggtgactggcgggaggaacaccgagcgtgtaggagtcatcaagaacagggagaagcacaagggcagcttttgctgcttggagctttttgctatgtctagttttctcctatttgttgtacaggaaaacttagaatag

SEQ ID NO: 144109 - DNA, 568 bp, Zea Mays
acatcggcgccgcctgtcgacgacgcgggccacggcacgcacacggccagcaccgcggcgggcaacttcgtgcagaatgccggcgtgcggggcaacgcgcacggcagggcgtccgggatggcgccgcacgtgcacctggccatctacacggtgtggacgtgctctccttctccatcggcgccaccgacgacgcgcagttcaactacgacctcatcgccatcgccacgttcaaggccatggagcacggcatcttcgtcagcgccgcagccggcaacgacggccccgccgcggggtccatcaccaacggcgcgccgtggatgctcacggtcgcggcgggcaccacagaccgcgcgatacgcaccaccgtgaggctcggcaacgggcaggagttccacggccaacccttgtagtctctgctaccgtcagccccggaacaacaccgcggggcgcccgctgccgctcgtcttcccggaggcccgcgactgcagcgcgctggtggaggccgaggtgaggggcaaggtggtgctgtgcgagagccgctccatcagcgagcacgtcgagcaggggc

SEQ ID NO: 144110 - DNA, 137 bp, Zea Mays
gttctgcctttccaattccctcctccccgcgcacagtccattctcatgttctgccaccattctatctatcattctcattccccctccccgcaaagcccattcccattcccccgtacagccgacgtctagctaaaatt

SEQ ID NO: 144111 - DNA, 930 bp, Zea Mays
accatattggcggtgacaatggacgacctgctctccccgtgctcgtccttctccccgccgtcgccgccgtccttcttctcccacgccgtccacccagtcatcgagttcgcctcctgtgaggtccccgagcaatggctactcgacgacctcgtcgtcgccaagaacgagggctatgacgacgtggacgacctatggcccgtgcggagctcgctctccccggactccgaggtctccgagcagccgcttcctccccagccgccgccgccgtcacagcaggagctgacgagcgtcagggcggccccggcgcagcagcagcagcgcctcgggaagcggcgtgggcggaaaccagggccccgcccggacggccccgccgtcagccacgtggagtccgagcggcagcggcgggagaagctgaaccggcggttctgcgacctccgcgctgccgtgcccaccgtgtcgcgcatggacaaggcgtccctgctcgcggacgccgcctcctacatcgcggagctccgcggccgcgtcgcgcggctcgaggccgactccaggcgtgccgccgcgtcgaggtgggaccctgccgtagcggcggcggcctccgccagcaccgccactatagggctggcgggagccggcggcggcgccgacgaggcggtggaggtgcggatgctggggccggacgcggccgcggtacgcgcgacgagcgcgggcccccacgcgcccgcgcggctgatgggcgcgctccggtctctggagctccacgtgcagcacgcctgcgtgacccgcgtgaacggcgtgaccgttctggacgtcgtggtcgacgtggcgactccgctgcaggacgacgacggcggactccgcgccacgctgctccagatgatgcaggacagctagcgcggctgcctagctagctagctagtgctatccagatcg

SEQ ID NO: 144112 - DNA, 1789 bp, Zea Mays
gaacatcgccattgcagcaagtctgtatgatctgtgacagctgtcgatagaattatcacacacattcgttattcgttgaactacaaccatggcgaggccgtccgaccaaagcgtccacgtcctcctgctcccattccccacgcagggccacatcaacccgctgctccagttcggcaagcggctcgccggccgcgctggcgtccggtgcacgctcgcggcgacccgcttcgtcgtcagctcgacgaagccgaccccgagctcggtccacgtcgccgtgatctccgacggctgcgacgagggcggccccgccgaggtgggagggatgggcgcccgctacttcgaacgcctcgagtcggccgggtccgagacgctggacgagctcctccggtcggagtcggcgctggggcggccggtgcacgtggtggtgtacgacgcgttcgcaccctgggcgcagcgcgtggcgcggcggcgcggcgccgcctgcgcggcgttcctcacgcagacgtgcgccgtggacatcgtgtacgcgcacgcgtgggccgggcgggtgccggtgccgcccctgccgctgcgccccgaggaggcgcggggcctggctctggctgggctgtcgacccagctcgaggtggacgacatgccgacgttcttgggcgacaccaggtttccaccgtgcttccgggagctgctgatgaaccagttcctggggctggacaccgccgaccacgtgctcgtcaactcgttctacgacctggagccgcaggtgagtgaactactgacccagtgcaatcacaatcgcaaatgcatgcatcgctagctgtaagatgcaaatgaatgcgcgtcatcgttgagtcgtgcatgcatgatccacgcaaacaggaagcggactacctggcgtctacgtggagagccaagatggtggggccgaccgtcccgtcggcgttcctcgacaaccgcctcccggacgacgtgtcctacggcatccacctgcacgccccaatggcggcagaaagcaaggcgtggctggacgcccagcaggcggggtccgtcctgtacgtgtccttcggcagcatggcgtcgctgagcccggagcagatgggcgagatagccgagggcctctacggcagcggcaagcccttcctgtgggtcgtccgggccacggaggccgccaaggtacccaaaggcttcgccgacagggcccaggccaccagggggctcctggtgtcgtggtgcccgcagctggaggtcctggcgcaccccgccgtcggctgcttcttcacgcactgcggctggaactcgacggtggaggcgctcagcgccggcgtgcccatggtggcgatgcccgactggtcggaccagacgaccaacgccaagtacatacaggacgtgtggcgcgtcggcgtgcgggtgcgcccggacggccggggcgtggtgaggagcgaggaggtggagcggtgcgtgcgggacgtcatggagggggagatgggcgaggagtttagggccagggcttcgcactggagcagcaaggccaggaaggccatgggcgagggcggtagctcggacgtcgccatctccaactttctatcctgttttggacactccgctcacgttaccgctgccaactgattgatcatggccggatgcaccgttttaatgcctcgttcattgcttgtacggtttcacctctctctatatacaaaagatatcctcgtctcctgtacatttaaagaaatggtcgataaatatggaaaactctcaacttccagggtataaattgcacccagcaaatttg

SEQ ID NO: 144113 - DNA, 1582 bp, Zea Mays
cgccattgcagcaagtctgtatgatctgtgacagctgtcgatagaattatcacacacattcgttattcgttgaactacaaccatggcgaggccgtccgaccaaagcgtccacgtcctcctgctcccattccccacgcagggccacatcaacccgctgctccagttcggcaagcggctcgccggccgcgctggcgtccggtgcacgctcgcggcgacccgcttcgtcgtcagctcgacgaagccgaccccgagctcggtccacgtcgccgtgatctccgacggctgcgacgagggcggccccgccgaggtgggagggatgggcgcccgctacttcgaacgcctcgagtcggccgggtccgagacgctggacgagctcctccggtcggagtcggcgctggggcggccggtgcacgtggtggtgtacgacgcgttcgcaccctgggcgcagcgcgtggcgcggcggcgcggcgccgcctgcgcggcgttcctcacgcagacgtgcgccgtggacatcgtgtacgcgcacgcgtgggccgggcgggtgccggtgccgcccctgccgctgcgccccgaggaggcgcggggcctggctctggctgggctgtcgacccagctcgaggtggacgacatgccgacgttcttgggcgacaccaggtttccaccgtgcttccgggagctgctgatgaaccagttcctggggctggacaccgccgaccacgtgctcgtcaactcgttctacgacctggagccgcaggaagcggactacctggcgtctacgtggagagccaagatggtggggccgaccgtcccgtcggcgttcctcgacaaccgcctcccggacgacgtgtcctacggcatccacctgcacgccccaatggcggcagaaagcaaggcgtggctggacgcccagcaggcggggtccgtcctgtacgtgtccttcggcagcatggcgtcgctgagcccggagcagatgggcgagatagccgagggcctctacggcagcggcaagcccttcctgtgggtcgtccgggccacggaggccgccaaggtacccaaaggcttcgccgacagggcccaggccaccagggggctcctggtgtcgtggtgcccgcagctggaggtcctggcgcaccccgccgtcggctgcttcttcacgcactgcggctggaactcgacggtggaggcgctcagcgccggcgtgcccatggtggcgatgcccgactggtcggaccagacgaccaacgccaagtacatacaggacgtgtggcgcgtcggcgtgcgggtgcgcccggacggccggggcgtggtgaggagcgaggaggtggagcggtgcgtgcgggacgtcatggagggggagatgggcgaggagtttagggccagggcttcgcactggagcagcaaggccaggaaggccatgggcgagggcggtagctcggacgtcgccatctccaactttctatcctgttttggacactccgctcacgttaccgctgccaactgattgatcatggccggatgcaccgttttaatgcctcgttcattgcttgtacggtttcacctctctctatatacaaaagatatc

SEQ ID NO: 144114 - DNA, 1745 bp, Zea Mays
caacagcgcaaggccgtcactctctatataatcgtggaccacacctctttccctcgaacatcgggctactagcattgttttacacccgctgatactgcaactgcaaccatggtgaactacgacaccggcgatcacagcatccacatcctcctcctgccatacccgtcccagggccacatcaacccgctcttccagttcgccaggcgcctcgccgaccacatcggcgtccgctgcactctcgcggtgacccgtttcgtcgccagcacgacgaggccagccaccggctcggtccacgtcgctgtcttctccgacggctgcgacgacggcggccccgacggggtaggtgggcaccgcggcccctacttcgagcggctcaactccgcggggcccgggtcggtggaccggctcctccggtcggagtcggagctgggccggccggtgcacgtggtggtgtacgactcgttcctgccgtgggcgcagggcgtggcgcgccggcgcggcgcggcgtgcgcggccttcctcacgcagacgtgcgccgtggacgtgctgtacacgcacctgctggccggacggataccgtcgccgccggtggtggaggagttgccggaccagctggcagggctgcctgtccagctccaactggacgacctgccgacgttcttcgttgacaaggaccgtcccccgggacttctggagttgctgacgagccagttcttgggtttgggcaccgcggaccacgtgcttgtcaactcattctacgacttggagccgcaggaagcagattacttggcttccactttgggtgccaagaacggtaggccccaaacatgccatcgacggtgtgcctcgacaaccacctctcggacgacgacggcaacgccgacgtagtaccctacggcgtccacctccacaccccgatgacggcagaatgcaaggcttggctggacgcccagccgccggtctccgtcgtgtacgtctccttcggcagcatagcgtccctgggcgcgcgacagatggaggaagtagccgaggggctttgcggcagcggtatgccattcctgtgggtcgtccgggcaacggagacccacaagctacccaagaacttctccctcgaggcgaaggcggcggggctcatcgtgccgtggtgcccgcagctggacgtcctagcccacccctcggttgggtgcttcatgacgcacggcggatggaactccaccttggaggcgatcagctccggcgtgcccgtagtggcgatgccgcactggtcggatcagccgaccaacgccaagtatgtccaggacgtgtggcgcgtcggcgtgcgggtacggccggactccgatggagtggtcgcaaggaaagaggtggagaggtgtgttcgggaggtgatggaaggggaaaggtgcaaggagttcagactgaaagctttggagtggagtaagaaggcaaggaaggccatcaacaatggcggcacctcggatatcaacatctccgatttcctctccaaggttaagagccacaaataatcgacatcaaggtcatcaagtccgccttcagaataaatgtgactcgcagcaccttagagcttcctaatgtacgaagctcatgaaggttgaaggccgccttcagattttagttttaatttccggttgttattttcttttacggtaagtttggatccattcatttggaggattttaaaatttactgaataaagtaatttatttagcttgaaagttaacattcca

SEQ ID NO: 144115 - DNA, 2981 bp, Zea Mays
catttcttccttccatgtcacaggggaaaaaaggagaggcaagaatccaaagcagccgtacagtacacccctccatggcaggcatgccccgcctctctcctcctttccctgcagccgcagtcacagctgtgagtctgtgacctgtccagttcaatcgcttcagcgttcacaagcgcgttcaacactcctttcccctctccacctcgcaagcttgctcacttttgtctctgtagtcctcagctacctcgtgcggtctgggactctggggacatcgttgccgttcccgggctcggcagccgcaatgcttgcgcaggtgctcctcgtgcacctcctcctcctcctccccgccacgtactcagccgaccaccaccgccattaccggggcagaaggtcgctgcacgagccgctgttccctctggagagcacgcccgcgctgccgccgccaccgcccgcgccgtttttcccgttcttgccaggcgccgcggcgccaccgacgccggaggttggctcggcctccgccccggcggacaccggtgcggctgacgcgtcatcgtcctcctcgtcgccgcaccccacggcgccggccaacatttcgtccttggccgcgctgcccgtctcccgcgccgcgccgctccggtccttcctctcctcccaccgcctcctcaccgtcctcgtcctggtcgtcgccgttgctgcggccgtgctcaccgccgcgctcgtctacatcctcgcccgccgccaacgtcgtcaccctcccaaggcggaacctgcagtacacacaaagccctcctcgcttgcacaggccaaccccgtggtctacgatggtggcgaccagcgtgggcggggctcgacggccaccgtctccagcaccagctcgccggagctcaggccgatgccgcctttgccacggcagttccagcagacgcggatgaacttgccgacgccgtcgtgctcaaaattcgttcttgacgccggaacaggaggtaagcgagcatctgagggtcctcctccgccgccgcctcctccaccaccgccgcctccaatgccgccggtgaaaggcaagggcggcgccacagcagcagcagctcctccggcgccgccgcctctgccgcgagccggcaacggcagcggctggttgccccggcggcactctgagcgcccaacgaccacggtgatcagggcctcggcgaacgcagttcacccggaagagtctccagagcgcgccccgtcagagaaacaagcggacgccgacgcggctgctctgccgaagctgaagccgttgcactgggacaaggtgcgcgcgagctctgggcgaccgacggtgtgggatcagctgaaggcgagctccttccgagtgaacgaagagatgatcgagacattgttcgtctcaaattcgacacggaggtcgtcgaagagcggaaccaaggggccgaattccagtctgtgcagccaggagaacaaggtcctcgacccaaagaaatcacagaacattgccataatgctgagggcgcgcaatgcgaccaaggaagaagtgtgtaaggcactcctagatgggcaggcagagagccttgggaccgagctcttggagatgctgctgaagatggcgcctagcagggaagaggagattaggttgaaagagtacagggaggatgccgtgtctaaacttggccccgctgagagcttcctcaaggcagtgctcgcgattccatttgctttcaagagagtggaagcgatgctgtacatcgccaacttcgatttagaggttgactacctcaaagcctcctacaaaactcttgaggcagcatgcgaagagcttcagggcagcaggctgttccacaagatactagacgcggtcctgaagaccggcaaccgcatgaacaccggcacgaaccgcgggaacgcgcacgccttcaagctggacgcgctcctcaagctggtcgacgtgaagggcgccgacggcaggacgaccctcctgcacttcgtcctcgaagagatcgtcaagtccgaaggaggcaacgttgtagccatcgccaccggccagacgtctgaccaggcgagcgccctcgcggacgatggtctgcagcgcaagaagctggtcggcctgaaaaccgtggcgagcctcggcggcgagctgagcagcgtcaagaaggcggcggcgatggaccccgacgctctggccagctgcgcggccaagctctcctccggcgtcaggaaggtcggcgaggtcctgcgcctgaaccggcaggttctcggccccgaggacgggttccgcgcctccgtcggcgcgttcctgagcaaggcagaggccgagatcgccggggcgcaggcgcaggagcgccgcgccctcgccctcgtcagggagacgaccgggttcttccacggcgactcggccaaggaggaaggccacccgctgcggatcttcgtcgtggtgcgcgacttcctcgcggccctcgatcgcgcctgcaacgacgttgcgaagatgaatgatgggcgggcggcggcggccggtgggtctgggtcgtggcggcgggcgaggaacgctccggtgtttgacgccgtgcgaccctctggctcgtcggcgtcatcctagccgttgggatgcagcgctgatttgtttgtctgacagggatctgcgtcttgttgtctagaagaacagcagagcagggcagggcaggctcagacgtagtaggaccgtaatatactactactaaatattttgtacctggagcagaagatagtctgtagagtaagtgaagcctaatgattcagcgtgatgaacatcgtcctgccaaaggcctaccaaaggtagagtggcattgtacatgactctgctggtgcctgagagttgctgttgggtgagagcttttgagcaactgatgatcaagctcagtctcatgttaagaagtactctctcatttgttttagactatatatatatatatatatatatatatatattcattagttaatctatacatata

SEQ ID NO: 144116 - DNA, 103 bp, Zea Mays
gcacactaactttagttggttgttgtgctatcgacttagttggctattgtgctacctgaagctaggagtattgcaattcagactgattatccaaccaaaatga

SEQ ID NO: 144117 - DNA, 2253 bp, Zea Mays
tgcatgcaccaccaaacaaaaacctaaagctaccaccaaagccccgagagacgagacgaggcgagatgagatgagatctatcttttatatatagcctttagcgcccttcaaacacttcatcccgaagtcaccgcgctgagctccaaagaatctagcagctaggagcaggccgtgtatacgccatccaccacggcaacatgtgctccggctcctggtcctggagcagcagcaagaagcgcccgtctcttgttgtcgtcaacctcaagcggcagcagctgcagaagacgccgccgccgacgccgcctcgtgcctcagttgctatcaggaggaagaggctgaggctgaggaggttgagagccggagcagaggccatggagatggtgaacctgaagctctacctggagaaccggtgcatcatcgcggagaacgagaggctgcgggagagggccagcgcgctccgccgcgagaacctcgcgctgctccaggacctgtccaagacgccggccgtgccagaggcaggagcgggagctggagctgcgtgagattgcttcctcttgctgcctgctgagcatggagtagctagcttagcttgcgttccctcgctggcgcttgtgctagttgcgtgggcaggacagcggactcctaggtatctatctgcttggctgctccgccatgtctgtgctctgctgtctgctcatacatcaccaggctcctggagctctcttgggtgctctgtgccatggtgtttgtacattatatataagtgcgcggattaactagatttccaaagcctgcaccaaactggacaacaaagatcaacagcaagttatgctaaaacataaacctcgactacgacgaatcgatccatttgaacttctagtacaatgattaatgaataagaatattttgtgcagagtttcaagcatccacatctacagaacatgttgtgctgaatatttcccacaaatttacccctctaattcgcgacacaaatgcacctaaaaatgtttttttaaaaaaaaaatctagcagaaaaattacagagacgggaagtttgtacaacaagaatccacccaggcattactaccaacgtccaaccaaataacttagcaataaaccgcaaaaggcggaatatccaaccgctgttgttctaaaacctaaggaaaaaaacgaatatccgggaacacaaggtatcccttcatgaatctgcagtatgaatttgaccttcaagcatgtgctctgtgaaatcaatcgtcttaatggttccactgcttttgctgagctttgaactgctctggttcctgtggctgctgctgctgctgctgagcctgctgggcctctgatggctgcttctgtacctgctgcagctgctgttcgagaatctggcggttcatatgatgatgcgaaccgttcggcacatgaagatcactggcctcgccagccatttgtttcaggcgctgcacttcagctgtcagtgcttcattcagagctggatacagaacgatgcaccagtgataaaaatcagtagttgaataggctaaggaaacatgattgcaatgtaaataccatgggaaaaaagaaggtcattgtttgtttttcaaaaacacaagggatctacatatcattgtattaatagaagaggatatggtcctgtggcaaaataaggtccatgaagtctcacaaaaaaaaggaccgtgaagcccaataaaaaacagtgagatcctaacaaggattctgaaaacaggtatagctaaagcttgcagcacaaaacagtaatattgtaattattttgttagaacgtttatactattcattcaataatttaaattaataaggcacatataagtcataggaacttgtaatagataaatggaaattcccttgacatatcagtgaactatacagtcaattagagaacgatgaggtacaggaatagcatggaatgccaggtcttagttgaagacactgggaaatgagggccaccaaataagctgaacatatgccaagttggcaatgctgtatcggcattgaaaaatcaaaagaaatgcattcataattattccaatctgctcagtaacaatctcctttttgtttgcattctctacattcctcttctattatacataatatcacccgcacccccttctctgcacacttcagaatgtagaaattgtcatatatttgaatgaacaagaacagatttcgtagctcaagccatgaagaagaaaaaaaacttcctcgatactgatgcaa

SEQ ID NO: 144118 - DNA, 1589 bp, Zea Mays
accaaacaaaaacctaaagctaccaccaaagccccgagagacgagacgaggcgagatgagatgagatctatcttttatatatagcctttagcgcccttcaaacacttcatcccgaagtcaccgcgctgagctccaaagaatctagcagctaggagcaggccgtgtatacgccatccaccacggcaacatgtgctccggctcctggtcctggagcagcagcaagaagcgcccgtctcttgttgtcgtcaacctcaagcggcagcagctgcagaagacgccgccgccgacgccgcctcgtgcctcagttgctatcaggaggaagaggctgaggctgaggaggttgagagccggagcagaggccatggagatggtgaacctgaagctctacctggagaaccggtgcatcatcgcggagaacgagaggctgcgggagagggccagcgcgctccgccgcgagaacctcgcgctgctccaggacctgtccaagacgccggccgtgccagaggcaggagcgggagctggagctgcgtgagattgcttcctcttgctgcctgctgagcatggagtagctagcttagcttgcgttccctcgctggcgcttgtgctagttgcgtgggcaggacagcggactcctaggtatctatctgcttggctgctccgccatgtctgtgctctgctgtctgctcatacatcaccaggctcctggagctctcttgggtgctctgtgccatggtgtttgtacattatatataagtgcgcggattaactagatttccaaagcctgcaccaaactggacaacaaagatcaacagcaagttatgctaaaacataaacctcgactacgacgaatcgatccatttgaacttctagtacaatgattaatgaataagaatattttgtgcagagtttcaagcatccacatctacagaacatgttgtgctgaatatttcccacaaatttacccctctaattcgcgacacaaatgcacctaaaaatgtttttttaaaaaaaaaatctagcagaaaaattacagagacgggaagtttgtacaacaagaatccacccaggcattactaccaacgtccaaccaaataacttagcaataaaccgcaaaaggcggaatatccaaccgctgttgttctaaaacctaaggaaaaaaacgaatatccgggaacacaaggtatcccttcatgaatctgcagtatgaatttgaccttcaagcatgtgctctgtgaaatcaatcgtcttaatggttccactgcttttgctgagctttgaactgctctggttcctgtggctgctgctgctgctgctgagcctgctgggcctctgatggctgcttctgtacctgctgcagctgctgttcgagaatctggcggttcatatgatgatgcgaaccgttcggcacatgaagatcactggcctcgccagccatttgtttcaggcgctgcacttcagctgtcagtgcttcattcagagctggatacagaacgatgcaccagtgataaaaatcagtagttgaataggctaaggaaacatgattgcaatgtaaataccatgggaaaaaagaaggtcattgtttgtttttc

SEQ ID NO: 144119 - DNA, 1526 bp, Zea Mays
cgccgcgtccgcgtccctccggctcgtggcaacgctagcgccctccggtcctctgtcctcctccgccacctcgacgtgagctgcggagaccgccctccgcagtccgtttgacgtgtggggtgggcctggcggccggtgaccggtgaacgcgctctcgctgctcacctgggctgtccacatctccagcgtcaccaagtgggagatgacgggttcagagttgatttagtgaccaagaaaacggaggaaatccacgagggatgaaccattttccaggttccacttcttggtgtagcaatgtgtgcatgcacgtggaatttcttctacaattcatagtccctcgaagtccttgtaagccttcaaggtgctctgacagtgatcggtaacataacaatgtgcatagctgcatgccgcatcttcaaagcatcccaggaaggctcaaaaaacttcataggctgcaagattggatcttacaaccggtctggcaagggatgctacgctacaccccatttgaaagttgacattgctgcgagcctgagacggtggtaggagaaaaaacagttagaaggttgatttgattggctttaccttctgaaacatgatcgtgagtcgtgaccaagctgaagaaatacagatctgcatatgtcgtgtaaacgccggttaaaataaccctgaatccggttacagcctagggcccggtttccttccttccaggattatataatccaacttatagattatatattcactggattatataatctggactgtgggtcatagaatccattcactcgatacagagagatgccactcatgagaacgcaacaacagtttggagcactgaatgttagtacaatgacaccatctctccaccactgcaaaaccctgtccccgcaagttcacccgttcatggccatcaaaccaatcctgccaaaaaaaggcatcaaagtacctgctgctctccatctcgaggtgccactggcatgtggcctcatgatgctgaaccctgaactcaacatggacgtcgctgtttgccggacgaggatcgcacgtgttcgtgcggggggccagtgccaatggcgaaagctgcagcaacgatggatgatggtgcttgtgtgctctgtcaatgtgtgtgtgcagcagggagaggtcaagcgtcggaatgaaacctccactcggcgaagatatggatcaaatgagtggacgcgggacctgggccgggtcagtgtgggggcgacacgcgtcccccatcgggggagcgtctgggggtggcatcggacgctgcagatccagagcacaggtgctgttgatctgatcttgaggtgtcaaacgcaaatcctcttgtgtacctccttggcttgccttgtgtcattgtgtgtgtgtgtaatgagtgcaacttttggccaaagctggggcggagtggcccaaagtgtcttccctgcccccaagttttttcgtcgagagattctcgtttccatgatggtgttgtgacgacgcagtagctaacccggggtgccggggctaatggt

SEQ ID NO: 144120 - DNA, 843 bp, Zea Mays
gtaatcatcaacgacttgccgggttcgggttaacgccgacgccgacctcacgcagtcccgccgcgtccgcgtccctccggctcgtggcaacgctagcgccctccggtcctctgtcctcctccgccacctcgacgtgagctgcggagaccgccctccgcagtccgtttgacgtgtggggtgggcctggcggccggtgaccggtgaacgcgctctcgctgctcacctgggctgtccacatctccagcgtcaccaagtggtaccgtttctctctgctactggctagcactgcttccgcgcatgtaagctctgtgaggactgaatgtctgaatcccttatgccttgtttggttgtatctggattctggattggagaggattaagatgattaaatcctttctatacaattttaaataggaatgaatttaatcatctttaatcccaagtttgtgattacagggagatgacgggttcagagttgatttagtgaccaagaaaacggaggaaatccacgagggatgaaccattttccaggtcaccaaaccagcccctctcgtggagaatggttccacttcttggtgtagcaatgtgtgcatgcacgtggaatttcttctacaattcatagtccctcgaagtccttgtaagccttcaaggtgctctgacagtgatcggtaacataacaatgtgcatagctgcatgccgcatcttcaaagcatcccaggaaggctcaaaaaacttcataggctgcaagattggatcttacaaccggtctggcaaggtaaatgagatatgcgcaagctcttctctaacatggttggcaatggataactatttggctgctgtttag

SEQ ID NO: 144121 - DNA, 2607 bp, Zea Mays
cgggcacgtgcgcacgcgccgcactagggtttccgcagcatacctacaagtactcgaaaccccgtctctctccccctcttttccggctgcgccttcccctcgcagccgccagccctcaacgttcctaccagctgccaccgcctgttacccgtgatgtctcccgcccttgccgctggcgtggagcccatggccgtcgacgattccgcctccaagaaggccaagcgcaagcagctcaaggccgccgccgccgccgcggaggcagaggcggaggccgcttcggtcaagaagaaagagaagaaagagaagaagcgaaaggtgaaggagccgtcccctccgctcccatcggccgcgtcctctgatgaggaagagaaaagcagcaccagctccgaggagacagcacccgcggcgaaaaaagcgaaggagaagacgaagaagaatgttgatgtctcgtcttcagcctcagatgacgatggcgagatcacagccagcagcgatgaggaccccgcggacccgaacgcgctgacgaacttcaggatatcggagtcgctgaggcagagcctcaggtccaaggggatcaagtcactgttccccattcaggccaccactttcgatctcgtactcgatggcagcgacttggttggccgagcgcgcaccggtcagggaaaaactttggcttttgtcttgcccatattggagtctttggttaatggggcaaacaaggcatctagacggactgaacatggcaggaccccaagtgttctcgttctactaccaacaagagagctggccaatcaggtgcacgctgactttgagttttatggtgcaacatttgggctctctgcatgttgtgtgtatgggggatcaccttatcgtcctcaagaaatggcattgagaagaggtgtggatattgttgttggaactcctggtcgtgtcaaggatttcattgttaaaggaactctcaatttgaaatgcttgaaattccgtgtccttgatgaagctgatgagatgctaaacatgggttttgttgatgatgtcgagctcattcttggcaaggtagaagatgctaccaaagtacagacgcttctgttcagtgccactctgccagagtgggtgaataagctctctatgaggtttctgaaagttgacaggaaaacagttgatcttgtcggtaatgagaaactgaaggccagtgcatctgttaagcaccttgctcttccttgtaacaaggcagcaagggcacaagttattccagacattatccgatgttatagccatggaggtcgaaccatcatcttcactgagacgaaggattctgcatcagagctttctggtttgattcatggatcccgtgccttgcatggagatgtagcgcaagcgcagcgtgaagtaattcttgctggattccgtagcgggaagttccaagttttggttgcgacaaatgtggcggcgcgtggtctggatattaatgatgtgcagcttatcattcagtgtgaacctccccgggatgttgaagcttacatacaccggtcaggtcggacagggagagcaggtaatactggtgttgctgtcatgctttatgagcccagatataagcacagtgtcagcagactagaaagggagtctggggttaaatttgagcatatctctgcgccacaacccactgatgtagcacaatctgctggcagtgaagctgcagatgcaattgcgagtgtgtcagacagtgttattcctatcttcaggcagcaagcagagcagttgctaagctcttccagtctgtctgcagctgacttgcttgccaaagcacttgcaaaggcagttggttacacggacataaagaaaagatcattgttatcttccttggaggattacagtacactacatcttcaaactggcagaccgatgtggtcacctgggtttgcttttactatattgaaaaggttcatgccagaagataaacttgcagatgtaaagggtgccaccctcaccgctgatggaacaggagttgtatttgatgttcctgcagcagatgttgaagattacattcaagcttcggagagtgccgcacaggtgacaattgatgaagtcaagcaactgccacccttgcaagagaaggaccagtcgagaggcaactctgggggaggaagatttggccatggaggtggccggagattttctggtggtggtggcggcggcagagggttttctggccggggaggtggcggcagagggttttctggcagaggaggcggcggcagtagatttaacaggaggaattagaagctgcttcaatctttatggacatttcagaattcagagaactatgtttgtgttcgacgtagttttgatgaagagggagggaatcgtctcagttttggctgcaactgtatcgtgcttttgtttatttgttagccttcgtcaacgaaggcttattttgttagtgatataattgaggcatggggaagagggggaggtaacagtctcagttttggctgcaaattgtatcgtgctattgtttatttgttagtgttcgtcaacgaaggcttatttgttagtgcttttattgtggcgtggtgaagagggaggaaatagtctcaattttggctgcaa

SEQ ID NO: 144122 - DNA, 1972 bp, Zea Mays
tttcttttttgacaatatagattagtatgcaggagccaattattatctttatacttctatttactaaccactttctgttttttttaaaatggatcaattaacatggtttttaaatggagtatctaacagcattcattagatttctgtttgattatttaattactcactctaatgtatgaaaaggcaaggtagaagatgctaccaaagtacagacgcttctgttcagtgccactctgccagagtgggtgaataagctctctatgaggtttctgaaagttgacaggaaaacagttgatcttgtcggtaatgagaaactgaaggccagtgcatctgttaagcaccttgctcttccttgtaacaaggcagcaagggcacaagttattccagacattatccgatgttatagccatggaggtcgaaccatcatcttcactgagacgaaggattctgcatcagagctttctggtttgattcatggatcccgtgccttgcatggagatgtagcgcaagcgcagcgtgaagtaattcttgctggattccgtagcgggaagttccaagttttggttgcgacaaatgtggcggcgcgtggtctggatattaatgatgtgcagcttatcattcagtgtgaacctccccgggatgttgaagcttacatacaccggtcaggtcggacagggagagcaggtaatactggtgttgctgtcatgctttatgagcccagatataagcacagtgtcagcagactagaaagggagtctggggttaaatttgagcatatctctgcgccacaacccactgatgtagcacaatctgctggcagtgaagctgcagatgcaattgcgagtgtgtcagacagtgttattcctatcttcaggcagcaagcagagcagttgctaagctcttccagtctgtctgcagctgacttgcttgccaaagcacttgcaaaggcagttggttacacggacataaagaaaagatcattgttatcttccttggaggattacagtacactacatcttcaaactggcagaccgatgtggtcacctgggtttgcttttactatattgaaaaggttcatgccagaagataaacttgcagatgtaaagggtgccaccctcaccgctgatggaacaggagttgtatttgatgttcctgcagcagatgttgaagattacattcaaggtataatggtccttcccttgttcgtgaaatagttatcaactagcataggcatgaaaatattttcctgatgtggcccctgaatccgttttcttgttatgcaattcaaataagcctgttaatgccttgtttggttatttctataccatatggattggatgagattggaaaaaattatgaaagattttgacttgtctgggatttaaacctacccaatctcacccaatccacatggaatgagagcaaaatgaataagccttaaagtgtctattattttctaaatgaaattcgactatgaaaaccttttggatatgtggcaccactcgaatcactacatcctgcagcttcggagagtgccgcacaggtgacaattgatgaagtcaagcaactgccacccttgcaagagaaggaccagtcgagaggcaactctgggggaggaagatttggccatggaggtggccggagattttctggtggtggtggcggcggcagagggttttctggccggggaggtggcggcagagggttttctggcagaggaggcggcggcagtagatttaacaggaggaattagaagctgcttcaatctttatggacatttcagaattcagagaactatgtttgtgttcgacgtagttttgatgaagagggagggaatcgtctcagttttggctgcaactgtatcgtgcttttgtttatttgttagccttcgtcaacgaaggcttattttgttagtgatataattgaggcatggggaagagggggaggtaacagtctcagttttggctgcaaa

SEQ ID NO: 144123 - DNA, 1970 bp, Zea Mays
gcatctccccctccctacagctacaggcctgggccagtatataccgctacacttagttagccatcgcgagcagagaagtgacaacagcagcacgatggcaagcccgctgctgtgcctggccgccgcggcgctggccgtagccgtcctcgtctccgcgacagaggcgtggcgcgcgactccaccgccgctgccggtgctgccgatcccgtcggcgccgcagctgagatggcagcgccgcgaggtgatcatgttcttccacttcggcatgaacaccttcacggactccgagtggggcacggggtcggaggacccgtccctgttccgccccgcggggctcaacgccacccagtggatggacgcggcgcgggcggcgggggcctcgctcgtcatcctcgtcgccaagcaccacgacgggttctgcctctggccgtccgactacacggcccactccgtgcgcgccagcccctggcgcgggggccgcggcgacgtggtgagggagttcgtgggcgctgcccgcgcgcgcggccttgatgccgggctgtacctctcgccatgggaccggcacgaccagaggtacggcgaggaggtcgcgtacaacgagtactacgaggcccagctccacgagctcctcaccgggtacgggagcgtgtcggagatttggttcgacggcgccaagggcaagaacgcgaccaatatgacgtaccacttccaggagtggttccagacggtgaagcagctgcagcgctccatcaacatcttctccgacgacgggcccgacgtccgctgggtcggcgacgagaagggctacgccggaaccacctgctggtccaccgtcaaccgatccatgatcaccatcggagaagccggcatcgagaagtacctgaacgcgggcgacccacgggggcgcgactgggtgccgccggagtgcgacgtgtcgatccggccgggctggttctggcacaagaacgagacggccaagccgctgagccagctgctggagatctactacaactccgtaggccggaactgcgtgctcctgctcaacgcgccgcccaactccacgggcctggtcgaggacgccgacatcgcgcggctgcgcgagttcggggccgccgtggccaccgtcttcggcacggacctcgccgcgggcagcgaggccagggccagcagcgagcgcggcgcccggttcgcggcgcgcaacgtgatggacggccgcgacgacacgtactgggcgccgacggccgaggacgggcgccggaacgggtactggatcgagctgcggcggcggccgggcgcgcgggcgcgggcgttcaacgtggtgcggatccaggagcacgtggcgctggggcagcgcgtggagcggcacgcggtgtacgtggacggcgcgcccgtggccaacggcacgacggtggggcacaagcgactgcaccggctgccctgccccgtcgcgggcacgacggtgagggtctggatcacggcgctgcgtggcccgccgctgctctcggcggtgggcctacactacgaccccttcgtcgcgtcggacacgatgtgacgtggcgagcgcggcgcgcatggggcatgattgcttggtgtaatggcggtacgtggccagtcggcctcgccctgtcctggtcgtccgagcctaagtgacggaaccgcaaagtgcgacgacgacgaggcacccacaccacccaccaacggcgcaccggcgagaaaggggcgctctgttgatgttgatgggaacggggaacccggaaccagcaattgccattcagtttggatggatgggtgtgggtctgtttcttgctgcggatcgcagaataaatttattgggtggcagtttcgttccgcagcagaagaaaaaggataacatctttttttcgtcgcgtgatggtcagtctttcaccgtcgcgagaaacgtggcacgcgcgaggtgacacggtctagcgaatagtgatgtctatgaacgc

SEQ ID NO: 144124 - DNA, 901 bp, Zea Mays
gcatctccccctccctacagctacaggcctgggccagtatataccgctacacttagttagccatcgcgagcagagaagtgacaacagcagcacgatggcaagcccgctgctgtgcctggccgccgcggcgctggccgtagccgtcctcgtctccgcgacagaggcgtggcgcgcgactccaccgccgctgccggtgctgccgatcccgtcggcgccgcagctgagatggcagcgccgcgaggtgatcatgttcttccacttcggcatgaacaccttcacggactccgagtggggcacggggtcggaggacccgtccctgttccgccccgcggggctcaacgccacccagtggatggacgcggcgcgggcggcgggggcctcgctcgtcatcctcgtcgccaagcaccacgacgggttctgcctctggccgtccgactacacggcccactccgtgcgcgccagcccctggcgcgggggccgcggcgacgtggtgagggagttcgtgggcgctgcccgcgcgcgcggccttgatgccgggctgtacctctcgccatgggaccggcacgaccagaggtacggcgaggaggtcgcgtacaacgagtactacgaggcccagctccacgagctcctcaccgggtcagttcccagctgctgcgattaaacaaaagcgtcgtgtagcaattgttagccttacatgatgattctctctgtgtgtgtgtaaacaatactacaaaacaagccaggtacgggagcgtgtcggagatttggttcgacggcgccaagggcaagaacgcgaccaatatgacgtaccacttccaggagtggttccagacggtgaagcagctgcagcgctccatcaacatcttctccgacgacgggcccgacgtccgctgggtcggcg

SEQ ID NO: 144125 - DNA, 306 bp, Zea Mays
atggatctgcgccctctaacactgttggtcgtcatgggctcgctccccaccactctggtcggcaggcttgaaatggggccgacctgcgacctcttcgatccgcgtgacgcgtcggggttcactaaccttctggctgcgctcaccgttgtgatcatcgcggtcaccgcgtcatcgcccgtggggttcatcgtgctgcgcttcgtggcgggtctctccctcgccaactttgtcgccaaccagcactggatgtcgggcatctttgcaccctccgtcatcgggctcgccaacgctgtcacgactggctga

SEQ ID NO: 144126 - DNA, 971 bp, Zea Mays
cacgcttcacagcagccagcaccagcactcagactcagctcaatcccgagacaaaggaacccacctccactcccaccagcaagctcaagcaagcagccaccaccagcagcgatcagcggcagccatggacatgggccggcaccagctccagctccagcacgcggcctcctcgtcctccacctcggcgtcgtcctcgtccgagcaggacaagccgctctgctgctctggtcccaagaagcgccccgcggggcgcaccaagttccgggagacgcggcacccggtgttccgcggcgtgcggcggcggggcgccgcggggcggtgggtgtgcgaggtgcgcgtccccgggcggcgcggcgcgcggctgtggctcggcacctacctcggcgccgaggcggcggcgcgcgcgcacgacgccgcgatgctcgccctgggccgcggcgcggcctgcctcaacttccccgactccgcgtggctgctcgccgtgccgcccccgcccgcgctctcgggcggcctggacggcgcccgccgggccgcgctcgaggccgtcgcggagttccagagacgccgcttcggggcggcagccgccgacgaagcgacctcgggcacgtctcctccctcctcctcctcctcggcgacgaagccggcgccggcgattgagcgcgtgcctgtggaggccagtgagacggtggcgttggacggcgccgtgttcgagcccgactggttcggggacatggacttggacttgtactatgccagcctcgcggaagggctgctcgtggagccgccgccaccgccaccgcccgccgcctgggatcatggtgactgctgcgactccggagctgacgtcgcgctctggagctactagcaagctatagcagcaataagctccaccaactcatctgtactgtagtgtacttgtaccttgtaccttgtaccaaaatccaaattgatttgtagcgaattaacttacc

SEQ ID NO: 144127 - DNA, 977 bp, Zea Mays
acggggcctatgtttttctttcggtaccgagatggcaaggtccatgttttccatgtgtgagtgagtctcctcactcgcagggaaaaagaaagaaaggcagaaaagaaaagacatccatcactcacttcccattcatcagactgtgttcaacggtgtgcccttggctccccctcccctaccactgtaaccgatttaggggctacagtgcgcccctaaatccttcaccggcttcctcctcctcctcctctcccctcccgattccttctctctcccgctaaatggatgggcacgctacgccgggatttctcccccgcagtcggttccttgggccacacaatcgcgcgctcggaaaactctgcggagggcgaaggaggcgaagcaagggcgacgtatccgccgccggagaaggtagccgtcgatccgcttcattcgcgcttcaaggtccacccgtgatgagcaaagcaggcggcggccccgggtcggccccggtcccgacggccgcggccgcggcggccgcggtgcagaagcagaagtcgctgctgcagagcttgctgcaagaatttgggcagtcgatccggcgcggcggccgggtatggcggccacggagcagctgaaggagctgggggagaagctgcaggcggtggcgccggctcctgcggacgaactcgccaagctcctcgagctcattgctgaagcatgggatgcaggaggtctctatcaagttggtcagtttcctcactggaacgtttggtcagagtggaatggtaaggtaagatactttcaaagacttgaaagtctttttgctacttggtactttctaaataacaaatgaagccttgtcaaatactgaatgtaagtttcaacagatatatttaaatagatgagtgcttctatctacctgtgaattgtctatagctgtgtttatacggcggtttaattttggtaatatcgatactatttatcacaggagacaattc

SEQ ID NO: 144128 - DNA, 1060 bp, Zea Mays
aaaattagacattaccatcgcatcgcaaaaaccactcgagcacaattcaagcagcagcgaaggtagccacaacatccactctactactcgagagctaagaaatcgttcaacaggtgatccagaacaaagatgtgtccgaccaagaaggagatgagtgccgagtcgtcgggctcggcgagcagctggacttcggcctcggcctcggcctcgacctcgacctcgccggagcaccagaccgtgtggacgtcgccgccgaagcggcccgcggggcggaccaagttccgcgagacgcggcaccccgtgttccgtggcgtccggcgccgcggcagcgccgggcggtgggtgtgcgaggtgcgcgtgcccgggaggcgcgggtgcaggctctggctcggcacgttcgacgccgccgaggccgccgcgcgcgcgcacgacgccgccatgctcgccatcgccggcgcgagcgcgtgcctcaacttcgccgactccgcgtggctgctcgcggtccccgcctcgtacgccagccttgccgacgtccgccgtgcggtcgccgaggccgtggaggactttcagcgccgcgaggcggccgccggggacgacgcgcgctcggccacatcgccgacgccgtccacctcgggcaccgacgacgatgctgccactgacggcgaggagtcgtcaccggccacggaggtctcgtcgttccagctcgacgtgttcgataacatgagctgggatctatactacgcgagcatggcgcagggaatgctgatggagctgccgtccgcagttccggcgttcggagacgacggctacaccaatgtcgccgatgtgccactgtggagctactagaattgaggacgttgataccttgaatttctcttctttttccagttggctccccatgccaaattttgggactgtagtggtaatgaaaacagagcaagtttggaaaaggaaaacagagcatgccccctgactccccaaaacagagcacgcgacacaaacagaggaagttggtagcttgaacctgttcccgagcacctgtcttcacaataaaaaaaaa

SEQ ID NO: 144129 - DNA, 825 bp, Zea Mays
aaatcgaaaaccactcgaacacaaactcaggcaaggcaaaaggaacccgcaccatccgaggctcaagcagagaagtgatcatcatcatcagaagaagatgtgcccaaccaagaaggggatgaccggagagccgagctcgccatgcaggtcggcatcagcctcgaccttaccggagcaccaccagacggtgtggacgtcgccgccgaagcggccagcggggcggaccaagttccgggagacgcggcacccggtgttccgcggcgtccggcgccggggcagcgccgggcggtgggtgtgcgaggtgcgcgtgccggggaggcgcggctgcaggctctggctcggcaccttcgacacggccgaggcggcggcccgcgcgcacgacgccgccatgctcgccctcgccggcgcggccgcctgctgcctcaacttcgccgactcggcctggctcctcgcggtcccggcctcgtgcgccagcctcgccgaggtccgccacgcggtcgcggacgccgtggaggacttcctccgccatcaggtggtcccggaggacgacgccctcgcggccacgccgtcgtcgccttccagcgaagacggcaacacctctgatggcggggagtcctcctctgattcctctccgcccaccggggcctcgccgttcgaatttgatgtgttcaatgacatgagctgggacctgcactacgcgagcttggcgcagggattgctcgtggagccaccgtccgcggtcacggcgttcatggacgaaggcttcgccgatgtgccgctctggagctactagagactgaaattttccgtttctttgcttggcct

SEQ ID NO: 144130 - DNA, 118 bp, Zea Mays
gtttggcaactccatctttctaaggccttgttcgtttgtgtcggattacacccgaaatcgttacagctaatcaaagtttatataaattagagaagcaatccggataggaatcgttccg

SEQ ID NO: 144131 - DNA, 381 bp, Zea Mays
accttggcaacgcgggatgtagcgaccacacatgccaacaagatcgccggagcagtgggcgtatggcggaagtgacgtgtgcgcagggcatgacggcggccatggctacgcggctgcggcggcgtccgggcacagcaacacgtaggggatgggcaggggctctaatcgcacgcctccatggggcttttgcggagggtgctgggagctcggccagaggacgtgcacgtggggcttctctgcaggatgacgagcgcagcgagggcgaggcgagcgcgagatgcagcaaggtgaggcgagatgccgcgaggcgaggacgtggtgcggcggctgcgcgcaagacgtgagggagtggcggtttgaggaagatgaacagtgtgcagc

SEQ ID NO: 144132 - DNA, 745 bp, Zea Mays
aaagtcaaaacaacttataattaggaacagatggagtaagttctaatgctcaagtggttagatatctgcatcactggaaattcaatgaaaatatcctcgtcatgctactaacggtgttatgtgacgatgaagtctggagtatctcactcgttcttactaattgagatttgatattttaaggttttctagttctctgtcttgttagattaaaactatgtcaattttagcttagatctaatgccatgttttttttatttttaccctctgacaggcaggttgttgcatgtcattcacattgattaaagaatagctcaagaaaaaagacctaaactaaaatgccaagatctttagttgttgggtttatatgtttgttgcgatgaaagtgattattatgttgtttcttttgatattacagttgggatccactgtgattaggttgaagacaaaggatggtgtcgtcctcgctattgagaaacttgtgacctcaccactactgcatttgtggctgaggctagaatagaagggaagaatctaagacctctattgaagcagattgtatagaagggaagagtcttcaagatattggtcttgtagttgcaacaaagagaagagacaatggtggtgatgctatatctatagaagtagcaacgttggtattgtagctccaagatttggttgttgatgaatgatatatatgataatacattgttaagtatatgtgataatcattgattgttatttaatt

SEQ ID NO: 144133 - DNA, 873 bp, Zea Mays
gtcagcgccctcacctgacagcctcgctctagccttcagcccacgctcgtcgcgcccccacagccagcgcccttgccccggccatctttgtctagcctccagcccacgcccgccgctcgtcgcctgcgccatggtgccagctagccgctgcctagcccagccctagtaggcaccagtcgcactgccctaggccccacacatctgccctgtgagcgcaggaggtttctgtgcgttttttgggagaggactgaatcaataattggttctttatctcttgtacttcgttgggattctttactcttgtagaatttataattatgtctcatatagattatatatttgctggaatcaaagttaacttgatgttttattgaggcagggccaacatgatccgaagatgatgatacaagttccacactgacagtggaaacatttagcttctaagagctctctgctacaactaataatttcagtaagactctcaggataggctctcggggccaaggcacagtctatgaaggccacttaccccgcattgtatagttgggatccactgtgattaggttgaagacaaaggatggtgtcgtcctcgctattgagaaacttgtgacctcaccactactgcatttgtggctgaggctagaatagaagggaagaatctaagacctctattgaagcagattgtatagaagggaagagtcttcaagatattggtcttgtagttgcaacaaagagaagagacaatggtggtgatgctatatctatagaagtagcaacgttggtattgtagctccaagatttggttgttgatgaatgatatatatgataatacattgttaagtatatgtgataatcattgattgttatttaatt

SEQ ID NO: 144134 - DNA, 216 bp, Zea Mays
aaaactatggagagatgcaagttcgtttattctctaaaccagtttttaaatacgaatttctacagaaaaacttttccactaaaacatacaaacatatagatccaatagttagagcatttcataaagaagccaacaaaacaaatttcgtgattttaggagctctaaaactcgagatatgaattttagaacacgacacaaaaatctgaaattttgagt

SEQ ID NO: 144135 - DNA, 1848 bp, Zea Mays
aacactggcaatgccagctcccgtcgatgccaccacaacagcacacagacgtgtggcccctctgcagcaaaaaccagaggccgcggcaggcacggacgcttcacgcgcaggccgcggactagcgccatggcgacgtgccggtgccccgagccggcgcaatgccatcacaggccgctcctctcgacggccaagggctaccctaagctgcacgaccgcccaaggccggcgcccggcagcgtcctcgccgaggtggccgccatcctctgcctcaccgggccaatggccggcgcggggatcctgttctacatgcgctccctcgtgtccatggtgttcctcggccgcctcggccagctgcccctcgccggcggctccctcgcgctcggcttcgccaacatcaccggctattccgtcctctccggcctcgccggcgggatggacccggtctgcggccaggcgttcggcgcggggcggacggacctcctccgcaccgcactccggcgcactgttctgctgctcctggccgcgtccgtgcccatcgccatgctctgggtggccatgaaccgggtcctcgtctccgcggggcaggaccctgacattgcggccacggcgtacgcctacatcctctgctgcctccccgacctcgtgctgcagtgcttcctccacccgatccgtatctacctgcgcgcgcagtccgtcacgctgccgctcacctacggcgccgccgccgcgctgctcctccacgtgcccatcaacttcctcctcgtcagcgtcctcggcctcggcgtccgtggcgtcgcgctcggcggggtctggaccaacctcaacttcttgctgttcctcgtggcgtacgtctacctccgcggaatgtacggcacccatgacgatgacggcgccaagaagggcgcgtccgtggcggcgccaccagccgaggaggtggaggaggagggcgccaaggagtggtggagcctggtgaggctgtgcgcgcacagctgcatgtccgtctgcttggagtggtggtggtacgagatcatggtgctcctctgtggcgtgctcatcgaccccaaggccgcggtggcttccatgggggtgctcatacagaccacgtcgctgatatacatcttcccgcactcgctcggctgcgccgtgtccacgcgagtcgggcacgagctgggcgcccggaggccggagcgcgcgcgcctcgtcgcgcgcgtcgggctcggcctgggcgccgcgctcggcctcgtggcctgcgcattcgccgtgtccgtgcggggcgtctgggcacggatgttcaccaccgacgaggccatcctgaagctggcggcggcagcgctaccgctgctcggcatggccgaactggggaactgcccgcagacggccggctgcggggtgctgcgcggcagcgcgaggcccgggaaggcggcgaggatcaacgtctcggcgttctacggcgtgggcatgcccgtggcgctggcgctggcgttctgggcccccgggctggacttccgcgggatgtggggcggcatgctggccgcgcagctcgtctgcgccgcgctcatgctgcgcgccgtgctcggcaccgactgggcggagcagacggagcgcgcccgccagctcaccggcgggcgcggcgacggctttgacgtcgtcggcattgtcgacgaggacaaaacaagccatgcagaagcggccaaagcagaggtcgggaacacattgttcatagtggcggattgcgtgattgcgtctagcggcgacggaaccaggacccgattcatggatgatttgcatcctcgattcattagatataggttttcttttttctttattagttttttttcctttttgtaa

SEQ ID NO: 144136 - DNA, 1633 bp, Zea Mays
gtttcgtcctgtcgatctgaatcttgatccgtctgctcgatcagtcgacgatcatggattcgacggagcctgaggtggcggctgcgacggtggagatgatgccgccgcacgtagtgtgcgtgccgtacccggcgcagggccacgtcactccgatgctcaagctcgcgaagctgctccacgcccggggcttccatgtcaccatggtgaacaccgagttcaaccaccggcgcctgctccagtcgcgtggccccgaagcaatcgacggcatcaccaggttccgctacgccgctatcccggacgggctcccgccctccgacgccaacgccacgcaggacgtccccgcgctctgctactccaccatgaccgcttgcctcccgcacctcctgtccctcctcaggaagctcaacagcgacgaccctagcagctctggcgcgccgcccgtcacctgcctcgtcgtcgacggcgtcatgtcgttcgcctacgacgcggcgaaagagatcggcgtgccgtgcgccgcgctctggaccgccagcgcgtgtggcctcgtggggtaccggcactaccagcagctcgtccagtggggcctcgtcccgttcagggacgaggcgcagctcgcggacgacgcgtacctcgacacggtggtccggggcacccgtggcatgtgcgacggcatgcggctgcgcgacttccccagcttcatccgcaccacggaccgcggcgacatcatgctcaacttcttcatccacgaggccgggcggctgtcgctcccggacgccatcatgatcaacaccttcgacgacctcgaggggtcgaccctcgacgccgtgcgcgccacgctccctccggtgtacactgtcggtccgctcctcctccacacgcgccgtgccgttacggtgggcagcgagctggacggcctcggctccaacctctggaaggagcaggacggcctcctagagtggctagacggccaggcgacaggctccgtcgtgtacgtcaactacgggagcatcaccgtgatgtcgaacgagcagctgctggagttcgcgtgggggctagcaggcagcggctacccgttcatgtggaacatccggccagaccttgtgaagggtgacactgccgtgctgccgccggagttcttgtcctccgtgaaggaccgggccatgctaacaacatggtgcccgcaggaggctgtgctggcgcacgatgcagtggggctcttcctcacgcactctgggtggaactcaaccctagagagcatctgcgcaggggtgcccatgctaagctggcccttcttcgcggagcagcagaccaactgccggtacaagcgtacagagtggggcgtcgggatggagatcggtggcgaggtgagacgcgcagagctgacagagacgataagagaggccatggacggggagaaggggagggagatgcaccggcgtgccgcagagtggaaggagaaggccatccgagccacaatgtcaggtgggtctgcggaaaacaatttgaacaaggttgtcaatgaggtgctgctccgcaagataggttgagtctccggtcaagaatacctttactcttgtgttgccaaacacaaaatgctcataaaagtctaccttactaatgttatattcgtcaa

SEQ ID NO: 144137 - DNA, 3021 bp, Zea Mays
agaaagcgaggcggtcgatgccattgcccagtcgcgcgcggctatgtggcagagccaggctcggtttggctggcgcccgcgccaacggttgcttggctgctaaggtcccagcccgcacgcacgccagcacgggcaagaggcccgtcagccgtggccgttctccgaaagcaagcgtgcccccgcaccagcaccagtactacccacgccacccgccttcacctactactcctgccacggtcaaaaccgcacggcaagaaacgaaccggaccggagccgggcaagaaaacgaaaaaggcttttgctccgcctcggcggcggcgtgcctggtttcctgtgccgtgatcgcgtggcgtcgtcacccgctcgcatgccgcgggcgttttttttttatcggtataaatattctgctgccctgtccctgagttgtacgcgctgttatgttcccagttctctctctctcttgcccatcccccacctcggctggctcagctcagctcctaaacccgcacctacctctctgcctgctgccccggcccctgatcctgatttccccaatcgagagtccgagacccgagaggaggcacaggcacctgcgctagctgcagctgcaaatcgtcttccccagatccggcgccgcctagttcgctcctgctcgcgacagcgcccagagccgtccgcgtgcgcccgcagagatcgtttcggggacagccgagcagagcagagcagagcagagctgactctgccgcttgttgcccgttcttggctgctgttgctggcgagagcgcgcaggaggagcggctgatttttgattctctctgtccctccctccctcgcttcgctcgcgcggggtgcgtgcacgtaccatgagaagatgatgcgcgccaggcccaaaggtacattcgccgacgcgatgagggagagctcccctcctcctcctccccctccggctccggcttcggcagcggtgaaagaggacgagtgggaggtgcggcccggcgggatgctggtgcagaagcggagccccgacgccgacgcccccgccggggcgcccgtccccaccatccgcgtcaaggtcaagttcaacggcgtgtaccacgagatctacatcaactcccaggcctccttcggtgagctgaagaagatgctgtcggcgcggaccgggctgcaccccgaggaccagaagctggtgtacaaggacaaggagcgggactccaaggcgttcctggacatggccggcgtcaaggaccgctccaagatggtgctgctcgaggaccccgccgcgcaggccaagcgcctcctcgagcagcgccgcaccgacaaggcggagcgcgccgccaagtccatctcccgcatcggcctcgacgtcgacaagctcgccaccaaggtgtcggcgctggaggccatcgtcagcaagggcggcaaggtggtggacgctgacgtggtcgccctcaccgaggcgctcatgaacgagctggtcaagctggactccatcgccgccgacggcgaagtcaaggtgcagcgacgaatgcaggagaagcgggtgcagaagtacgtggagacgctggacgctatccgcgccaagaacgcggcggcgcccaaggccaaggccaaggccaacggcgacatgaatgggcacgccaaggcccgcgcgccgcaactcccgccgcgcccgccgcccgtgtcgcagaggcggaacttccagcagccctccccggcgccagcgccgcccacgcagggctgggagtcgttcgacctgctgtcgtcggtgccgtccacgtcctcggccaccgtgaccaccaccatggcggccgcgaccaccaccacctcgccggccggcgtctccccgatcccgcggttcgactgggagctcttctgaagccctccctcctcgcggcgcgtcggcgtgccggttggtcgatcagacggtacctacctcccttgtccatggatcttccctgctctcatcagtagtgccattgtttcttctgtggattctttccatttcttttcgcctcattctctcttcttttcttccatttcctttcgaatttgtatatctactatatgtctacaaaaagaacagagagaccgacgcggtgcggtgagtgtgttcactgggtcaaaagtccgtcagttgacaactcctcctcgtgaggatccatccatgcatgttgttcagtcacagcaaataagtggtggtcttattatgatggcgatgaagaagttttcatgacagtacacacacatataaatagcatgtatattttggtaacatttatttatacgcttgtgtatggttacgatgattgcttgatttccattccagtgcaattgtgcaaagcttgtgtgtgtgtgagagagggggcgactgagatttgctgtgcaggcgcatcattgattgggttctgggggcttctgttttgtggccttgtgggagccgggcacaattattggtggccaccccgcgtgggcgtgcctgccagtccaggcgcggcgggaccgacgggcgccggccgaccagtgagggtgctctgctcgactgattcgtgactgggtgcgctgtgttatgtctcgccctcgcgaaaccgtgtgtagtgtgtgcttctctatttcagtcaacgcttcagtacagtttcaatttcattgcttcgaatgctaacatctttttccttctcgatttggaaattggcacatctcacctgactcagcaattattttttttactcttacttatgccaatatttaggcggtggtcagaaacatttgttagttttatatgaattgattttacttaggaatgaagggagtatttagagttggtttgtaaccacgttttttttttttgagttttgagtaaccacgtcttaataaaattcagatgttagtagctttttttttgaaccaggtgttagatacttatcaacatagtttgtattagtgcatagttacgtctaactaaaaaaatacgtacaagccctcatagaaaagcacaagtcttatcccttcgtctaaaataaaaac

SEQ ID NO: 144138 - DNA, 2300 bp, Zea Mays
agaaagcgaggcggtcgatgccattgcccagtcgcgcgcggctatgtggcagagccaggctcggtttggctggcgcccgcgccaacggttgcttggctgctaaggtcccagcccgcacgcacgccagcacgggcaagaggcccgtcagccgtggccgttctccgaaagcaagcgtgcccccgcaccagcaccagtactacccacgccacccgccttcacctactactcctgccacggtcaaaaccgcacggcaagaaacgaaccggaccggagccgggcaagaaaacgaaaaaggcttttgctccgcctcggcggcggcgtgcctggtttcctgtgccgtgatcgcgtggcgtcgtcacccgctcgcatgccgcgggcgttttttttttatcggtataaatattctgctgccctgtccctgagttgtacgcgctgttatgttcccagttctctctctctcttgcccatcccccacctcggctggctcagctcagctcctaaacccgcacctacctctctgcctgctgccccggcccctgatcctgatttccccaatcgagagtccgagacccgagaggaggcacaggcacctgcgctagctgcagctgcaaatcgtcttccccagatccggcgccgcctagttcgctcctgctcgcgacagcgcccagagccgtccgcgtgcgcccgcagagatcgtttcggggacagccgagcagagcagagcagagcagagctgactctgccgcttgttgcccgttcttggctgctgttgctggcgagagcgcgcaggaggagcggctgatttttgattctctctgtccctccctccctcgcttcgctcgcgcggggtgcgtgcacgtaccatgagaagatgatgcgcgccaggcccaaaggtacattcgccgacgcgatgagggagagctcccctcctcctcctccccctccggctccggcttcggcagcggtgaaagaggacgagtgggaggtgcggcccggcgggatgctggtgcagaagcggagccccgacgccgacgcccccgccggggcgcccgtccccaccatccgcgtcaaggtcaagttcaacggcgtgtaccacgagatctacatcaactcccaggcctccttcggtgagctgaagaagatgctgtcggcgcggaccgggctgcaccccgaggaccagaagctggtgtacaaggacaaggagcgggactccaaggcgttcctggacatggccggcgtcaaggaccgctccaagatggtgctgctcgaggaccccgccgcgcaggccaagcgcctcctcgagcagcgccgcaccgacaaggcggagcgcgccgccaagtccatctcccgcatcggcctcgacgtcgacaagctcgccaccaaggtgtcggcgctggaggccatcgtcagcaagggcggcaaggtggtggacgctgacgtggtcgccctcaccgaggcgctcatgaacgagctggtcaagctggactccatcgccgccgacggcgaagtcaaggtgcagcgacgaatgcagcgggtgcagaagtacgtggagacgctggacgctatccgcgccaagaacgcggcggcgcccaaggccaaggccaaggccaacggcgacatgaatgggcacgccaaggcccgcgcgccgcaactcccgccgcgcccgccgcccgtgtcgcagaggcggaacttccagcagccctccccggcgccagcgccgcccacgcagggctgggagtcgttcgacctgctgtcgtcggtgccgtccacgtcctcggccaccgtgaccaccaccatggcggccgcgaccaccaccacctcgccggccggcgtctccccgatcccgcggttcgactgggagctcttctgaagccctccctcctcgcggcgcgtcggcgtgccggttggtcgatcagacggtacctacctcccttgtccatggatcttccctgctctcatcagtagtgccattgtttcttctgtggattctttccatttcttttcgcctcattctctcttcttttcttccatttcctttcgaatttgtatatctactatatgtctacaaaaagaacagagagaccgacgcggtgcggtgagtgtgttcactgggtcaaaagtccgtcagttgacaactcctcctcgtgaggatccatccatgcatgttgttcagtcacagcaaataagtggtggtcttattatgatggcgatgaagaagttttcatgacagtacacacacatataaatagcatgtatattttggtaacatttatttatacgcttgtgtatggttacgatga

SEQ ID NO: 144139 - DNA, 2306 bp, Zea Mays
agaaagcgaggcggtcgatgccattgcccagtcgcgcgcggctatgtggcagagccaggctcggtttggctggcgcccgcgccaacggttgcttggctgctaaggtcccagcccgcacgcacgccagcacgggcaagaggcccgtcagccgtggccgttctccgaaagcaagcgtgcccccgcaccagcaccagtactacccacgccacccgccttcacctactactcctgccacggtcaaaaccgcacggcaagaaacgaaccggaccggagccgggcaagaaaacgaaaaaggcttttgctccgcctcggcggcggcgtgcctggtttcctgtgccgtgatcgcgtggcgtcgtcacccgctcgcatgccgcgggcgttttttttttatcggtataaatattctgctgccctgtccctgagttgtacgcgctgttatgttcccagttctctctctctcttgcccatcccccacctcggctggctcagctcagctcctaaacccgcacctacctctctgcctgctgccccggcccctgatcctgatttccccaatcgagagtccgagacccgagaggaggcacaggcacctgcgctagctgcagctgcaaatcgtcttccccagatccggcgccgcctagttcgctcctgctcgcgacagcgcccagagccgtccgcgtgcgcccgcagagatcgtttcggggacagccgagcagagcagagcagagcagagctgactctgccgcttgttgcccgttcttggctgctgttgctggcgagagcgcgcaggaggagcggctgatttttgattctctctgtccctccctccctcgcttcgctcgcgcggggtgcgtgcacgtaccatgagaagatgatgcgcgccaggcccaaaggtacattcgccgacgcgatgagggagagctcccctcctcctcctccccctccggctccggcttcggcagcggtgaaagaggacgagtgggaggtgcggcccggcgggatgctggtgcagaagcggagccccgacgccgacgcccccgccggggcgcccgtccccaccatccgcgtcaaggtcaagttcaacggcgtgtaccacgagatctacatcaactcccaggcctccttcggtgagctgaagaagatgctgtcggcgcggaccgggctgcaccccgaggaccagaagctggtgtacaaggacaaggagcgggactccaaggcgttcctggacatggccggcgtcaaggaccgctccaagatggtgctgctcgaggaccccgccgcgcaggccaagcgcctcctcgagcagcgccgcaccgacaaggcggagcgcgccgccaagtccatctcccgcatcggcctcgacgtcgacaagctcgccaccaaggtgtcggcgctggaggccatcgtcagcaagggcggcaaggtggtggacgctgacgtggtcgccctcaccgaggcgctcatgaacgagctggtcaagctggactccatcgccgccgacggcgaagtcaaggtgcagcgacgaatgcaggagaagcgggtgcagaagtacgtggagacgctggacgctatccgcgccaagaacgcggcggcgcccaaggccaaggccaaggccaacggcgacatgaatgggcacgccaaggcccgcgcgccgcaactcccgccgcgcccgccgcccgtgtcgcagaggcggaacttccagcagccctccccggcgccagcgccgcccacgcagggctgggagtcgttcgacctgctgtcgtcggtgccgtccacgtcctcggccaccgtgaccaccaccatggcggccgcgaccaccaccacctcgccggccggcgtctccccgatcccgcggttcgactgggagctcttctgaagccctccctcctcgcggcgcgtcggcgtgccggttggtcgatcagacggtacctacctcccttgtccatggatcttccctgctctcatcagtagtgccattgtttcttctgtggattctttccatttcttttcgcctcattctctcttcttttcttccatttcctttcgaatttgtatatctactatatgtctacaaaaagaacagagagaccgacgcggtgcggtgagtgtgttcactgggtcaaaagtccgtcagttgacaactcctcctcgtgaggatccatccatgcatgttgttcagtcacagcaaataagtggtggtcttattatgatggcgatgaagaagttttcatgacagtacacacacatataaatagcatgtatattttggtaacatttatttatacgcttgtgtatggttacgatga

SEQ ID NO: 144140 - DNA, 1919 bp, Zea Mays
agaaagcgaggcggtcgatgccattgcccagtcgcgcgcggctatgtggcagagccaggctcggtttggctggcgcccgcgccaacggttgcttggctgctaaggtcccagcccgcacgcacgccagcacgggcaagaggcccgtcagccgtggccgttctccgaaagcaagcgtgcccccgcaccagcaccagtactacccacgccacccgccttcacctactactcctgccacggtcaaaaccgcacggcaagaaacgaaccggaccggagccgggcaagaaaacgaaaaaggcttttgctccgcctcggcggcggcgtgcctggtttcctgtgccgtgatcgcgtggcgtcgtcacccgctcgcatgccgcgggcgttttttttttatcggtataaatattctgctgccctgtccctgagttgtacgcgctgttatgttcccagttctctctctctcttgcccatcccccacctcggctggctcagctcagctcctaaacccgcacctacctctctgcctgctgccccggcccctgatcctgatttccccaatcgagagtccgagacccgagaggaggcacaggcacctgcgctagctgcagctgcaaatcgtcttccccagatccggcgccgcctagttcgctcctgctcgcgacagcgcccagagccgtccgcgtgcgcccgcagagatcgtttcggggacagccgagcagagcagagcagagcagagctgactctgccgcttgttgcccgttcttggctgctgttgctggcgagagcgcgcaggaggagcggctgatttttgattctctctgtccctccctccctcgcttcgctcgcgcggggtgcgtgcacgtaccatgagaagatgatgcgcgccaggcccaaaggtacattcgccgacgcgatgagggagagctcccctcctcctcctccccctccggctccggcttcggcagcggtgaaagaggacgagtgggaggtgcggcccggcgggatgctggtgcagaagcggagccccgacgccgacgcccccgccggggcgcccgtccccaccatccgcgtcaaggtcaagttcaacggcgtgtaccacgagatctacatcaactcccaggcctccttcggtgagctgaagaagatgctgtcggcgcggaccgggctgcaccccgaggaccagaagctggtgtacaaggacaaggagcgggactccaaggcgttcctggacatggccggcgtcaaggaccgctccaagatggtgctgctcgaggaccccgccgcgcaggccaagcgcctcctcgagcagcgccgcaccgacaaggcggagcgcgccgccaagtccatctcccgcatcggcctcgacgtcgacaagctcgccaccaaggtgtcggcgctggaggccatcgtcagcaagggcggcaaggtggtggacgctgacgtggtcgccctcaccgaggcgctcatgaacgagctggtcaagctggactccatcgccgccgacggcgaagtcaaggtgcagcgacgaatgcaggtcagtgcgtacgcggtagccttaaattccttgccgcttcttggggacgaattcgcgcgcgccgagagctcaaccgcccgcccagcccaacccaaccgatgcgatgattgcgcaggagaagcgggtgcagaagtacgtggagacgctggacgctatccgcgccaagaacgcggcggcgcccaaggccaaggccaaggccaacggcgacatgaatgggcacgccaaggcccgcgcgccgcaactcccgccgcgcccgccgcccgtgtcgcagaggcggaacttccagcagccctccccggcgccagcgccgcccacgcagggctgggagtcgttcgacctgctgtcgtcggtgccgtccacgtcctcggccaccgtgaccaccaccatg

SEQ ID NO: 144141 - DNA, 1665 bp, Zea Mays
aaaaaaaagaacaaaaaggaagacagcgaagttgtctacatcacttgacttgcgagcgaccgcggctcacgtcggctgcataaattgcttcgtagactagtaccacacagtttgcgagaaggggagaggtagaggttccgaggtagagagatagagaggaggagagggagggcgaggcggcggatccgtcactccgttcttctccgctgatctggaggaaggaggcgaggtacgcactgctatctccttccagttcgttcgagaagacggtcgttgggtgattcggcgggcgctcctgttctgtagtaaagttgtttgttttttgtctcttgtatgtttggtttcttgatcggaaacagaagtcccaaattctttcttttgcttggtcaagtgccaattgggaggcagaacggaagacagaacctccatgcgaactttagtcgcgctgatttcgatggaatcggaactgatttaggtgtattttagctctgattgttcttggcaggagtacaattttagtagcaccgtttgatggtacggttcttctgggtggtaaattgcccttcctgcgacgcgatgtcagacttcgatctctgttggaagacgctagacattgcagacataaatatttttactgcaatcatgagctcgaaatccaaatgttaatcagttcacagttcagacaatcgcttgaacatgtttaaaagctggacgaggtttcatctactcgattgaatcctcgtcttcgccgctaaatcgttgcaggggagttgcaaatccatcaatggccactccaaccacctattcagtccgcatatcctcggagacccacaagattgaagcctgggtggtgtctgacgaagctttggccaggcaactgcaggaggaggagaacacgcgtgacgctgctgccgacaccagagaagtcgccggcaatgtacccttggagtcatcgtcaccggctgttgagtacaggcctgcacagaatgcagctcaggttgcaagggaagacaatgtggacccagataatatgtcatatgagcaactacaagcattaggggaagcagtaggaattcagtccagagggttatctgatgagctgatatcttatttggagccatttaggaacaagtgcactttcttctccaggaaaaagaacagtgaggaatgtgtgatctgcaagacaacatatagaagccggcagaaattgataagactaccctgcagccactgttatcacgcagattgcataactcgttggcttaagatcaacaaggcatgcccagtctgcaacgaggaggtgtttggatgaactgcaaggttcctggcagatgctgcggtttcatcgttacttgcttgcggcatgcttttgagaagacgttggacgcataaggtccattgtttgtgattatgttgtgagcctagtttggtgccctttgcttaagaggactggctctgcccatgcatgggtcggtctacacgtgtgctagtaactggaccaggtcgcgttttgtgatgcgtctatccatcttggttttatcacaaattgatagatctgttgtgtgggtagtttggttgccgttttctgaatataatggatggtgtttttgccccctttttgggagaagttcaagcaaagagcagttcaatactgtcggcgtttcg

SEQ ID NO: 144142 - DNA, 1129 bp, Zea Mays
aaaaaaaagaacaaaaaggaagacagcgaagttgtctacatcacttgacttgcgagcgaccgcggctcacgtcggctgcataaattgcttcgtagactagtaccacacagtttgcgagaaggggagaggtagaggttccgaggtagagagatagagaggaggagagggagggcgaggcggcggatccgtcactccgttcttctccgctgatctggaggaaggaggcgaggggagttgcaaatccatcaatggccactccaaccacctattcagtccgcatatcctcggagacccacaagattgaagcctgggtggtgtctgacgaagctttggccaggcaactgcaggaggaggagaacacgcgtgacgctgctgccgacaccagagaagtcgccggcaatgtacccttggagtcatcgtcaccggctgttgagtacaggcctgcacagaatgcagctcaggttgcaagggaagacaatgtggacccagataatatgtcatatgagcaactacaagcattaggggaagcagtaggaattcagtccagagggttatctgatgagctgatatcttatttggagccatttaggaacaagtgcactttcttctccaggaaaaagaacagtgaggaatgtgtgatctgcaagacaacatatagaagccggcagaaattgataagactaccctgcagccactgttatcacgcagattgcataactcgttggcttaagatcaacaaggcatgcccagtctgcaacgaggaggtgtttggatgaactgcaaggttcctggcagatgctgcggtttcatcgttacttgcttgcggcatgcttttgagaagacgttggacgcataaggtccattgtttgtgattatgttgtgagcctagtttggtgccctttgcttaagaggactggctctgcccatgcatgggtcggtctacacgtgtgctagtaactggaccaggtcgcgttttgtgatgcgtctatccatcttggttttatcacaaattgatagatctgttgtgtgggtagtttggttgccgttttctgaatataatggatggtgtttttgccccctttttgggagaagttcaagcaaagagcagttcaatactgtcggcgtttcg

SEQ ID NO: 144143 - DNA, 1039 bp, Zea Mays
gaaatgggtttgagtgccaaaatcctgcgagatccatcacctggaagctactgttctggacgtacctcttggttttgctcgtgcgctgtgagccacaccacagccactatctgtgcgacgaagacctgccaccggtttggggagttgcaaatccatcaatggccactccaaccacctattcagtccgcatatcctcggagacccacaagattgaagcctgggtggtgtctgacgaagctttggccaggcaactgcaggaggaggagaacacgcgtgacgctgctgccgacaccagagaagtcgccggcaatgtacccttggagtcatcgtcaccggctgttgagtacaggcctgcacagaatgcagctcaggttgcaagggaagacaatgtggacccagataatatgtcatatgagcaactacaagcattaggggaagcagtaggaattcagtccagagggttatctgatgagctgatatcttatttggagccatttaggaacaagtgcactttcttctccaggaaaaagaacagtgaggaatgtgtgatctgcaagacaacatatagaagccggcagaaattgataagactaccctgcagccactgttatcacgcagattgcataactcgttggcttaagatcaacaaggcatgcccagtctgcaacgaggaggtgtttggatgaactgcaaggttcctggcagatgctgcggtttcatcgttacttgcttgcggcatgcttttgagaagacgttggacgcataaggtccattgtttgtgattatgttgtgagcctagtttggtgccctttgcttaagaggactggctctgcccatgcatgggtcggtctacacgtgtgctagtaactggaccaggtcgcgttttgtgatgcgtctatccatcttggttttatcacaaattgatagatctgttgtgtgggtagtttggttgccgttttctgaatataatggatggtgtttttgccccctttttgggagaagttcaagcaaagagcagttcaatactgtcggcgtttcg

SEQ ID NO: 144144 - DNA, 3018 bp, Zea Mays
ctcaaagactagcaaagaggtcaggtgaccggctcaccgctcggagtcgcggcttcagaaatcagaatcagagcacctgcctctcttcagtttgttgccgtctctctctctcctcttgacgcaactcctctcctatcttctctctctccatcgctccctcctccgcgccgcgttggcaccgaaccctcctgtcatggcaaggccgccgaaggaggcgattgataccttcatcagcatcacgggggcggacgaggccgtcgccgtacgcaaactcgaggaacatggtggtgatcttaatcgagcaataaattcacatttcaatgatggagacagcatattgaacggaatcagtcaaaacgccatgcctgctagtcgtgatgatatgatggacctggatggaccacttgataatacatttcaaagatctttgttgccagagagtttccgtgccccttttgctctaatggatccaaatttccaggaccaattttttgacagagttggctccactgatggtgtcattcgtgaaccgctagtttcacatccaagagaggtgagggagatacctatcgaagttaaggatggtgatcctcaaacaggttcatctggccaggatgttactggaaatgagtcttcaaatggccctgaagtccctgaaactatcataattgatgatgtggacggtggattgttatctgcaccatctgttccacatcctattattcctagcaatacatctactgtgccaactgctcctccattggttcatgttaatgactatgatgaggacatagaagaggaaatgattcgggcagcaattgaagcttcaaagaaggattctgaaggactggcaaatatagtcgagcaaggaggccagcatcaagaggaagtgaatttgagggaccattcttctgataaagcaggcatggaaaccgcaaatggaatagttgagaggcaaggactagcttcagaaaaggctggaacatctaggcaaccaatagatgacgagagcttccaggaggaggctgaagatgtagaagaacagccgttagttaggcgtcgttctcggcgtgccccttctgaggacaatgaattaccaaaaatagtgcacccaggtgctagccctgttctgaacaatcaccagtataatggagatgatttcccatctgagtggggtggcatttcttctgaggaacatgatgaagctgttatgcttgaggctgcaatgtttggtggagttcctgaaggaccaacatatcctttctctatgccttctcacagaacctctacttattatcccccaatatctcattctccatcaccagcattaactgaacagcggttattacgagagcagcaggacgatgagtaccttgcatcgctacaagctgatcaagaaaaggagttaaaggccctacaggaggctgagctccgtcgccttgaagaaacagctgcgagagaagctgttcttgagaaacagaagcaagaggaggaggaaaggcgtaaaaaacaacttgaggaagaggaactagagtccagtctcacttcgaagcaagcatcattaccaccggaaccgtctccagacgcagagggtgctgtgacagttgtagtccgaatgcctgatggtagtcgacaggggcgccgctttctcaaaactgataaacttcagttcctatttgatttcttagacattgggaggacttgcaagccagggacctacagattggtgaggacatacccaaggcgcacgtttaccaacagcgagggtgacgtatcattcagtgatcttggcctaacaagcaagcaggaagccctgtttctagagcagatcacggggtagaggataatcgttaggcatggttagagataccacagctgggcaggagaattttacacaaaatacttgcaccatatcgccagtgaaaactcggtctgtcaaattggttgggttggtcgaagaaaggttaaaaattcttttgtggcgccatgtgtcgtgacgcattgcgctttgcatgcaaattggttgggttggtcgaagaaaggttaaaaattcttttgtggcgccatgtgtcgtgacgcattgcgctttgcatgctttacgttattatatatatgcgtgatactttatacctacgcatgcatgatgattcgtttcagtgagccctgctgtgcagagtgggttctgtattattgttggttctttgaatcaaagcgatgttgcacattgcacagccacaggccggtcgtgtgcgtacaagatcgcaaaagggcacgcgaccctcaagagtttgctttagcattcactacgaatgacggaatgaggacaccgagtcgactcgacgccggtggccttttattattcagcgtgtttggatcccttgccttttgcccagtgcatcgcactggctatcatcagctcattactctgcacgcatgacagcaaagagcaaatcatcagcacggcatataaaaaacgacaaataaagacacatttttcatgcgtggcggatggcggcatggcgcagtgtgtgtcattcatggcggatcagcacgacaaataactagagatggaggccttacggcagctgactggcgggaggccgcacttggccggcaggctgttgatgatgctgaacgttccgcaggcgcagtccctggacacggcccccagcgcggagcagcactccggcccgggcgccggcggaacctgccccggcaagggtggcacgctgtagcgcaagcagggggccagcccgcgcagctgccccgcgcacgtctgctgcgcctcggcgccaccgcccagccccgctgccaacaccaggagcagcagcagggacagcgccgcgggcaggccgcgcggctgcaccttgccgccgccggcggctgtcgtcgtcgtcgccgtcattattccaaactgaaaagcaccggccgacctgaccgtcgtctcgcgtacgcggaccagcagcgtgcgtgctgcttcgcacgtactggctctggactgggtcgcggtgtgcgtgt

SEQ ID NO: 144145 - DNA, 603 bp, Zea Mays
atggagctgccagaggagattgggcggccgaggaacttgccggcgagggcgcagacgcggtccagctcgtccttgagccgcgcgttctctatgcggaggtgctgctcctccagcgacacctccccgagcacggccgcgccgccacagttggcgcagatggggttgcgcatcgcctcccggatcgtcatgttctccgccctcagcttgtcgttctcctgcctcagcagcgcgttctcgtgccgctcgatctgcgtcttcatctgcgtgcggcggttctggaaccagaacttgacctggcggctctctaggttgagccgcttgctgagctccatcctttgcttctcgtcggggtgggggcactccttgaacacagcttcgagttcttggatttgctgcggtgtgtggcggtggtatcgcttcttcttcctgcgagggttactgttgtccgggtcgatctcgtcaccggaggcgccgtcgacgttgtcgctgcctgaccggctgtcgatctcgtcctcacggccgcggcccagcgagtccccgtcgcctccgctcccgctcccgccgccgccaatcaggcccatacgacccaagtcgcccagctga

SEQ ID NO: 144146 - DNA, 2772 bp, Zea Mays
gttataagattgtctgcatccaatcacaaagccccacagaaattggcccaagactaaagcaacctgtaccgcctcagcccaactaaaagcctgacccaacccaacacttcatacaccctcaacggcaaggtcagagtcagacacacctcccccttgcagaatcccacacaagtctcgatgctccgccgcatagcggccctccggccgccgtctcgagcggccgcgccattgggggcgattgcggcgccctattcctcgaagtccacatccatccctcagaagcagcagcgcgtccgagaccatgccttcgacggcgtcatggaggtccagaagcgcgtccgccgcttccacgccctccacgctctcatcctctacgccgccgcccccaccgcgccctcccgcgccggcggaagcggcgccgtgtccgtccccttcacccgcctcggcgccctcgcgcgccgccagttacgcctcgcgcccctcgacgctggccgctttctcctgcgccacgcgcacgccttccacctcttcctccaccccgtccaccgcatgctccacatccgcctcaccccacgcgctgcagcggtgctcgacgctgaggccgacgccgtcgccgccgcactccccggcatctccgtcctacgcctccgcaagctcctcctccttgcgcccccgcaccgccgtctccgcctcgagcacatccacctcctccgccgcgaccttggcttcccagacgatttcgcccagtctatcatccagtccaacccctccctcttccgcctcacccctgacggcttcgtcgaattcctgccgtcccccaccgacccgcccgatctcaccgtcgccgccgtagagcgcgcccgggagcgccactaccgcgagcaccgcgcgcccggctccgccgaggaggacgcgcgtttcgcgttccccattcgtttcccgccagggtttaagatcggcaagtacttccggatcgctgtctggaaatggcagcgcctcccctacgcttcaccctatgcagacgtcacgggccatgacctgcgttcgcttgaggcacaacgccgcatggaaaagcgcgcggtcgctgctgtccacgagtttctctcgctcacagttgagaagcgcaccacattggagcgccttgcgctgttccgcgatgcactcggtgtgcccaagaagatcaaagagttcttgctgaagtaccagggtatattctacatatccacgagggggaatcagggtaagctgcatacggtgttcctcagggaggcgtattacaaaggggaacttgttgacccgaatgcaatacatgatgcaagacggaagctggaggagttgctcatgatcaacccacagagggcgaatttggacagaatgttcaccagcatgggccgtgggtgggatgaacttggtggcagccgccgtggtggatctgaactgagggatgagtttcttggcgatggaggtggcaggaaaaggaatgctgatgctgatggggctgagagtggggaggactcgggtgttgaatcactgtacattgattgagaaatagaattatatatgaaggctctggacatcaacttgcaagctggtttgtgagcaggcactcgttccctttggaaaaggtttaacttcttgcattggcatcatcaccactatagcatttctagctaatcggtcagctagaaaggtattttctgtaggattgtggtataaattttttcttatggtcatatccatgttgatgccttattatccagtccagagtaatatcacattgttccttcatacaggtgatgggctcagaagtcagaactgtcagcaaggatatcacattcatgaacctgcaatgagtcgataagatggagaccaaggaaaagtctaaaggcctccacgtgagggctggttcggtggatagagaaattgaggagatccatgagcagggatcctcttgctatttaggcttgtttggttattccaattccatgtggattgaagtgtattggaatgtattgggtagattttgacttgctatgaatttaaaccgactcaatactattcaatccacatggattaacggtgaaatgaacaagccctagaggatctctctccatggatctcctttattttcctgtttgggatcccttctctatgaacccctccatttctctgtccactaaaccagccctgaatgggagaaatagcttgggaagtttttgcctgaacgtttagtgtccaaggaggctggaaaccacgatatgttctgtaaatgcctagaccagtctcctggcattggtatgtgaggcatcatacctgcaacaacagttagattggtatgtgaggcatcagacctgcaacaacagctatattggtatgtgaggcatcagacctgcaacaacagctagattgttatgtgaggcatcagacctgcaacaacagctagattgttatgtgaggcatcagacctgcaacaacagctagaaagggaaccacattcttcatgatgattattgcttcaagggttctgaaacctgttacctgaaatttgttgttaacaacgcaaacttcatattgagccttgccttttgcacagcctttgcctgaaaaaatcatagagtggatatgccattcttttttcaatgtcatcagaacagctcagtcactgcacatatagtgtaaaatctcatggtaagagccttgcagtagattttgatagctagagaatgaaaccaaactgctgcaaaactacaacggaacaaaatatatcatttt

SEQ ID NO: 144147 - DNA, 638 bp, Zea Mays
ccggatagtggagtatcggaggatggaggttggagctggtgagccgccgcagcggcgctgtgcccgtatcccatggaggagtggagccgtcagctcagccgtggaggtggaggcgtcaggcgtggccgcatcctgagtggagaccaatattctgctgtgagatctggtagccgcggctgcgctgagctaggtggatctggatctgggcggggtagtggtttggatcagagagtggccggctcggcggcggcgtgggtggaggcaaagatggatcggccgctagcgttgtcgtcagagatggatcggccgctagctgcctgcttttccctgttactcgtggcaatggatcaccgccgcaagcatctcgctaaacccgatctacatggcgggctaaacagaaaggcccgtgtgctccgcctgcttcctcccgtgacagcgtgcgctcgtggcttccctgcggcgctcggcgggccaccgctggctgccaacggcgtgcaccagacgctggatcgggctgcccagggcagttaactgcaatccggtgccactccttgagtggagatgaggcagatggggatgggaggataaggcggcggcgagtgcgtgcatggagacggcgagggcaggtttcacgatgc

SEQ ID NO: 144148 - DNA, 2446 bp, Zea Mays
atatgactctctccctagtccctacactttctcccccgtgtcccgttgctaaaagcttagagaaaaacctaatcggacagcactgtggccaagcagggcgcgggagatcgtacgccggcggcgaggtcctgcggtggcgggcctcggcagagtggtggtgctagcggagtgcagctgttgggttggtgggtaagagtgagaaggacatgaaggcgctgcggcgatccagcacctcgtcctcgccgacggccgcgtcctcccctccgtcctcatcgtggatccacatccggtcgctcctcgccgccgccgcgtcctcgtcctcgtcctcctccttcgcagcggctgcggctgggagcgcggtggctgtggtgtcggctgcggtggccgcctcgtcttcttcctcgccggcgtcgtcctcgccgcactcggagcggggtggtcttaaatctccatggtcccggaggaaaagaaaacgagcactttctcgtgaacagtgggagagtttgttttcagcaaatgggaagcttcgtgatggtggaaggaagtttctcaagaaagttcgcagtggtggcattgaagcaagcattagggctgaagtttggcccttcctactaggagtctatgatttgaatagctctgaagaggaaaggaactctatcaagatcaagaaaaggaaacagtatgaaaagctgaggaggcagtgccaacaaattctgaatggctacaagggaaatgggttgaaggcaataactgaacttaatagtgatgagtgttctagtttagatggtattgctgaaggatcagaatcaccttgttttgaagatgccaatgctatacgtgctcctgtttcactcgaggaggtgaagcctgaacagaatgaagctgaccaaccagacaacattctctgtgatgttgttgaatgcatggaagaagatgcagatgagttagcttatgcatatccatgcaaagcagagtcagaatcgtctgattctgaatcatctgatgaggatgaccctggagggatttctgtgtctggcgacgagaactgtgacccagatactaaatttaccatgagcaattcattcaaggcagatttttttaggtctagcagaacatcagaggacttcgccacatggcagcgcatcataaggttggatgctatccggtcaaacagtgaatggattttgttctcccgcaaccagtctgaagttcccaaggagagagcattgcagtctgcagcatctgttgggttgaaagactatgagcacttggagcccagtatgatttatcatgcagctcgattagttgggttgctcgaagcatatgcggtctacgatccagagattggctactgccaaggcatgagcgatctgttgtcacctatcattgcggtgatggaggatgacgatgaagcgttctggtgtttcgtgggtttcatgaggaaagcaaggcacaacttcaggctcgacgaggttggaatacgaaggcaactgaagattgtctctcagattatcaagcgcaaagattcgcacctgtataggcatctgcagaagttgcaggccgaggactgtttcttcgtgtacagaatggtggtggttctgttcaggcgagagctcacctttgagcaaaccgtgtgcctgtgggaggttatgtgggctgaccaggcagccatacgagccgggatcgggaggtccacctggggaaggataaggctgcgtgctcccccaactgacgacctgttgctctacgccatcgccgcctgcgtcctgcagaggaggaagctgataattgagaagtatagcagcatggacgagatactgcgagagtgcaatagcatggccgggcagctagacgtctggaggctgctagatgatgcacatgacctggttgttaaccttcatgataaaatctgatctgatctgttctcggccctcatggtagaacagatgtactaagcctcaacaaaaggaaagaaaaaaaagaaactgaggctccttccacctacggcattgttcgtttattccaattccacatggattggagtgtattggaatggattaggatagatttttatttgctatggatttaaaccgacttaataccacccaatctacatggattaatggtgaaacggccaagccctaaggaggccaaatggtggtattctgttacctgctattcgttcccaccacagaacccaattctagatatagagaatgttgtaacttagagtgccctcgcaataaaaaggctgaaatattgcttgtgttcccgtgtagtgaggggttaacgtgttatagacttataggcaaaaacagagtttcctgggaagtcacttgggagttaattttatatgcatccgcacttgggagttaattagtagaaatagtatggtcaatgttttggtctctttttaatattatatcataagtcagaaggttggtta

SEQ ID NO: 144149 - DNA, 1935 bp, Zea Mays
atatgactctctccctagtccctacactttctcccccgtgtcccgttgctaaaagcttagagaaaaacctaatcggacagcactgtggccaagcagggcgcgggagatcgtacgccggcggcgaggtcctgcggtggcgggcctcggcagagtggtggtgctagcggagtgcagctgttgggttggtgggtaagagtgagaaggacatgaaggcgctgcggcgatccagcacctcgtcctcgccgacggccgcgtcctcccctccgtcctcatcgtggatccacatccggtcgctcctcgccgccgccgcgtcctcgtcctcgtcctcctccttcgcagcggctgcggctgggagcgcggtggctgtggtgtcggctgcggtggccgcctcgtcttcttcctcgccggcgtcgtcctcgccgcactcggagcggggtggtcttaaatctccatggtcccggaggaaaagaaaacgagcactttctcgtgaacagtgggagagtttgttttcagcaaatgggaagcttcgtgatggtggaaggaagtttctcaagaaagttcgcagtggtggcattgaagcaagcattagggctgaagtttggcccttcctactaggactatgatttgaatagctctgaagaggaaaggaactctatcaagatcaagaaaaggaaacagtatgaaaagctgaggaggcagtgccaacaaattctgaatggctacaagggaaatgggttgaaggcaataactgaacttaatagtgatgagtgttctagtttagatggtattgctgaaggatcagaatcaccttgttttgaagatgccaatgctatacgtgctcctgtttcactcgaggaggtgaagcctgaacagaatgaagctgaccaaccagacaacattctctgtgatgttgttgaatgcatggaagaagatgcagatgagttagcttatgcatatccatgcaaagcagagtcagaatcgtctgattctgaatcatctgatgaggatgaccctggagggatttctgtgtctggcgacgagaactgtgacccagatactaaatttaccatgagcaattcattcaaggcagatttttttaggtctagcagaacatcagaggacttcgccacatggcagcgcatcataaggttggatgctatccggtcaaacagtgaatggattttgttctcccgcaaccagtctgaagttcccaaggagagagcattgcagtctgcagcatctgttgggttgaaagactatgagcacttggagcccagtatgatttatcatgcagctcgattagttgggttgctcgaagcatatgcggtctacgatccagagattggctactgccaaggcatgagcgatctgttgtcacctatcattgcggtgatggaggatgacgatgaagcgttctggtgtttcgtgggtttcatgaggaaagcaaggcacaacttcaggctcgacgaggttggaatacgaaggcaactgaagattgtctctcagattatcaagcgcaaagattcgcacctgtataggcatctgcagaagttgcaggccgaggactgtttcttcgtgtacagaatggtggtggttctgttcaggcgagagctcacctttgagcaaaccgtgtgcctgtgggaggttatgtgggctgaccaggcagccatacgagccgggatcgggaggtccacctggggaaggataaggctgcgtgctcccccaactgacgacctgttgctctacgccatcgccgcctgcgtcctgcagaggaggaagctgataattgagaagtatagcagcatggacgagatactgcgagagtgcaatagcatggccgggcagctagacgtctggaggctgctagatgatgcacatgacctggttgttaaccttcatgataaaatctgatctgatctgttctcggccctcatg

SEQ ID NO: 144150 - DNA, 998 bp, Zea Mays
atgccggatgcgaggccgcccttgcttcgcctcgcctcggcgcgcgcaccctgcttcttacgctcaacattgaccggattgtgtggcagtattagaagtgtggttctgcttgaactcatcttctgccctacccagccttgtaaccctgctgttggtggccctgcaaagtctcaacttgtccatgaggtagatgcccttggtggtgaaattggaaaaattactgataggtgctacttgcaaaagcgtgtactgaacagctcaaaaggccctgctgtacgtgcactgcgtgctcagcctgataagagagagtatgcaatagagatgaagaacagtgtggaaagcacagaaaatcttttcattagagaagcaatggctacagaggttttaattggaaaaaatgacaccattgaggtttctggggccaagctgctcggctcctggggcgtggacctccccatcaggccgctgcacacgctccacctctactggcgcgtgaagcccggccaggagcagactgtctcgacgagcgccgggttcccgaccttctccagctacggcgacctgcccgtgtacggcgcgccgtcgctggagctcccggggctcatcaagatcagctgcattagatcttagagtacactgttttacacaatttggagttgttactactatcaagctttagactttagactttggagtacactgtttttacactgtattaagctttagccttttatgctacagtgtgtaaaaaagcaagctttagacagttaggctaatctatagacagtgtaaagcttgattttttgacaatacagttcaaattcttagaacaatgcggtctgaaagtttaatacagttctgacaatagagttgagtacactgttttgaggctaatatgtcaagcttagataccagtttgtcaagcttgtttaagtccaaatttgtatttacttagttgtgtaaattgggtacaatttgaagactgttttagttggtgt

SEQ ID NO: 144151 - DNA, 1130 bp, Zea Mays
aaaatctccgtttctccggagccaggctccactcgttccctgtcgtcgcagctcagagcatgcgcagccgcctcgcctcgcctggagctcacgcagccgcctcgcctggagctcgcgcagccgcctcgcctcgcctggagctcgcgcagccgcctcgcctcgcctggagcttgcgcagccacctcgtctggatctcgtgctagggttggagccagggtcctctcacagccgcctctatcctcgcctggagctcgcgctagggttcctctcgcagccgccgctgttgaggtgctacttgcaaaagcgtgtactgaacagctcaaaaggccctgctgtacgtgcactgcgtgctcagcctgataagagagagtatgcaatagagatgaagaacagtgtggaaagcacagaaaatcttttcattagagaagcaatggctacagaggttttaattggaaaaaatgacaccattgagggtgtttgcactttcttcagcatggactttatgcaccatctgttgtacttagcaccagaacattcatgagtgtttctggggccaagctgctcggctcctggggcgtggacctccccatcaggccgctgcacacgctccacctctactggcgcgtgaagcccggccaggagcagactgtctcgacgagcgccgggttcccgaccttctccagctacggcgacctgcccgtgtacggcgcgccgtcgctggagctcccggggctcatcaagatcagctgcattagatcttagagtacactgttttacacaatttggagttgttactactatcaagctttagactttagactttggagtacactgtttttacactgtattaagctttagccttttatgctacagtgtgtaaaaaagcaagctttagacagttaggctaatctatagacagtgtaaagcttgattttttgacaatacagttcaaattcttagaacaatgcggtctgaaagtttaatacagttctgacaatagagttgagtacactgttttgaggctaatatgtcaagcttagataccagtttgtcaagcttgtttaagtccaaatttgtatttacttagttgtgtaaattgggtacaatttgaagactgttttagttggtgt

SEQ ID NO: 144152 - DNA, 439 bp, Zea Mays
agtattacctattgttgagcctgctaagatgcattcattgtcgatgaaagaagacaactttacatgctttgtaacagaggaaatcctgatacgtgagttggaagatgggggagctgctaatatccaggaacgaccacttctgatggtagagaaggtggagaaagtaagaactacacttgctgatttgcttgcagcagaagtattctcatcaattgccccaggggagaatagttgccataatatcattgatgttggagcatccacttcaaagcatacatcgtggatggaaaaggtgcatcaaaagaaaccaaggaagccaacaccaaaaccactgaaaggcacaagaaaattaagtcaggtcatgaggaagatgttggggaagaagatccacccagagcagctcaatggacgtagcaatgcagagggccctcttacagtc

SEQ ID NO: 144153 - DNA, 306 bp, Zea Mays
atgggcctaaaggtgtttcattggctgaatcggaggatgcatcctaatactgagtaccgcaccatccatggtaacaaggaggaaatcctgatacgtgagttggaagatgggggagctgctaatatccaggaacgaccacttctgatggtagagaaggtggagaaacagaagtattctcatcaattgccccaggggagaatagttgccataatatcattgatgttggagcatccacttcaaagcatacatcgtggatggaaaaggtgcatcaaaagaaaccaaggaagccaacaccaaaaccactga

SEQ ID NO: 144154 - DNA, 1179 bp, Zea Mays
aactcctcgctatcctcttccaatccgaaccacccggactcccggagcaagcggccgccggctaagcagacacgaacgcaggtccggcggcaatgcaacgcgccgcgctcgtcgggtcccctctcgtacctgtgggtccccttgctcagcttgccgtgcggcgccgctgccgcttccatggtggtgttcgcgtgaggtcctcaaccgggaaggacgggaccgggactgggaccgggggcggaagcgagggcggcgacggcgccggtgccgcagcgtcttggctgagctcggcggtcggggagaaagtggacgagcttctgcgccgcgaagagaaccgggccctgctcgagggcgtcgaggacgccgagcgccgcgttgagcgcgcgcgcgccgcgctcgccgacatcgagcgccaggaggccgccgcacgcctcgcccgcgaggaggtccgccgcctcgagaagcggcgcgatgagattgcagagtcccagcgggaattgcttcaagcaagagaaatgattgatgaagctcagcgatccttgtcttctagtcttgacgaaggaagctttggagatatgtcaagtggtgatgttgatgaagataacgagagaatagaatccgtaaaagctgctgcagtttcctctgtcgtcggtgttctggctagtttgcccatatctttctatgaagttgaagatcttccacaactattccttcggtcatcaattgttttcataagttgtgctttgtttggagtcacattccggtacgctgttagaagagatctggataatatccaactaaaaactggggctcctgcagcatttgcttttgttagaggccttgctctgctggaatctggtagaaccttcgagctgagtactgataccttaatatcagttactcttgatgctgcagtcagtgtggttgagaacattttcatatttctgcctgctgctgttgcactggactactgttttaagatgagatttttgagtccctttcctagaagaaaacaatagcttctgtgaagaatatgtatgatcaataacaatcttgatagctcaaatggtcatatgtaacacaaatgatatcttagattcattaaaaaaaacatttcccctcattcactcaaagttccatcaagtcaaccaaatagtattttttacttaatcttcttcc

SEQ ID NO: 144155 - DNA, 1489 bp, Zea Mays
ctgaaacgaaccgcggaaaggggaaaggtggggaaagaccgaaataggcgacagaaatggcgacggagaagcgcagccgccggcgctcaccgtcggccgccacgccgagcgcctcgctgacgtcctcctcaaatccagaagccgctatattgcactcaccttccccatcgctggacctcatccccgacatcacctcccgcctgatctccctcgaggacttcttcgctctgcgcgcctcctgccgcgcttaccgcgccatccttccgccgtccagcgaggccctcgcctgccagtccccgctcctcctcgtctcccttttcccctccttctccgaggcgttattccacctctcgctccgccgcctccaccgcttccgcctcccctggggccatcacctgcccccctcccgccgcaccctccactacgcgcacggctacctcgtcaccgccaccaccgcgtcctcccactaccccccgaggctcatgctcctccacctcttctccggcgagcagctccgcctccccaaggtccccgcgccgttcacccgcgtcgtcatctccgacgacctggccgccgtcctcttcctgcccggcaggtccaatgtccagcactgccaccctggggacgctctctggcgcgtggccaccgcggatgcgccccacgttgttgaagatatgctcttcgtcgatggcaccctctacgccctggtaaatggcctccgtcttgccacagtcgaactgtctgatggtttgctggaactatcgtttctaggagaggaggtggatgacgacagcaagccagcaggagggcagttcaagctcggagagtgcggcggtgacgtgttgctcatcagtgaggatcacacgggggtgatgctgtaccgtgtttatcggtgggtttttgaggcggggaagtgggtttcaatcacgagcttgggcaggcggacactgtttcttggtttcttcggatttgcagcctgtatcggtccagattacccaggaatccgaacggattgcttatatgcagctgggccacgcttgggtgaatggcacgagtactccttggctgatggaacttgcgatgttcgctatgctgattatccaggtgcaccaccgctgaacaacaattcacctaccagacctccagtctgggtcttccccagtctgtgttgatactggctgtgaattcttccacatcatgtagaacatctgacgctgacttgaaataagtcatggtatgctgatttctgaggttgctatttcttaatcttaattttatttctgtaaacagtatgttgttcagcaatgagtattgaaacacaatatattactagttatttgttatactgattgggtatagactacacttgttgagtgttactataagaatatataatgctcatcctgcccaaagggaatggatggtttgtctatgcattatgctcgttttctagaccttggtaatgttattaaatcatataatcaaacct

SEQ ID NO: 144156 - DNA, 2256 bp, Zea Mays
atggcggcatccatcggccgaaataacgatgttcgtcctccattaagagaactatctaacaatacccttgaagatgaatgtccagatatgtctataagcgacggaagcatcattgattgtactataccgtgtgataccactccaggaggacgtgatgatgcaagacaacgtaagagagaaagagaaagagtacgatatgctacgatgagtgctgaaaagaaaaatgaattgaagaagcgtcgtgagtcacgaaaaaagggaaatgttatgcaccatgagtattcagaagtttgcaacatccctgcaaacaaggacaacaataatcatcaaaacaatgaaattgaggatgttgatgatgattcttatcagttgcataagaataactcatttgaggtgcatagaagacttggcagtgaaaaactttccacacatttgtcagatgaatgtccacaggtgtttgtaagcgacagaagcatcaaaaatctgactatacattgtgataacactttagtcgcattgggtcagacgagtcatcaacatgattccaatcaaagttcagaagttttagatccaagggaacgtaagagaatacgagaaagaactcgatttgcaactcaaacaaaagaacaaagggcattgcgtaatagggaatcatgtaataagatggcaaggaaaaactataaaagaagacaacgagaaattaaactccaggacttaatcggcattgaggacccgaagtttaccccggagcttgtgtggagttcaacagatgctgaagcgcctcatgggtctctatgtagctccgagggcatggctatccctgagttaagtccaacacctttcgttcctaatccatcacagactgaggatgtcgagaaagacagtatgacagagtctcctagacgacaaagacataaacgtcatgtgtcgtctggccaaagacagaccctggtgtctcgtcaaaatcagaaatttcatttagccattggaacaaacttcgctactgcaactagggatcgtgtaatggagaatgatgtggataatgaaattgatcatcagactgtttcagagatcgacaacaatgaaagtaccggtctatgtccattccctcacacggagagtaacaatatgactgaaggagcagacattgggatgcaacaccgggcagccccgactgtcactaccaatgatgatgttgaagatgtgctctttacagaggatgatgatgaagttgtactttttgaagatgacgaagacgaaggatacctattcgctgggcaagttcaaggagagctcccacaaccaccaaatgcatttggtgggcaagcaattgtcttggatgtgctgctgggtctgatcttcggaagtgggctgctgccgagaaacattcgatttgatggtcttcagattacaaaggatatgaagcagccgatttttgtgtattatcagcgggatgacttttaccagaattataggaggtatgtcaagagccgaaatgatgcacagctaggagataaaattgagaagaaggacatctcttgtaagagtgacagagaccacaaattcgggagtgatgtcttcccaacgaactttcagataggacctcttaaaggtggaaaaacacttgatccaagtatcccgttggacaacaactacaacacctatagctttggtggcaagaagaagctggtgctttctaccgcaacctggctcgggggaaagaacgattttctgggccttgcgtacctcatcgtcggtggactctgcttcttcctggcattcgcgttcaccttgctatacttgataaagccaagttactttcagatgaacatgccatatgataatgtggttacatcacttcttgctgcggtgaaggttatgtaccgaccagcattccagcaatttatgaactattcgtcaccacatggtggtgatcctaatgcaaacatgaactcaactgcaacacgaatagcagttgatcctgatacacatcaagattttgagccaaagagcagaagttcagacatgcctttgcatgccgctattgctcagctgccattctttcataccattttttggcaggatatcaaggagaacccagtcttgatctacatgaagggttttcctgagtttccaatgtgtggcttcagtgcactggctgttaaggtctttcagcaatatggcgtccctatctgtggtagagacattcttggggatctcaagctcaaagagagtgttaaagcccacacacagtaa

SEQ ID NO: 144157 - DNA, 1497 bp, Zea Mays
ataacacggagcaggatgatggctgccgcctgccggccagtcatttgcgcggcaatccttctcgccaaaagcagggcacgcagaccaccaccacagctgagctgaccagcagcagaacagaagcaaacatcaaaagaattgaccaccagctcctgcagagttcttcctctcgccttgttgttgctcgcgggcatagaccgcagcgcagctcgcacagaccgggtaccacttgtttgtcgagttgtgggggaagggggcgagcaaggaagcaaagctagtggtaggccggcaaggcggcctggtggagacctcgagtcgagtcgaccatggtggcgcgcgggcagggcggagacagggcggaggaggaggccgcggcgcggtgggagagcgagaaggaggcggagatcgactacgtgttcaaggtggtggtggtgggcgacgcggcggtgggcaagacgcagctgctggcgcgcttcgcgcgggacgagttcgcgctcgactccaagcccaccatcggcgtcgagttccagacgcgcacgctcacgctccaccgcaagcgcgtcaagacgcagatctgggacaccgccggccaggagaggtacagggcggtgacgagcgcgtactaccgcggcgcgctgggcgccatggtggtgtacgacgtgacgcggcgcgccacgttcgagcacgtggcgcggtgggtggaggagctccgcgcacacgccgacgggtccaccgtcgtggcgctcatcgggaacaaggccgacatgcccgcggcgcggcgcgaggtgcccgccgacgaggccgcgcgtctggccgaggaccagggcctcttcttctcggaggcgtccgcgctcacgggcgacaacgtggagcgcgccttcctcacgctcctcgaggaggtcttcgccgccgtgtcgcgcagggcgctggagctcgacgaggcccgccggatgcgcggcgaccagggcgacggcggcggcgaggtgctgtcgctcaaggggaccgcggtggacgtgggctccatcatggagaccagcgccatgaagaggagctcgcagtgcgcttgctcatgacgatgcatggctcaagcactgacaagttcgagcaacaaaggcgccgcgagaaaatctaggacagcatcacattggcaggagaaatcttcgacatctcaatccgtacacaacaatcgacaaccctgtgactgtgaagcaagcacatcactacaagtcctcgcaactctagtctccactctccactctctccagcatgcgaacactatgttcgtaatgtctctcttactcttctcctgcaacagctggtagtccttctttgaaccatgtgtaaagtcctccttccagatggtacacgttgctgtagccattcaggaccaacaagtacgcagctatcagggacctgccaaaattcaaccggaacagagcataagctccaacgctgatattatttgctctcgagaaaatagcacgatatttcgaacaa

SEQ ID NO: 144158 - DNA, 89 bp, Zea Mays
tattagacgtccgcattgattccatactttgcctggggacgctgatgagagctcttgctcgctccatctcctcaactgtgcatgattgg

SEQ ID NO: 144159 - DNA, 752 bp, Zea Mays
cccgacgacgccattcacctccccccgtcccccgtatcgccttcgtcaagtacgcccctcccccttccaccccatgacggagtgctcgattccttcatctgatggcgccacccacctccccccgctctcctccgccgccgcggctgtcgaggctcacttccaggcgcactggtccgcgctcgacgctgccgcacgccaggacccggcgcgggtcatcgccgtgggggactggcggtccccgctcgagctccccttcctgtggcttggggatgtcccctggtgtcgtctccgtcaggctgcaagtccaccaattcggcctcatctgcgacaacctcgacgcagtcaacaagttcgagcccaattacaggcttatcagaagatatatatcttcttcaacgatgttattcactacgggtccacttctagaagacgacaggagcttttacgattgaggttcttatatgggctgattggaccagctgcccagaaaacaaaagctcatctcatattttgtctgttctgtattttctttccttttcccccttccatcttaggacagatatgcactcagcataagcatttcattaattttgaacctgcagttctctcactctcctcgtatgtgttcacatagtgggtcctaggcactgttttctgcggatctagttttcttctacagcatctcttgaattcctgatatcttgacgtggcaaccttgttcttgcttttcatcagcaacttgactttgtcta

SEQ ID NO: 144160 - DNA, 2778 bp, Zea Mays
aaaagaatgtgcccctgcgctgcgctgcccaatgtcctccacccgcattccccgttcagctaaaccctacccgtctccggcgccgcttagatccatcacagacgacgctcgccggtcctgaggagagatggccgacccgaactcgcagcccctcgccgccgctacggcggatgtttctgcaacctaacatcaagctgcgatgaccgcgccgcaatcgcaccgaggcgctgcggtggcggcggcgaagcagggagcatgcgcaagcgcaaccatggttgtgccgtcgtccccgcaaggcgctcccgggttcgcggtggtgtctcaagaggccgaggacgtggcggctttatcgtcccctctaggtcctcccgggttttgggtggtgcctcagcaggtagcggtcgcgccacagcaaggtgctccggtaatggcgccgccacagggtgcaaccatggtgcctccgcaacagcagcatttcgcgcctgagatggtgcctggctcctaggaagtcatgcacatgctcgttcaagctacgcccatgggcatgatgatggcctcgatgcccctgcaagcccaggctatggttgatcaccaacctgctcaaggtatggcgccatccgtccatgatggaggcgcagcaagctcaacctggacacacgacgcatgacgacaccacaacctctgccactcggcccttcgttgacgcagcagcagccttcacaagctgatacgattataatggcacaaccgcctctgcctttcggccctccacctgcaatgcttcagcaacagcctccacatgggagtatgggaccgcgatgatggtggcacaatcacttctcactaccggaatcgtgttctttgccgagtgtctaagaaactcggtaaaagctattttacactcggcaaagtgtttttttgctgaatacttttttcggtttgccgagtgtcaaaaaacactcggcaaattaagaatcgaaaaaataaaaaaaaacagcaaaacattttttaaaattctaggaacaactctccaacactgtctattatcaattgctctatcatttttcactattattttgaatcaaaatttatatgttttataaatgatgagattcgaactttcaacctctctctctcgcgcatacactcctataccactacactactacacaaattatgtctatattacgatttcatttcccatgtactataacaaatcgagagtaatttgactatttaaggcactaaatgagttcatttaaaaatgtgaccaactataaagttgcataactttttgagatctacaagttttattttaatagtttctacatccgagaccgtttacaaaatttgaattttaaatttgaaaacttcacacgaatttttcaaagataagatgatttcaaatcaaaaaaaattgtcaactacagagtttcattatatttcaagacctacaacttttattttggtggttttttcatccgagatggtttgaaaaattcaaatttcaaaattcaaacatagttttgtataacaagatgatttcaaaacaaaacattgtcaactacaaagtttcataacacttcaatgcctacaactttcatgttggtggttgtttctttcgaagtcgttttcaaaattcaaattttatttttttaaattcagacgtagttttcgttgacaatatgacttcaaatataaaagttgtcaactataaacttctataacttcttaagatctacaaagtttattttggttgtttggtcatttgtttatctcacatgatggttctaacaatatgcacaaattctatacgcctctctcgtagtttcataaactacgagagagatacgttttatgaacaaatttatttttattttgtcatatgaagaaatgttcaatatataaattgtacatcatgatgagttatacaaatttatagttgaaaaccttttcatttgaattaatttactatttaaaaatgtgatttttaaattgtttttgcctagtgttggagaaaaaacactcggcaaagagctctttgccgagtgttgtatttgtgacactcgccaaagagcctgccaagtgtcaaaaaaagacactcggcaaagaaattctttgctgagtgtcaaaaataaaacactcggcaaaaagtttctttgtcgagtgttttcttttaccgagggttttttgcgtggcactcggcaaataacttctttgccgagtgcccgaaaaaagcactcggcaaagaatatgacaatcggcaaagagccaaattatgccctccattagtgatgctgcaacacaatccacagggcaaccaggtgatggtggcacagccgcaattcgttgcgtcttgaccaatatggtttgtgatcaacttctagttatgcctgattactattttatttacgtgatatcagtcccatatgtatgattaacaaaagttctaccatatatagatgtattcaagctggtgtagactaggactagatttttacatttatttgttgtataaatctagaagaatagaagataagccatatcaaaaccataggcagtgtctgactggcttgtgtcatttgtgcaagacgacaggagcttttacgattgaggttcttatatgggctgattggaccagctgcccagaaaacaaaagctcatctcatattttgtctgttctgtattttctttccttttcccccttccatcttaggacagatatgcactcagcataagcatttcattaattttgaacctgcagttctctcactctcc

SEQ ID NO: 144161 - DNA, 728 bp, Zea Mays
cccgacgacgccattcacctccccccgtcccccgtatcgccttcgtcaagtacgcccctcccccttccaccccatgacggagtgctcgattccttcatctgatggcgccacccacctccccccgctctcctccgccgccgcggctgtcgaggctcacttccaggcgcactggtccgcgctcgacgctgccgcacgccaggacccggcgcgggtcatcgccgtgggggactggcggtccccgctcgagctccccttcctgtggcttggggatgtcccctggtgtcgtctccgtcaggctgcaagtccaccaattcggcctcatctgcgacaacctcgacgcagtcaacaagttcgagcccaattacaggcttatcagaagatatatatcttcttcaacgatgttattcactacgggtccacttctagaaggtatgtatctgagaaatattttccccatcgcaaggtaaataatagttatacatctaccaagtttcagatgtagtcttattccttttttagtttttatcgttaatttttattgcactaatgatgtgttacctcttaagatatttgtcaaaccaataattttgaatgacatttatcttggtactttgtcaaatctataaacttgggagttaggatcacatctgttcctataaaccaagttcaaagattgttattttattttgaagatcacaactcactgtaattgttcatgataattattt

SEQ ID NO: 144162 - DNA, 1567 bp, Zea Mays
ctcaagttctcaacctccaatttttggccatgtcgtcgtctccgtggccttccctgctctcatcgccgctcccctcctccgccaccctcttctccaagaagccagcgtccttgcgccccgtctccacctcgaccgtcagggttcggtggccgcagcggcagcggtgtccgcggcgcgagtgcgaccgtcggccgcggaggtagcgcggacggtcgtggagttggccccgtctggtacgctctccgtggttggtcccgacggttggccgctcggtatcggcgcgcgcttcgtcgcggatgccgtcggtgcacccgcgctctgcctggccaccacgggggtcagcgctcccgatgcgccgtgcagcttccacgttgagttttggaagagtggggctaggacaccacaatgtactatgcttggtaccttaactaagcctactgatgagtcagtgttgaagaagctttccactaggcaggaaaggaaattcggggaagaaattaatcaagatcttttgtatttgatatctgttcaacgggtattgcacatggaggatttcaatgaggatggcatgtgggtagttccatcagaatacaccagtgcagaacctgaccctctacgcaattttgctgaaaatattgtggaggaatttaatagcaaacatgctgaagatgtccatagaatatacaacatatatgtcgaatcagatttacaggtggcagatgtaaagatgatatgggttgacaggctagggtttgacttgcatgttcattctggtgatggtgtctttgatgtccgtgtccctttttcaagggaagtctctgacgagaagggtgtgaaatcatcatttaacatgatgtctcatcattcatgggaggtggagaggagctatgccggtccagagtttgagaaggtacagttcttgaagaaggtcaggtaggcagtttgaatcctatttccattgtggattatttttttgtaattcagatgagtatagtgtgaggtttggttcctcttagcatgtactgtttgtcttgtatctttttttcgttaccacatacattggatgcaattgatataaacgatgcggtaataatttattagagaagagcaacaaattttgactgtaaggaagaataaatctgggacatgagatgagaggtaaattatgtgacatgaaaaccatgctttgcagtaaggttatttactctgtccgtcccaaaataaaagttggtttatccttttaggtgattcatacaataattaatatgtttattttatatatgtatctagattcatcattcatttgaatataaacataaaaataaaaaagctaaaacaactaatattttggaacggacggagtattttactgtctagaaagcatgttataccgacacaattggtaggcagcatgcccttttgctaggtattgccacctatctgaaaatcatattctttatctataggagcgtggagtgttaaaattttctgtatctacttagccatgatttttagcgtgacaaatactgaaatactcattgcagcatatgctgcaaaatgtccatat

SEQ ID NO: 144163 - DNA, 1372 bp, Zea Mays
atgctctctaaacatagtctctctataaaaaacttatgtgggcaaggatatgatgaagcatcaaacatgagaggggaattctatgggttacagagaaggatattggatgagaacccctatgccttttatattcattgttttgcccatcaattacaattggtagttgtgtctatggtcaagtgttgatcttcagttatggatttcttcaactatatcaatttgattgtcaacatagttaatgtttcttgtaagagacatgatcaacttgcccaatgtcaccatgataatcttgttcaaaatgtagagaatgatgacatgttaagggggagagggagaaaccaagcaactaatttaacaagagctggggatactagatggggatcacatcataaaaccttgtgtcgtcttcaactcatgtggagtgctgtcttagaggtgttagagaatgtatgtcaagatgccactaatctagcacaaagaaccatagcgacatgtttattagagaaaatggagagctttgagtttgttcttgtgttacacctcatgatcaaagttttgggtaagactaatgatctgtcacaatgcttgcaaaagaaagatcaaaatattattcgtgccataggattggttggtgtcacattgcaaaaattaaatgagataagacaccatggttgggatgctatttttgaagaggccaaggatttttgtctcaagcataatattgttgtcccagatatgtcagcggaaatagttagaagaggatgttctagaggccatagaggacaattggttacttattatgagcatcttcatcatgaaatattcaatgtggtgttggatcaagttatagttgagtttaacaatcgttttgctgaaaggtctactcaactcttgagatgtgttgcttgtcttgatcccagtaattcttttgccaactatgatgaagataagcttgttgaacttgcacaaatttatgtcgatgacttcacagaatatgattgtatagttcttagagaccaacttgatacattcattaccgaaggaagagaagattcaagtttcctatcatgttgtgatcttggtaatcttgctatgaagatggttaagacagatagacatattgtattcccattggtttatcgtctaattgaattggctttgatttttcctgttgcgactgcaactgtagaaagagcattttcagccatgaaaatcatcaagacagatttgcgaaataagatgggtgatgaatggatgagtcattgtatgatttgctatatcgagagggatatatttgcaagtattgaagatcgtcaaattatagagcattatcaagccatgagaacacgaagggagcaaataccaaagacaa

SEQ ID NO: 144164 - DNA, 1110 bp, Zea Mays
aaccgcctcctgcttcactcggtcatctgggctcttggctcatacccacaacgtgggcgtgaccagaacgaaattgtcgctcaactcgcgtgtcgctcgcataattctattctccataccgctctcttctccctcgtctcgttcagcaaccactcccgtggacacggcaaggcagggccgggcctctgcgcacggcgtccggccggctacaacccctagccgtggccatggcggcggccagccccgccccccagtcgacctcggctctccggtgagctgccctccatgtcctggccgctcagtcgttcgccgcgccgaatcgcccaggaagatctgcgatgctctcgtcgttgccgaggttagtggccgagtgaggctccctcttctccctttatccctcttcctctctggctgctccctccctccccacgggttcttccccggcgagtagccctctctgccccctgccaagcagttcgtctcctcccggcgagcccctgcgcggctccccttccctccgatgtgtggccccagcgcatggccatggtcgagtccctgcagtcgtgcccccctgcacgtcctgtgtgcgcaagcgccgttggctggtgggtcgccggcgagccgcgctgccccaggcccctacccctgctagcccatgcccctcggccctcgcctggcaagcctccatggctacggccctggcagcggctccctagcatgcagcgactaccgaggagcgcccctggtggacggccccggccttgaccctggtgcgattctgctcttgcgcagctgcccaggtcgtccgagctttccccagcgtccttgtagttgaagaatggaagattggagaagaagctgcccacttcgtgcgtgcacaggaaaaagaatcgcatgtgctcgcatgtgcggttacagcagagaggaataagtccatgtagccacatttgatcccattcactttgaccggttgtggatgagatcatgtgacccttggtgtggcacgattctgaccgataggatcgtgccacatcgttgttagtgcgctatttattaaaatatgtattaactttggtgttagatattcgattaatccattccagttatatt

SEQ ID NO: 144165 - DNA, 513 bp, Zea Mays
cccgaaacccccattcgcgcctcatcccgctgcacactccccaccctccccgctagggttttgccaccatagtcgctgccgttgtatagaggctcctctcccgtcgcgcctcctcgttatccctcttcgtgatcctccgccgcagtgctgcccaggagcagtcgctgctggtgcacctagccatcctcgtgacggtctcctgccttggcttctagcacgatggcatggtggggacggctacgtctcgacgtgccccggcttcccctccgctcctcgtgcctcgtagtagcgatggagtccctaggcgtgcggtggcggtggtcaccaactggtcatcttctctaaaggtcacccatttctcctattcctcaatcggacgacgctgtaccaaatctccacacgttgcttgggttgcttggtatgctagaaccgattcggttgatcgactggttggtacatgtgtcgtttgattgactggttggaatgggtacttttcatgggaatcagaggtaa

SEQ ID NO: 144166 - DNA, 1092 bp, Zea Mays
atgggcaatgacatcaaagaagagaacatcagttttgttgcgccgggcaaacttagtatagcggtgttaagaactgcaacaaacaatttctcagaagaaaacaaacttggagagggaggttttggtgaagtgttcaagggtacattagaagacggggaagagatagctgtgaagagactttcacatacttcctcacaggggttcaacgagcttaagaatgagcttgttctggctgccaaattgaagcacaggaacctggttcagctccttggcgtgtgcctccaagaagagaagctgctcgcctatgaatacatgcccaacagaagcctggacaccttccttttcagtggcaatccagcgacgcggcggcaactggattggagcaagaggttcggcatcatatgtggaatcgcgcgaggactcgtgtatctccacgaggaatcccggctgaaggttgtccacagggacctgaaaccgagcaacgtgttgctggatgcggacatgaaccccaagatctctgactttggcctcgccagggctttcagcaacgaccagtctggagatataacaagacgaccggtcggaacccttgggtatatgtcaccagagtatgcctactgggggaacgtctcgaccaagtcagacatgttcagcttcggcgtcattgtcatcgagacggtcaccgggcgtaggaacaacagcccatacgatcagtctgcaggatctgtgtctgtgctcagccatgtctgggacaagtggagaactggagcaacaacggacgtggtggatccaactttgggcgccgagcactactcagaaagcgaggtcgtcacctgcatagaggtcgggctcctatgcgtccaggagaatccggcggaccgcccggacgcctccgccgtggtgcttatgctcagcagtcccacctccacgcccggtgataggcgagtcccatccagaccggcctttgtcttcagcactgcctcagcttggagctccggcggtgtgcagattggcaataataaacacacatccacgtccatggtttcagtttcagataacgaggtgacaatcacagaacttcagccgaggtag

SEQ ID NO: 144167 - DNA, 2052 bp, Zea Mays
cagcaggacagcaatccgttcacatcggtcgattgccaatcctcggggtcggggacgccttctcctaccccctcgccgccgccgccgtcgtcgtcctccaacaacctcaacaacagcgcgttctggtccaacgtcgtcgcgctactggatgcgctcccttcggccgcggcaccctcgcgcttcgcctccatctccagcggcaacggggccatccgcgcctttgtccggggcatctgccgcggcgataccttgccggccgactgcgccaagtacctccagaacgccacgctgaccatccagagccgctgcaacagaagcagccgccgcgccggcatctggtacgacaagtgcttcgtcagctacgccgacaccaacgcgtcgacgtaccaagagcaatcattccgctccatactctacaacacaggggaggtcggcgacaaagacgcctttgagaccacctactacgcgctcatgaggcagctcaccgcccgcgtcgtcaacggctccggcaccgccacctcgccgtcgtcgtcctcgtcctctttgcggtcggtgtcgcccatgttcgctacaggggaggccgtctatgatgctgccgcccccaacggcaccatgtacgggctgctccagtgcatgagggatcgaacgcaagcggagtgtgagcagtgcttgaaggactcggttgggcggctgccaagctgctgttatggtcaccagggcggggtggtgctcggctacaactgcaatctgcgcgtggagatatacacctactatgatctcgcgatagatgcgccgcctccatcaggctcaggcttcatcgggcaaagtcaagtgaagaaaagggtccatccgaggacgactctcgctgtcgccctccctgttggaacagtgtttgccgcagccgccatccttggagttttcatgcaaaggagaaaggccaatcggaagaaaacaccacgactaggcaatgacatcaaagaagagaacatcagttttgttgcgccgggcaaacttagtatagcggtgttaagaactgcaacaaacaatttctcagaagaaaacaaacttggagagggaggttttggtgaagtgttcaagggtacattagaagacggggaagagatagctgtgaagagactttcacatacttcctcacaggggttcaacgagcttaagaatgagcttgttctggctgccaaattgaagcacaggaacctggttcagctccttggcgtgtgcctccaagaagagaagctgctcgcctatgaatacatgcccaacagaagcctggacaccttccttttcagtggcaatccagcgacgcggcggcaactggattggagcaagaggttcggcatcatatgtggaatcgcgcgaggactcgtgtatctccacgaggaatcccggctgaaggttgtccacagggacctgaaaccgagcaacgtgttgctggatgcggacatgaaccccaagatctctgactttggcctcgccagggctttcagcaacgaccagtctggagatataacaagacgaccggtcggaacccttgggtatatgtcaccagagtatgcctactgggggaacgtctcgaccaagtcagacatgttcagcttcggcgtcattgtcatcgagacggtcaccgggcgtaggaacaacagcccatacgatcagtctgcaggatctgtgtctgtgctcagccatgtctgggacaagtggagaactggagcaacaacggacgtggtggatccaactttgggcgccgagcactactcagaaagcgaggtcgtcacctgcatagaggtcgggctcctatgcgtccaggagaatccggcggaccgcccggacgcctccgccgtggtgcttatgctcagcagtcccacctccacgcccggtgataggcgagtcccatccagaccggcctttgtcttcagcactgcctcagcttggagctccggcggtgtgcagattggcaataataaacacacatccacgtccatggtttcagtttcagataacgaggtgacaatcacagaacttcagccgaggtag

SEQ ID NO: 144168 - DNA, 1406 bp, Zea Mays
atggctgtagtccttgctgttttgttaggggagctctcccaaatcagaacagtgccttatccctacagcaatgactacagccaatttggttggacaattcttccaccaccttgttctccgacagaaagaagtattatttttcatgtagctttaaaaacaagttctggcataaagaagtcccacgtgatcttggagaactataccttcaacggcaaattcgaaggggagctctcccaaatcagaacaatgccttatccctacagcaaggactacagccaatttggttggacatttcttccaccaccttgttctctgacagaaagaagtattatttttcatctagccagggtgtggaggaaggaagggataaggcgtttggtttaccctgaccggacaacaggacaccgtcgggggttcgctgcaacacatcgacggcttccgcatcttctcaggccaaggttgttcgacgactaccatgatgaagatttttatgggctaccgcggaaatatagtattgtcgctcgggtagaagttaaattcccgattgaaccatgttttcgtgatagacaacattttattttatctgacatcaatggagccaagatcgaggccataacatatatgtatgagacagtcaaacatttcgacaatttgctccatgaaaagcatgtttacaagatgcataatgtaaagttcagtcttcatccgggtgaatttaattttcgtcatctaaatggtcacatggaattgtgtcttgaccaacaaactatcgtggagccatacactgttccgattcaaatggtgccattcccaaaacaaatactcttgaaccttgatgatattgccgagttgccaaacaggactttagtcgacataatggctattgtagtccacttggatacaattcatcgcacaatgtggtgccctttcagaaagattgttataatggatgctagggggtatttacatatcattaaagtttggggtgacctactaaacaaaaatgcactccgctgggcgttggctaaggaggattatggcataataattgggactatgtttagacggttcagaagacaagagtgcctcgaatcttcggatcataccgcaatacacttcaatccgctccatcacaacacccatcattttggaccaattcaaaaggctttggtggcgcggaacaaccgtcagtttgctgttacatttcttgaagaacaaaggcgtagatagattctacaaattcgcaaagagcaataattgggactatgcttaggcgtgttattgatcaaccaaaagcaacatgaggcaaacttgtatgtctatgaattttgtttgtaatacctatgacatgggtttaataagagatattttgtgaaaattttgaccgtgcaaatgattaataaata

SEQ ID NO: 144169 - DNA, 1317 bp, Zea Mays
ataataattagttgccgatatggcaattgattaattagaactagaagcttctacaaggtgcggtgggcccaatcacctggagttggacccgtcttggtcggacccggcgccctggtccggcccgttgcagggccgcatcgaatggtacacgggcgtaggccggtatatgggccacggatgctggtccggcgactccggcgacggctccatgcgatgctgcggatccgacgcctccgtcttcacatccgctgcggcgccgtggtccgcctgttcctcgccggtgtcgtcgtcgtcgcgcatccgcttcatgccgatagagacgccgaacagcctcgaggcctggtcaggatccgcttcggcgacgaggcccgcggccgcggtggcaagacccgggcacgcgggcattagttcgaggatcgccggggggaggggcggaggcgcgggtacggcctccgatgactcgccggagcagttgacgacagaggagagcgctgcagaggcgtctagctgctgggaggaggcgtacttggtcatgaggagcaagatgttgttgcagagcttcttcatctgcccgagctcgcgggtcagccgcgcgttctcccgccggaggcgctcgttttcctcccccgtgtcgccggacgccgacgcgctgacggagccggaagcggcagcctgcgggtggtcctcggcggatccggagttagaggagaggacatgctcgtcggtagagagcgacggtgaggccggccgcaccggcagagccatggggatcggcgccgcggccaccgttacggccccggacgcggcagcggcggccgcagtggccagccccgccgccggagccggtgctaccttccgtcggtgtatgtcgcaaagcaggcgcttctccccacggcggaagaagtcgttggcgaactcccaccggtcgggcaccatcttcctaaatccctacgtgttgagctgccgcacaaagctggagaagttattgtgcttgaaatacttggggaggaggtcgcgcgcaaactccgccggccgccacaccacgaacgtcgagccgtcctcgttccacgagatcacgtcgtccaccgccgggtcgtccaccagctggtacgtcttggtcaggaacggcgtcggcagggacctctgcccggccgcgtccgcagcaagcgctggggctggcgccggggcagtcgcaggcgcaggcgcaggggggtcgctgccagcggcctccccggctgcgccgccctgctcggccatccggccagcgccgcagcccggctggatctgagccggcgacttccagatgcgggaaagagc

SEQ ID NO: 144170 - DNA, 870 bp, Zea Mays
ggttaagttgaattaaaattgccacacatgttatgataatatattaatatgtacagattcacggatcaatcacatgaagggaaagtgcgctagaaagatatgcacgtttcacgttaacaaagccatccccaaactaaacagagatagtaaacttgccctctgtagtcgtacccttcagtcaatgctcagctttcactttgacatctccattaagcaaattgccatgggactgagccaaccgctttgcctcctgcacaaaaatggggaattatgatgttatgcaacaagaacaatagaggatttattctaaccaccgaagcaacagctgaggcacatctggacatgttacaatcaccagcgtttgacaaaacttgatttccagaaaccctaacaagcagcaggatttaatgaagcctagatgtttctcacagaatccaatcgattttcacctttcttacactaccaattgctaattgcttcaaaacaaatacgagtaaatggtaactatcagctcctgcagtatcataagaacaactcagataccaattgctccggtcgagttagttgagtttgtggacatttcagagtaaagaaaaagctctacctgcacaggaactgcgcaacactagccaggaccgggcacaggcaactccttagtccttacagatataaggtgtagagaaaatcaaccggtagtttttttttcttgaatacgcaggagatctgcgtatttttgtattaagaagagaaaaggggtgaaaccccaaaacacgaacagcagacttacagacacacaccaccaaatacaccactcttaaaacaactcctctagatggaaagaagagagagctttagcgccagccaaacgcc

SEQ ID NO: 144171 - DNA, 1641 bp, Zea Mays
tttttttaaccttatcccgcctccgccgcgcccaccaaccgggtcggcgctgccaaggtggcagtggcccgacccgaccgcgcgcggcgccgtaataacaaacaagcaccaccacttgctcgcacgacgcaccgcggcacggcaccggtaaaaatcactgcgccggcgccgatatatacgtgcacgcctacgcccaacggcgtactgttgctcccgctttggccggagagaatagaggagcgccggggagagctgcgagcagagacggggcgaaggatagggatcgcgagcgaattcccggcctctctgcccccgcgacagcgacgcgggcggggccgcgcggcacagcgctcgctacctatagagaccccggggggcagactggagagggacaggccgcgtgcgcacgccaccgcgcttcattggccacgccgttgccatcacgccgattaaactagccgatcgatcgcccagctcgcctgcctgtgatcgaccgggtcgctgcctccgatcctcttgctgcccagcaccctggctacttcagccagctagccaggttgagaccgactagctcgatctagctgctgaggcgtggccatggagggcgacgacgacggcccggagtggatgatggaggtgggcggcgcgggcgccacagggaagggaaaaggcggcgcgctggacaagaacaagaagcgcttcagcgaggagcagatcaagtctctcgagtccatgttcgccacgcagaccaagctggagccgcgccagaagctgcagctggcgcgggagctcggcctgcagccgcgccaggtcgccatctggttccagaacaagcgcgcgcgctggaagtccaagcagctggagcgcgactactccgcgctccgcgacgactacgacgcgctcctctgcagctacgagtccctcaagaaggagaagcacacgctcctcaagcagctggagaagctagccgagatgctgcacgagccgcggggcaagtacagcggcaatgcggacgccgccggcgccggggacgacgtgcgctcgggcgtcggcggcatgaaggacgagtttgcagacgccggggccgcgccctactcgtccgagggcggtggcggtggcaagttcgcgcacttcacggacgacgacgtgggagccctcttccggccgtcgtctccgcagccgagcgccgctggcttcacctcgtcggggccgccggagcaccagccgttccagttccactccggctgctggccatcgtcgacggagcagacctgcagcagctcgcagtggtgggagttcgagtccctcagtgagtgagtgtctgagtgatcgatcgccagaccatgcgacggcgggtcactcggttccaacttccaagcacacacacacacacacgtaagcacgaatacgagttggtagcggtcatcagccccgagcgcacggtgtacatagctttcagtagatcgaattccaggcatgtccatcaacaagcagtttcttctcgtcatcgatcatcatgcatgcaaaagaaaattttctctcccccattgtcgtcgccgctaccagatcatgtaatccaggaacatgtagagaaagatcaaacgagcttatagagaagggaggtcacatgttcgatcgatc

SEQ ID NO: 144172 - DNA, 755 bp, Zea Mays
ctaggtgaatgcatgtagtttgctctgctctgctgcccccagtttgtagtatgcatctcttctatttctaagtggttcacttgaggtccattggtgcctattcaatgtctcccccttttgcaattttaggtgatttaggtgggtttgggaagtgatctttttaaaatatgattatattttggctcgaccaagggttatattgaacaacaacaacaacaacaacaaagtcttttagtcccaagcaagttggagtaggctagagttgaaacccaacagaaaccacaagtagctcgctcagggtttacatatttcatggaggtggtggttggttgcaccttgtctcatgtccttctaaaaggttgcctggcaaagatttgtgataaaaaacaaacaaacttactcttcaatagcagttctgttaaactggtaatagatgcgaattcccaatatatttcttgaaatggaaagtacacattatgcattactacaggatggattcacacacaattattttttctgaattttaccggtatatgtaaacaaacttctatagtgggcagttcaaaatgacatcgttagattatcttcaataacattgtcaggttaattttactttattgttatatggttgataaaacacaactgatgatgaccatgctttgctatttttggatagtgattaacacacttagaaaaagctatatgtttgcagtaggtggtacatgctatttatgcaaatgaaagttcctttctag

SEQ ID NO: 144173 - DNA, 649 bp, Zea Mays
ctcactttcacttctctccctcgtctcctccatggtcaatcgggtgatctgaaggaggaggaggcggcggcactccaaactttagcgacatggcaatgcggttggcggctgcggccacgttcgtgcggcgcctggcgccggcgcgcccaccagtacgcatcctggcggcggcatctacggcggaagcggaggcagtgacgtgcgggcgcggggacaagaaaaccaagcgcgggaagcggttcaagggctccttcggcaacgcacggcccaagcgggagaagaagattgagcgcatcaaggaccgcgtcgaggtgccccgctccacaccctggcccctccccttcaagcttatctgagttggagactccctcccccctcggttcgcgagggcacctagggtttactgcaacagttgctgctacttggccgtttccaattagctgcaaccctgcatgggcgtgtgtttgctttgttttaacttgtttctcaattgtgtggtgttagatatgtactgtcgaactgctgtagttcaactttgacccatgcaatatccttttggatggaagtgaaatatgtttcttcccatcattttgttattgtatgcataactggaaaatgaatttgttctttatccatcagcagttaatga

SEQ ID NO: 144174 - DNA, 368 bp, Zea Mays
ggaggaggaggcggcggcactccaaactttagcgacatggcaatgcggttggcggctgcggccacgttcgtgcggcgcctggcgccggcgcgcccaccagtacgcaccctggcccctccccttcaagcttatctgagttggagactccctcccccctcggttcgcgagggcacctagggtttactgcaacagttgctgctacttggccgtttccaattagctgcaaccctgcatgggcgtgtgtttgctttgttttaacttgtttctcaattgtgtggtgttagatatgtactgtcgaactgctgtagttcaactttgacccatgcaatatccttttggatggaagtgaaatatgtttcttcccatca

SEQ ID NO: 144175 - DNA, 3018 bp, Zea Mays
tgttcttacacaaattttcttctctggatcccttcgcatcagcaagcatatttgcgtacggccagacgagcagcgggaagacgtacacgatggtcggcatcacggagcgtagcatggcagacatctacgactacattgacaagcatcctgagagggagttcgtgctaaaattttcggcgatggagatatacaatgaagccgtgagggatctcttgagacctgacgcaacacaactaaggcttcttgatgatccagagaaaggaactgtagtagagaaactcaccgaggaaacccttagggacaaaggccatctcttggagctccttgcagtgtgtgaaggtgttgaaccaaagtttctttcctttctgtttgaagaaacaagattaaaagaagcacctcccgttaggttacttctagtgcactaatcctttcggtgtctgggacagctcaaagacagattggggaaactgccatgaacgaaacaagctccagatcgcatcagatactccgactggttgtcccttgtgcattactgaatgatgtgcaaatgttttagtaggaattagttttttgttctaaaagaacacgttcaagttgcagacgatcgagagttcagcaaagcaattcatgggacgaggcaaatcgagcacccttctagcttgtgtgaatttcgttgatttagcaggaagtgagcgcgcctctcaaacacaatcagctggtgtgaggctgaaggaaggtagccacattaacagaagccttcttacattgggaaaagtcattcgccaactcagcaagggaagaaatgggcatatcccttacagagattcaaagctcactcgcatattgcagtcatctttgggcggcaatgcgagaactgctattatctgcacgatgagcccagcacatagtcatatcgagcaatccaggaacacacttttgtttgcaaactgtgctaaaaatgtagttactgatgcaaaggtcaatgtagtgatgtcagacaaggtgttattgaaacatcttcaaagagaaattgcaaggctagagaatgagctaaagtttcctagaccaacctcttgcagcaactatgctgaggctttaagagaaaaagatgagctgatcaaacagctagaaggacagttgaaggaattaatggagcagaaagacaccgttcagtctcaacttgacaattttcgtagagttacaagtgatggaaatttcaatgatcatgcaacaaggcaatgggatcaatcgaacaggtcttcagagtcccttccatgtagtgcgtctgaagacacactttcttttgatacttacagtgatgtttatgaagaacaagatgatctaggctccaaaggatttgatgtgtcacatgtctataatgattatcatcatgatgtgtatcaccaaaaagtagacgaacacccaatgtctagtttgcatcaaccaagaaaccatatttctaatagaacacagatgtaccaaccaaatagggagacttcaccagaggtccctaaggagcattgcaaggaagtccagtgcatcaaaataaatgagtttaggaggagtcggtctgacgaagaaaaacatggtgaaaacataacatacacatcagagggtgccatcaaactgtacacatgtgattctgagccatcttctgatactgaaaaaacaaataatgacgaatctttagtcctgaagaggtgtgtgataagctccagagacagtgtactaactagaagcagaagttgcagagctagcttcatggtcattccgaatagttggtttgatgattcagcggatatgagaatgacaccaccaggtgacattttaaaatatcctcacagaaggctagagaaggttaggaggagcatgtactctgaaaatggtcattgtcaaaatgatcttacattagactgccctgtggtctctggaaaagttgcatctgacatggttatagacaaaaacacttgcaatgaagaagatggatatgccaacaataaattcagctgcatcacaaaggttaaagagaagcaagaagactattgtacatcccaactagagggcaatcaggacaacgttactgcagaaatcttggacatgaaacatgcaaaaaatattgacaaagatatatttgtggccaatattgactccccttcacggtggcctattaattttgagaaaaaacagaaagaaatcattgagttatggcatgaatgcaatgtctctatagtacacagaacatatttcttcctcctcttcaaaggagtcaaagcagacaatatttatttggaagtggagcacagaagattgtccttcattcacagttctttcattgccggatgtgagcctaatgttactgttacatcaagcttgagaaatcttcggcatgaaagagacatgctctacaagcaaatgctgaggagactccatcttctagaaagagagagcctttatagcaaatggggaattgatctgaattctaaacaacgaaggctgcaactatctcgccgcatctggacacagactgacatggaacatgtgagggaaagtgccgctcttgtcataaaattggtagaacatctggagaaggggcaagccatcaaggaaatgtttgggttaagcttcacattgaaccaacgagctatccaaagacctttcagctgggttagtgctaactcctaaagcaagcatcgagacaaattatgattatgatggttgatagttgcatgggacaacaaacaatgccatgatgaaatacatagtagaggagacctcttgtcagtcacccatacgagcattgattttcactgatgcccctgtatatttcgtatcacttattatgtagatgtacatgtgatggattttgcattgtggaactgttaaaatgaaccgacatgagatgccaaatctttgcaccaaacagtatgatgtattgctgatctgatttttttgcatcaaatgtatatctaatataccatattttttgcttaagtaaatcagatgctatgaatgccaact

SEQ ID NO: 144176 - DNA, 3180 bp, Zea Mays
gcatgaacatgacgctggttcggtcgtgccaatgtgcgtgacgcatgtgggtgactgagcatccattgatgggtcagtcgctttgtttgtgttcctttaaggttggatccatagcaagaaaagcagacgtggagtacagcaatggctagcgaggagcggatcctagtatcggtgcggctacggccggtgaatgcgcgagaggcggagcgcggcgacggctccgactgggagtgcgccggtccgaccacgctcatgttccacggcaacatcccagagcgtgcaatgttccccgcctcatacacctacgacagggtgttcaaccctgagtgtagcacacgccaggtgtacgaggaaggggccaagcaggtggccctatcggtgctcagcggcatcaactcaagcatatttgcgtacggccagacgagcagcgggaagacgtacacgatggtcggcatcacggagcgtagcatggcagacatctacgactacattgacaagcatcctgagagggagttcgtgctaaaattttcggcgatggagatatacaatgaagccgtgagggatctcttgagacctgacgcaacacaactaaggcttcttgatgatccagagaaaggaactgtagtagagaaactcaccgaggaaacccttagggacaaaggccatctcttggagctccttgcagtgtgtgaagctcaaagacagattggggaaactgccatgaacgaaacaagctccagatcgcatcagatactccgactgacgatcgagagttcagcaaagcaattcatgggacgaggcaaatcgagcacccttctagcttgtgtgaatttcgttgatttagcaggaagtgagcgcgcctctcaaacacaatcagctggtgtgaggctgaaggaaggtagccacattaacagaagccttcttacattgggaaaagtcattcgccaactcagcaagggaagaaatgggcatatcccttacagagattcaaagctcactcgcatattgcagtcatctttgggcggcaatgcgagaactgctattatctgcacgatgagcccagcacatagtcatatcgagcaatccaggaacacacttttgtttgcaaactgtgctaaaaatgtagttactgatgcaaaggtcaatgtagtgatgtcagacaaggtgttattgaaacatcttcaaagagaaattgcaaggctagagaatgagctaaagtttcctagaccaacctcttgcagcaactatgctgaggctttaagagaaaaagatgagctgatcaaacagctagaaggacagttgaaggaattaatggagcagaaagacaccgttcagtctcaacttgacaattttcgtagagttacaagtgatggaaatttcaatgatcatgcaacaaggcaatgggatcaatcgaacaggtcttcagagtcccttccatgtagtgcgtctgaagacacactttcttttgatacttacagtgatgtttatgaagaacaagatgatctaggctccaaaggatttgatgtgtcacatgtctataatgattatcatcatgatgtgtatcaccaaaaagtagacgaacacccaatgtctagtttgcatcaaccaagaaaccatatttctaatagaacacagatgtaccaaccaaatagggagacttcaccagaggtccctaaggagcattgcaaggaagtccagtgcatcaaaataaatgagtttaggaggagtcggtctgacgaagaaaaacatggtgaaaacataacatacacatcagagggtgccatcaaactgtacacatgtgattctgagccatcttctgatactgaaaaaacaaataatgacgaatctttagtcctgaagaggtgtgtgataagctccagagacagtgtactaactagaagcagaagttgcagagctagcttcatggtcattccgaatagttggtttgatgattcagcggatatgagaatgacaccaccaggtgacattttaaaatatcctcacagaaggctagagaaggttaggaggagcatgtactctgaaaatggtcattgtcaaaatgatcttacattagactgccctgtggtctctggaaaagttgcatctgacatggttatagacaaaaacacttgcaatgaagaagatggatatgccaacaataaattcagctgcatcacaaaggttaaagagaagcaagaagactattgtacatcccaactagagggcaatcaggacaacgttactgcagaaatcttggacatgaaacatgcaaaaaatattgacaaagatatatttgtggccaatattgactccccttcacggtggcctattaattttgagaaaaaacagaaagaaatcattgagttatggcatgaatgcaatgtctctatagtacacagaacatatttcttcctcctcttcaaaggagtcaaagcagacaatatttatttggaagtggagcacagaagattgtccttcattcacagttctttcattgccggatgtgagcctaatgttactgttacatcaagcttgagaaatcttcggcatgaaagagacatgctctacaagcaaatgctgaggagactccatcttctagaaagagagagcctttatagcaaatggggaattgatctgaattctaaacaacgaaggctgcaactatctcgccgcatctggacacagactgacatggaacatgtgagggaaagtgccgctcttgtcataaaattggtagaacatctggagaaggggcaagccatcaaggaaatgtttgggttaagcttcacattgaaccaacgagctatccaaagacctttcagctgggttagtgctaactcctaaagcaagcatcgagacaaattatgattatgatggttgatagttgcatgggacaacaaacaatgccatgatgaaatacatagtagaggagacctcttgtcagtcacccatacgagcattgattttcactgatgcccctgtatatttcgtatcacttattatgtagatgtacatgtgatggattttgcattgtggaactgttaaaatgaaccgacatgagatgccaaatctttgcaccaaacagtatgatgtattgctgatctgatttttttgcatcaaatgtatatctaatataccatattttttgcttaagtaaatcagatgctatgaatgccaact

SEQ ID NO: 144177 - DNA, 393 bp, Zea Mays
cattgatgaggcaagattaagattcaaacggaagttctgggagaaggctgtggagatatatgatctatgtggaaaggatggtgcatggtggggtgttaaaggttacatgcgagacaattttaaccatagcaataaggtcacctcacacaaagagcattttcagaacagtaggctcgtgaaatctgtgttggatatgtacaggaagcttcgtcctattaccggttcatccttaacacaccaaacaaggtatgacccaacacgtgcagttgacccaatcattgaagatggtcactacaccttgtttcgaagcctagcgagattggacgccacagtgttcaattgttacacgcagatggtatttgtgcagatatcaggtttaatgttgagcataga

SEQ ID NO: 144178 - DNA, 1473 bp, Zea Mays
aatcctaccattgtgccccttggatgtagcaatgtcgagagatgtctttaccagataagcaatggcacgatacatgaagactggaggtctacaatgaccaagttgcaatctctcatgacacaaagtcgctcgacatagatgtcatttggagcaatgggttttcctatcctcctcaatattttgaaagaagaccgtgaggatgtagagcttgtgagaggtgtcctggagacctttatgagtgcattgactcctattgagacatcacaagggccaaatactcaggttcaactagcgttagtgaattctaatatgctatctcgagaaacggagaatatttctcttattttaatcttattgcgaatcctgcaacaaggatgtccccatcgtccacgtcgacatgcacaactatagccttgatgagaagatcaggatgacgctcgaggcacacattgtcgaaaaggccgacaaggtccatgaggttacttgtgtaggtattctagccaaggacttttttagatcctccaactttgtatattaaaagtgaggtctacaatatttctttgccccaatcaatgcagcatggtcctcagacatatggtgatacatattattttcttgtgtttgacacattagttttaattccttatgtgtgtttatttaatttgttcctcaattcaaaatgtaggcttttcttcacaagctgaatccttctgcaagaccatggacagaacatttgctattgatttgtattcgtcctatataaaacagaaactatcagaattttctctatcaagtagttctaaatgtcttgtagcactaattatagaaccagataaaaaagttccactctttgagcttcttgggaatattttcatttttcctctttagcctttagtatgtaactatgcgcactatcatttgatgctaatagctgaaaaaacttagtacttttccatgccatttactggttcaacctcataacccatatttgtgtagtaatatacaaggtgcaggtggaatcctcatgatagatcctcttttccagcgagtacttgtgagtgagtgtaaaagtcgaaaaatacatgtcatatttgatgaggtatttttaggattctggcgtcgtggtgtggagatcatatttgacaataccttttcagaggataaataggtatttcctttgtattttataaccttgatagcttctctttcaatctacttatgagttacttggttgtttacctgatatcgcttgctatgcaaaattgatgactgaggtaattgtaccattatctgcaaccttagcaacagatgaagtttttgaatcctttgaaagtgactctaagtttatggcgcttttacatgaccattcatacactgctcatgctaagggctatactgcaacactaaacactatggattgatatcgggatcctattcaaaccttgatgtcgaccacacgaaactcaaggaggt

SEQ ID NO: 144179 - DNA, 1121 bp, Zea Mays
agaggctgcgatgctcaatgtctggtgttatgaccaggattcgggttgccaacgaagtacgcaaggacccctaccaagggagcgttgatgtaggtggtgggctcagattttctgaaatccgcacggtcatcctcgtaagcgtcgtcctcccccggcccgccgaccaccgcgccgaccagcgggttaggattcgcaccggatgagttgaagtacggcgtgccttccttgcacgccatcggctgaggatggtccctgatcgagggcaacgacgaggcccggtggtggatccgctgcgggtaccggtcgccgtacccgatcatgtacgacatcttcatcgggttgtctcctagcagctgaagagtttcagggccaactgaaacgtctccgcagtcgacggtatgagaggacttggagaggtacttggcgtaggtcaggagcaggaaagagatggaggtgacgtgctgcatgttgctgcctccaggcttgtagatcatgcccccgggggtgtacgtgatgtgcggggaagaagacgactccgggatgagcgtgcatacgaagctgtccgcgaactccttgtacgactgcaaaggcagcgcggcgccttctatgaactcctgcaatgcagtcaaattcccccatacaagtcagttctgctctgttgatttgccagcgtaatttgcattcgtggattgaaggggggggggtgcgatggaagcagccccgtaaaataaccttggagacgaggacgttgaggccggcatgcttgttgtcccacccgaactcgttgctgctgtcctctgcacccagggtcttgccgttgttctgaatgtactggaggaacgtgtcatccttggaggctctcctcagccatgctgccccccacagcagctcgtcctgcgaaggatttcagtgcgcgttaggctctcctcagccatgctgccatctatggaagtgttgttcctcagaccgaacactctatttcgacacttttgtttgggccgttggggtgcaacacataatacatgagcaatgatatgtagtgcatgtagacggggaaacagccaaaattgctagaggttggtcaggaaaagaaacttcaaagtttgttgttccattgaaaa

SEQ ID NO: 144180 - DNA, 913 bp, Zea Mays
tcacattttccatttctttttcatttttctttgttttcttagcatttcacgctacataaatgatacgtaaaaattgtattttttaattttgaaagtaataaattcgaattgtcaatattaattacattgcttgttttgttgttgtgtaattattgtcgataacgcgccacatagtataatatcgttgccaaaatatgttttcaaatggacaagcttgcaccgtaagccagtactcttcttcgagaagccatagcctagcttcccttgcacgacaatcgcatagcttctatccgaagcgtacttactctataaataccgagtgagccttccatacttcactcaaccttgcctttacaaactccacaaccatgaatccctacttagaaaacaattttcttgtgcggttgatggaagaaatggaagaggaagaagaagagttgcagttggcgaggcacatggtcaataggaggcgacgtgcacgcaatgagcgtcgtcatggtggttcgattccagggcgtgttaggattcatcgtgatcacatgagcggcgatgcaagaatccgagcggactactttggagcgaacccagtgtacacggatgctcaatttcgtcggaggttccgcatgcgtcgccatgtctttgagcgtcttgttgatgttgtgcaacaagtggatccttattttattcagcgtccaaattgtgcgggtgagattggtctttctgctctatagaaagttgttgctgttgttcgaatccttgcttacggtattccggctgatgccgttgacgaatacgtacgcattggggaatctactgctcatgaggcattgaaacacttttgcacggccgtccaaaccgcgtttgctccgtattatcttcgtgcaccaaatgcagaagatatcgcacgccttct

SEQ ID NO: 144181 - DNA, 1439 bp, Zea Mays
gttcgtccgagttgccttgtggcagttggattctcctgcgtcccaatcacgcagcctcttggcctccgcgaccgtcccctcccctcccctttcgacgagcgaggggctgtatgctgggcgccgtcgtccgtgtcccgggcccgatcctacctttcctgcccgggccgacgcgcccctctcctccgccgccgccactacctcccgcccgaaacgcccatggcctcggccaccccttgcgatggcggcaccgggaagcccgacgccgcgccggctcccacgcccgcgccaacgccgctgccgcccgagaagcctctcccgggcgactgctgcggcagcggctgcgttcgctgcgtctgggacatatatttcgacgagctcgacgcgtacgacaaggccctcgccgcgcgcgcggcctcctcaggctccggcggcaaggacgactctgctgataccaagcccaaagaaggcaagacaacaaggtgaaagaaaccaaagcgtgaggccaacctgttgcagttggaaacattgaacctgtccccggcgacgcattgccctttccaccgccgcggagcctcgctcatgccgtcgtctctaaaactggccgactctggccagattcctgcaaagcgcggaccaccaggacacctcagtcttcgaactgaaatgtcagtcctaatcccagttgctactgaaagaaaagaaagtgaagggaaatctcctcaccagtgtctagcacaccgataatggaatcctcaccgaacctactctctgggaggattccagccgaatgcgatggatccactcgcatgaagtcccagctcctggtggtgtgcaggtcaagaacacggttccgcaccactcgcacaaccccaggcgaaccttttgatgccacagttcagattgagccagaacgcacaggagagcggcaggggtttcgtcagcatcacacacacatggaagcggaaggtctgagcatgcagaaaaggagaagagtgaagcgtgagctcaccggcgagccgcgccgcctggctgtccgtcagcacggcggcgaacccggagaagccgtgcctgtagctgtaaaggatggcgtccttggccgcctgctcgctgcagagttcgacaccgcgactcgttaggggcacggcacgggcatcgtagatactatactagtcaacaggcaggctctgaaagaagccgacgagtggtggcctcacctgccgagaaggccggcgagcatgccgtggtgcgcgtcccggaccagcgccgggtgcagctcgggattcctcgcccccatgtacacaatgtacacctgcaggaaacggaaccgcgtcattcaagggtcgaggcaagaaccactcgtggtggatcgggaagctgaaccaccaggactccgttcaggctcactcacattgttacaagaagagtggcccagctgaaga

SEQ ID NO: 144182 - DNA, 689 bp, Zea Mays
ggggctgtatgctgggcgccgtcgtccgtgtcccgggcccgatcctacctttcctgcccgggccgacgcgcccctctcctccgccgccgccactacctcccgcccgaaacgcccatggcctcggccaccccttgcgatggcggcaccgggaagcccgacgccgcgccggctcccacgcccgcgccaacgccgctgccgcccgagaagcctctcccgggcgactgctgcggcagcggctgcgttcgctgcgtctgggacatatatttcgacgagctcgacgcgtacgacaaggccctcgccgcgcgcgcggcctcctcaggctccggcggcaaggacgactctgctgataccaagcccaaagaaggcaagacaacaaggtgaaagaaaccaaagcgtgaggccaacctgttgcagttggaaacattgaacctgtccccggcgacgcattgccctttccaccgccgcggagcctcgctcatgccgtcgtctctaaaactggccgactctggccagattcctgcaaagcgcggaccaccaggacacctcagtcttcgaactgaaatgtcagtcctaatcccagttgctactgaaagaaaagaaagtgaagggaaatctcctcaccagtgtctagcacaccgataatggaatcctcaccgaacctactctctgggaggattccagccgaatgc

SEQ ID NO: 144183 - DNA, 1691 bp, Zea Mays
aaaggagatagagagagagggagtgagaagaaggagacgcgaggagagagagagagcggcaggcaggcaggcaggcaataaatggcagttttggtgcgcgcaggctgatggcggcgtggcaggtcctctctgtcgcctcaccgtcttaactccggccgcgcgccggcaccacaaaccacaccgctcggctgcgagcacgcgggttttaatccgtcgcagagcgcatgagcacgccgcccagagcgcagactacgacgagcagccgtctgtagagggggagggaccgagggagagatcagggcgtcaggccgttgtctctcagcttcaccttcaccttgccgggcacggcgaacggcacggcggcctatggatttggccacatggcggggttccctctaggtggaggaggccacagccgcgacgcccccgcgtcgtccgtcccgccggtgcacccctccgacgcagcgtccttcctctacgccgcgcgcgcgggagcgggcctgcagctatggcagcagcacgagcagcaacagcagcacccgttctacacctccaacatcatccgcttctccgatgacccgaccggcgccccgccctcgctcacgggcgccgcgtcgtcgtcgtcttcgcgcggcacgaggggcggcgcgggaagcggcggcggaggcggcggcggggtcagctgccaggactgcggcaaccaggccaagaaggactgcgtgcaccagcgctgccgcacctgctgcaagagccgcggcttcacctgcagcacccacgtcaagtccacctgggtccctgccgccaagagacgcgagcgccagcagcagctcgccgtgctagcggcctccgccgccgccacaaccgccggcgccggcccatcccgcgacccgaccaagcgccctcgcgcgcgcctctccgtcgccacccccgccacgtcctcgggggatcagcagatggtcacggtcgcggagaggttcccacgggaggtgagctcggaggcggtgttccggtgcgtgcgcctggggccggtcgaccaggccgaggcggaggtcgcgtaccagaccaccgtcagcatcggcggccacgtgttcaagggcatccttcacgacgttggccctcacagcttgcctgccgctggagtcggaggcggcgccatcgagtaccacttccgccacgccggggacggattgccgccgagcacggcagccactggcgaagcaggcggcggtggcgtggggagtgtcgtcgtgtcatcggctgtggtgatggacccgtacccgacgcccggaccctacgccgccttccccgccggcgcgccgttcttccacggccacccgagacagtgaccgccggctcgctcgctcgccagcagccgtcccgctgtgtaacgacatcacgactcccatctctggctcgctcgatctgtcaatttcgttagcttcctaatttcttagcctcttgttgagatgcataaattcatgttccttctagagcctagctagctagcttaggcgcgggttagacttgtttgcttcttgagatcaattcatgaggtgagtagcaatatactcagtggctgcaagtggctaaaaatctgacatttaggaaccttgatgagacatttgagatggtttcttgcactgttctctctctgatggtttttggtaattcttgttggtgtggttttgctc

SEQ ID NO: 144184 - DNA, 1725 bp, Zea Mays
ggccgcgctgccgtgttggtgtggtgcctgtctcgcgctgtgcggaaaggagatagagagagagggagtgagaagaaggagacgcgaggagagagagagagcggcaggcaggcaggcaggcaataaatggcagttttggtgcgcgcaggctgatggcggcgtggcaggtcctctctgtcgcctcaccgtcttaactccggccgcgcgccggcaccacaaaccacaccgctcggctgcgagcacgcgggttttaatccgtcgcagagcgcatgagcacgccgcccagagcgcagactacgacgagcagccgtctgtagagggggagggaccgagggagagatcagggcgtcaggccgttgtctctcagcttcaccttcaccttgccgggcacggcgaacggcacggcggcctatggatttggccacatggcggggttccctctaggtggaggaggccacagccgcgacgcccccgcgtcgtccgtcccgccggtgcacccctccgacgcagcgtccttcctctacgccgcgcgcgcgggagcgggcctgcagctatggcagcagcacgagcagcaacagcagcacccgttctacacctccaacatcatccgcttctccgatgacccgaccggcgccccgccctcgctcacgggcgccgcgtcgtcgtcgtcttcgcgcggcacgaggggcggcgcgggaagcggcggcggaggcggcggcggggtcagctgccaggactgcggcaaccaggccaagaaggactgcgtgcaccagcgctgccgcacctgctgcaagagccgcggcttcacctgcagcacccacgtcaagtccacctgggtccctgccgccaagagacgcgagcgccagcagcagctcgccgtgctagcggcctccgccgccgccacaaccgccggcgccggcccatcccgcgacccgaccaagcgccctcgcgcgcgcctctccgtcgccacccccgccacgtcctcggatggtcacggtcgcggagaggttcccacgggaggtgagctcggaggcggtgttccggtgcgtgcgcctggggccggtcgaccaggccgaggcggaggtcgcgtaccagaccaccgtcagcatcggcggccacgtgttcaagggcatccttcacgacgttggccctcacagcttgcctgccgctggagtcggaggcggcgccatcgagtaccacttccgccacgccggggacggattgccgccgagcacggcagccactggcgaagcaggcggcggtggcgtggggagtgtcgtcgtgtcatcggctgtggtgatggacccgtacccgacgcccggaccctacgccgccttccccgccggcgcgccgttcttccacggccacccgagacagtgaccgccggctcgctcgctcgccagcagccgtcccgctgtgtaacgacatcacgactcccatctctggctcgctcgatctgtcaatttcgttagcttcctaatttcttagcctcttgttgagatgcataaattcatgttccttctagagcctagctagctagcttaggcgcgggttagacttgtttgcttcttgagatcaattcatgaggtgagtagcaatatactcagtggctgcaagtggctaaaaatctgacatttaggaaccttgatgagacatttgagatggtttcttgcactgttctctctctgatggtttttggtaattcttgttggtgtggttttgctc

SEQ ID NO: 144185 - DNA, 257 bp, Zea Mays
ttatttctcctctcgccattacgagcaagaaacggcaactccattgatggtccatgaagaccgccggcgacctctactctccctccctctcctctataaaacgacgccgagcttcatctcgcctctctgctcactcacacaagctttcctccctcgctgctcgccagaccaccgaacgtagcttttgccggaataccattctcccctgccgcaggagctccgaccccggcgcgaccaccattggccgacccctctgc

SEQ ID NO: 144186 - DNA, 1592 bp, Zea Mays
ttgtagccagcgagacaaacgacaagctatacccaactagcagcccccggaaacattctctcttccagcctcggtttctcaccagcatccagattggccgtcgtcctcctcgtctcccaggtctcgcaccttctctctgcggcgagcgccgcacgattcgtcgatcgatcgcggtctgtatagagatgatcagcaggtgcatctgctgtatcgccagtggcgatgatgagccggagccagccgccgcacccaccggtcgtcgcagtcgcaggtcgaatccgtcgaggacacccaagaacaggagtatggagtatccatgggagatctacagcctcaaggagctcctgcaggcgaccaacaacttcaacgagagcaacaagctcggggagggcggattcggcaccgtctactggggccgcacctccaagggcgtcgagatcgcggtgaaacgactgaaggcgatgacggccaaggcggagatggagttcgccatcgaggtggagatcctcggccgcgtccggcacaagaaccttctcagcctccgcggcttctacgccggcggcgacgagcgcctcatcgtctatgactacatgcccaaccacagcctgctcacgcatctccacacccagcgcggcgccccctcctcccagcagcatcagcccctcgactgggcacgccgcgttgccatagccatcggtgccgccgagggcctcgcctacctgcaccacgaggccaacccgcacatcatacaccgggacatcaaggcgagcaacgtgctgctggacgcggagttcgtccccaaggtcgccgacttcgggttcgccaagctcatacccgacggcgtgtcgcacctgacgacgcgggtgaagggcacgctgggctacctggcgccggagtacgccatgtgggggaaggtctccgagagctgcgacgtctacagcttcggcgtgctcctcctggagctcgtcagcgcgcgccgcccgctcgagaagctccccggcggcgtcaagcgcgagatcgtgcagtgggcggcgccgctggtggaccgccgcaagtgggagcgccttgcggacccgcgccttgccggacgcttcgacttgctgcagctccgcgccgtggttgaggccgccatgctgtgcacgcagagcaacgccgagagccggccggccatggctgaggtggtcgagatgctcaggttcagtggtgagcggcggacaaccaaggagatcgtcccggtggtcgccgcgagcagcgaggagaccacggacctggaagacgtcaccggcagcagcgagcccctggacaggcggagctggaagctgaccaagctgaggtgattgaccgtccatccggattcaggcatgtgttatcatatgaggtgcaaatggttagtggatttagcagagattgcactgttaattaattgataaggttacgcaaacggcggtgctggtggtgttcggtgggagaaatcaagagttgttaatcatctcgcctgcaaagttttgtttgcttgcgttgtggggtttgttgcatttgcttattattattgttcgatgatctatatgggagctatcagaatgattaagggt

SEQ ID NO: 144187 - DNA, 2713 bp, Zea Mays
catcgatccccactcccccacggaagcgaagcgtacgctacgcgcactgccctccggcgaccgccccgccgctggcgggtcggattgggtccgatccggatctggatcagcaccggcatcgccgcgacggagatgccgaccccgaggcagcggcatacctccacctccggcgggggcggaggagggaggcgcgccgcctccgggtcggccatgctgccccccgtggtggtcctcgtgttcctcttcgtggtcgcgccttcgctcttcttcgtcgtgcgcaatgacggtcgcgcccacgcccacgtccacgtagcctccgatcgcaagggtaagaatggcaatcaggaagcagcagcaatgaagaacctcaaatctattttgcctaaggaggtgtttgatgctataactgctagtcaacaagaatcaggcacattgagtgttgatttttttaggaatcatgcatctccctcttggaaaactgatgatctagtcaccgagaagagcatggatgtcaatgacaatgctaaagctgaaaatagtttgctagaacattctgtgccaacaaatagatcacccaaagatccagatgaacatcaagttgacaaagcagcaaaagtagctcgaaggaaacttagggagaaaaggcgtgagaagagagcaatggatttggttcataaagatgatgaagcacgtattaagctggaaaatgctgccattgagcgatcaaaagctgtcgattctgctgtgcttggaaaatacagcatatggcgaaaagagaatgagaatgagaattcagactctacagttaggctgatgagggaccaaattattatggctcgtgtctattctacgcttgctaaatcaaagaacaagaacgatctatatcaaaaactgcagactcgaatcagagaaagccagcgggctgttggagaggctaatgctgatgctgacctgcatcacagcgcaccagaaaaaatcagagcaatgggtcaagttttatcaaaggctagagaagaactttatgattgtacggcaatcactcagagaataagggctatgcttcagtcagctgatgaacaggtcaggagcttgaagaagcagagtacatttcttagccagttggctgcaaagacaattccaaacagcattcactgcttgtctatgcgtttaacaattgattactatatcctgccccttgaggaacggaaattcccaaggagtgaaaatttagaaaacccaaatctctatcactatgcacttttctctgataatgttttggcagcctctgttgttgtgaactcaaccataatgaatgctaaggaaccagagaaacatgttttccatcttgtgactgacaagttaaactttggagccatgaacatgtggtttctgctgaacccacctggcaaggccaccatccatgttgagaatgtggacgaatttaagtggttgaactcatcatactgtcctgtgttgcggcaacttgagtctgctgccatgaaagagtactatttcaaagctgatcgtcccaccactctctcagcaggttcttcgaacctaaagtatcggaaccccaagtacctctctatgctgaaccacttgaggttctatctcccagaggtctatccaaagttggataagatactcttcctcgacgatgacatagttgtgcagaaagatttaacagggctgtgggatgttgatcttaatggaaaggtcaatggtgctgtggaaacctgtggggagagttttcaccgttttgacaaatatcttaatttttcaaatccacacattgctcggaactttgatccaaatgcatgtggctgggcttatgggatgaacatctttgatctgagggagtggaagaagaaagatattactgggatctaccacaaatggcaaaatatgaatgaagacagggtcctttggaagcttgggacacttccgcctggcctcttgaccttctataagttgacgcacccactggacaagtcatggcatgttcttggattaggatacaacccaagcattgaccgttcagagatagacaatgctgctgtggttcattacaatgggaacatgaagccatggctggagctagcaatgaccaagtaccgaccatattggaccaagtatatcaagtatgatcacccttacatccgtggatgcaacttgagtgagtagatagtcgtgctgaaaaactgacagatgaggaagagcttattggacagaagtgttccactaccatgtccttgcggtgcgttattcgactcagcaaagtggtactacctcaagctcttgattgctttcctcccctcctctcccaagaaaaattcaccggtggctgttctgacgagtgatgtattattatagcgatgcgttttttaattcaattattagtaatatgcatttatattttccgtcaaaattagcaggagaaaaacttataaaatggatttgtggggctggtgtcgcgtgctgcttagaggtatgcctagagaatcgagtgttgccggaattggatcctttttttgtatcagacgataaagtgggagtacaagccaaagcggaaggcatgaatcgaatggattacaggtttaaccctgagtcctgaccaatgtgaaactattttacctacagtatcaagaaatgctggtgtccgttttatgataactgatctcgtagctaatcttgtgtttctcggtcacgtgtt

SEQ ID NO: 144188 - DNA, 1980 bp, Zea Mays
catcgatccccactcccccacggaagcgaagcgtacgctacgcgcactgccctccggcgaccgccccgccgctggcgggtcggattgggtccgatccggatctggatcagcaccggcatcgccgcgacggagatgccgaccccgaggcagcggcatacctccacctccggcgggggcggaggagggaggcgcgccgcctccgggtcggccatgctgccccccgtggtggtcctcgtgttcctcttcgtggtcgcgccttcgctcttcttcgtcgtgcgcaatgacggtcgcgcccacgcccacgtccacgtagcctccgatcgcaagggtaagaatggcaatcaggaagcagcagcaatgaagaacctcaaatctattttgcctaaggaggtgtttgatgctataactgctagtcaacaagaatcaggcacattgagtgttgatttttttaggaatcatgcatctccctcttggaaaactgatgatctagtcaccgagaagagcatggatgtcaatgacaatgctaaagctgaaaatagtttgctagaacattctgtgccaacaaatagatcacccaaagatccagatgaacatcaagttgacaaagcagcaaaagtagctcgaaggaaacttagggagaaaaggcgtgagaagagagcaatggatttggttcataaagatgatgaagcacgtattaagctggaaaatgctgccattgagcgatcaaaagctgtcgattctgctgtgcttggaaaatacagcatatggcgaaaagagaatgagaatgagaattcagactctacagttaggctgatgagggaccaaattattatggctcgtgtctattctacgcttgctaaatcaaagaacaagaacgatctatatcaaaaactgcagactcgaatcagagaaagccagcgggctgttggagaggctaatgctgatgctgacctgcatcacagcgcaccagaaaaaatcagagcaatgggtcaagttttatcaaaggctagagaagaactttatgattgtacggcaatcactcagagaataagggctatgcttcagtcagctgatgaacaggtcaggagcttgaagaagcagagtacatttcttagccagttggctgcaaagacaattccaaacagcattcactgcttgtctatgcgtttaacaattgattactatatcctgccccttgaggaacggaaattcccaaggagtgaaaatttagaaaacccaaatctctatcactatgcacttttctctgataatgttttggcagcctctgttgttgtgaactcaaccataatgaatgctaaggaaccagagaaacatgttttccatcttgtgactgacaagttaaactttggagccatgaacatgtggtttctgctgaacccacctggcaaggccaccatccatgttgagaatgtggacgaatttaagtggttgaactcatcatactgtcctgtgttgcggcaacttgagtctgctgccatgaaagagtactatttcaaagctgatcgtcccaccactctctcagcaggttcttcgaacctaaagtatcggaaccccaagtacctctctatgctgaaccacttgaggttctatctcccagaggtctatccaaagttggataagatactcttcctcgacgatgacatagttgtgcagaaagatttaacagggctgtgggatgttgatcttaatggaaaggtcaatggtgctgtggaaacctgtggggagagttttcaccgttttgacaaatatcttaatttttcaaatccacacattgctcggaactttgatccaaatgcatgtggctgggcttatgggatgaacatctttgatctgagggagtggaagaagaaagatattactgggatctaccacaaatggcaaaatatggtgaggattcaattcttgacactgaattgcatgatttacaaagaactgacaaatatgtacattcttagttaa

SEQ ID NO: 144189 - DNA, 95 bp, Zea Mays
ctttgtccccaaatctgacgattaactggtggatgaaagcggcgagacaggagaatacaagacgtaactttttagtgcaaaaaaaaaaaagagaa

SEQ ID NO: 144190 - DNA, 1629 bp, Zea Mays
atcgccagccagtcagagtcaggaagcgcggccgcaccaaccaggccctgtacatagcatcggccataacacaggttataggattctcagtccggccgtgccggccatccatccggatcctgagaagccgtgcaagtttcctgcttcgcggaggatttcagtcatccgcctgccgagggccgagtttctgcggagagtggccagtgggcagattttctcggccctgaatcgatttgcctgctactcgcggtaggcgaagggaaggattcaaatcaacataacatggccgcagccaccgccgccgcttccaccatgtcgctgctcccgatctcccagctcaggcagcagcacggcgcgggcgccatgaggcggcggccctgggtcgcgcggcggaggcgatacgtcgttccgacggcgaggctgttcgggccggcgatcttcgaggcgtcgaagctgaaggtgctgttcctgggcgtggacgacgaggccggcagcaagcagcacgggccgctgccgcggacgtacacgctgacgcacagcgacgtgacggccaggctgacgctcgccgtctcgcacaccatcaaccgcgcgcagctgcagggctggtacaaccgcctgcagcgcgacgaggtggtggccgagtggaagaaggtgcgcggccggatgtcgctgcacgtgcactgccacatctccggcggccacttcctgctcgacctcatcgcgggcctccgctacgtcatcttccgcaaggagctccccgtggtgctcaaggcgttcgtgcacggcgacggcgacctgttcagccggcacccggagctggaggaggccacggtgtgggtctacttccactccaacctggcccgcttcaaccgcgtggagtgctggggtccgctccgcgacgccgccgcgcccgccgaggacgactccgccgcgccggccgactcctccaactccaaggatggccagatgatggccatgtgcgagtggccgcaccggtgtccccagcagtgcgactgctgcttcccgccgcacagcctcatcccctggccgaacgagcacgacatggccaccgccgccgccgccgatgcctccggctccgcccaacagcagtagcgaaactgcacttgtgctgctacgcaatgtaagccgtcgtagctagactactagaactagcgtgttgtttggttgggtacgtagctgcaaccgcgcgcgtgcagtagtgtggcgccaacaccacaacacctgcatctgcatgcccggcccgcgctgcctattctttaattggtagcttagcttagctcgttcagctccacttctacaagctcttcgtctttggatcggaagtactccctccgtttcttcgtttctttttagttgttgctggatagttcaattttgcactatccagcgacaactaaaacaaaacgaaagaagtagtagcttggtcgaggtcggagatgaacatggtcttgtacatatagctagaacacttgatctctagatggaaaacctgcacgtacacacatatgttgcaggcaaagtatcatccgaagtattcttgaactggaagtcctagatttgtgtagtggtgtacaaaattggatatggttaattgtttgttcgaccgta

SEQ ID NO: 144191 - DNA, 1184 bp, Zea Mays
tccaaaacagcgccagagattgggccgtaagacaagagcgggccacgaaaggaaaccacggcccacgggtggtaaccacgtccacgcctttccgccaaaagcaaaacccagagcgcatgcgcatccagattcctgtcttcttcaacagagagcaaccgcggccgctacctccgccacagcccacagctccctcgcactgtatctgcatgcaacaacacgctctgcagcacgtctaccccgtgaccctctcggcatctccagtgtccagagctacaacagatggccgtcagttatgtccgcggtgatgttgtgcacgaaacaccgaagcaaaagaaaaaagagaacgacgacgtcgtcgccgacccagacgccgcataaaggaaagctttctccgcacaagaaaccaaaccgtgacgcagcgcagccatggggaagcagctctgcgacatgcaccgctcgcgccgccgcgcccgcatcgtcgccgccgccctcctctccgccttcgccgctgctgccgccgcgctcacggtgtacctcgtcttccgtccgctgaagccgcaggcctccgtggtgcgcgtcgccgtgtaccgcatggccacggccgccgggaactcctcggaggggcgggccccgccgccgtacacgctcgcggcgagcgcgcggttcacggcgctgctgcacaacccgagcgaccgcgccgtggtgttctacgacggcctcttcgcctacgtgacgtaccgcggggagatggtggcgccccccgcgccgctgcccggggtggcacagggccgcggcgccgacgtggcgctgtcgccgcatttcggccttggcggcgcggtgcccgtgccggtgtcggcagacgcggcgcaagcgctggagggcgactgcgcggcgggccgcgtggagctacgcctcgtcgtcatgggccgggtcaagtacatgagcgggccattcaggaccggatggcgcgggctatacctgcgctgcgatgtcaccgtcggcctctgggtggacgccaccgcgggcgacgacggagccggggacgtgccactgctcgagtaccccaagtgctccgtcgacgcttgagttgatccttgatcggcgcaatgcatgagcgctcagatgatcagattttcagaattctggtggagaataaggaattgggaaaaacatttttctgtgtc

SEQ ID NO: 144192 - DNA, 283 bp, Zea Mays
caacaactaaaatgtaaacacgacattatcatagttgagtacaagaataattatctcttatatcttattgtaaaatctgaaacagttctcctatagatggttagcttgcattttacgctacaattacctcagatcacttcttattgtatcttacacaatttacgaaatttcttgatgtgttttatgacaaccccgtgcgctgagagatacattgggtctacattcgttattatgaaacagatgaacgatttacgctaaaattcgtactcatttacgttgtttt

SEQ ID NO: 144193 - DNA, 2524 bp, Zea Mays
gtcgttctctcacaaactggcattcgatttcgcagcccaccagctccggtttcttccgactgcgagcttccaagtggcgactgcccgagtgcgagaagagggagagaagcggttgtcggaatccactccggccaggggtgcggaggtcggaatggggggaggattggatgaggcggtgaaggtggtggatttggaggacggtgaaggggaggaggaggcagaggccgccgcggcggagggatcgagcatggagatggggatgctgccaaggatgccggtgcgtgtgctgctcgccgaaggcgacgactccacgcgccacgtcatctccgcgctgctccgcaagtgcggctaccgagttgctgcagcctctgatggtgtgaaggcgtgggacctattaaaggaaaaatctttcaacgtagaccttgttttaactgaagttgaactgcctttgatgtctgggttcctcttgttatccacaatcatggagcatgatgcgtccaagaacatccctgttataatgatgtcttcgcatgactcagtaagcatggttttcaaatgcatgctaaagggtgcagcagatttccttgttaaaccgataagaaagaatgaattaaggaacttgtggcagcacgtttggagaaaacaactggcaaacggtgggcctaatgttcagcacatacaacgagaagagaatcttgcagaaagaatccaacagaagactggcgtgacaaaatctgataatttggacagagatgtgccctgtaaaaatagagaatgcagtgaacaagaaagtgatgctcaaagttcttgcacaaggtcagagctggaggctgaaagtaagcaaacagacaacattttggagtataagcaatcaactcaaaggcacttgtctattcctagccacaagaatgttgagctaaatggacagaccaaaatacaaagagctgagggtaataacttgattccagcaagagaagacgatttatcgccaaagaaaagaacgtgtttgaatgagaataattctgagagagcttcaagagatatggagctagtccacattatggaaaatcagcagaagtataacacacagtgggaggtggatactatgagaacaacatctaggggaaatgatgagaagggctccatcccagcacatcagttggagctttctcttagaagaactgactacggaaaattagagaaccacgagaaaaatgatagaagaacactgaaccattcaacttcctctgcgttttccttgtataattgcagggctgtgccaaccttaggaaatgctggtgatggtcaattatgcagcacctcagaaacactagtggatgttgaaaataaaaatggagattcagcagatccctctcaagacatgactgaaacaaatcgtcctcctattagagttgttcctgtccctgtccaaggtctcacatttgatgggcagccattctggaatggtacaccagtggcatccctattctactcacagtcaactcctcccatttggaatagcaaaacatcaatgtggcaagaatcaaccccacaagcaacttcactgccacaaaaatctccacagaatgaaccaaatgaaatgggggctaaaccagttataaatgcaggggaacaatttgccatgggtcctcccagtgccagtgggaagcagctgcatgttgaaattcttaatgatgatccacggcatatttctcctatgactggtgaaagtggaatcagtaccgtgctagacagcaccagaaatactctgagcagtagtggctgtgatagcatttccaaccagatcactgcccctactgaatcatccaatgtatataaggatgttcctgaaaccccaagcgccgaagggtcacggcatctgagccagcgtgaggctgcactgaacaagttccggctaaagaggaaggataggtgctttgagaagaaggttcgataccagagccggaaattactcgcagagcagcgtccacgggtcaagggccagtttgttcgtcaagatcatagcatccaaggaagctagggtccagttactgagctggaactctattctattatctaaaaaaagtcactgcaagtgactccactgcggtctgcgggtatcctgatgtcagattttgccgaagagttggaagcagtcacactgagttacagtttgctctgtatatttgctgaagtttgtaatatatgtatgtataggctaacgctgttctttcctaggttaggcacaggacctggcacgtttgaaggtttgtcagtaggcgttagaaaatacaggcatactttgtttcaggtcaagatgagatgtgaccttcagtagcgcatgtgtgctttaagtcttgtattacgtaattaagttgtttgatgtttcgggttagatgtacgctccgtggatgaaatgtaaaggatgtccaccaaaacatgcttgtttccgtgcagcttgttgcaatgaacatcgttggcctggtttctgtcaatgctctcatgccgtgtgtactactgtgaa

SEQ ID NO: 144194 - DNA, 198 bp, Zea Mays
atgcggagatcatgcttaaaccacaccaccgcggcagcgcccccgtccctcacgggggtgggggcattggaggcgacgatccggactcggcatcggttccgcaggacccgacggtggtggggcggggcagggagaagcggcccgaaccgtagcgcaagcagagccatgggaggggctgcgcggaggcgtcagctgtag

SEQ ID NO: 144195 - DNA, 101 bp, Zea Mays
gtagaatattagtgatcaaagattccaaggcacatgtgatttatttttctgtacagttgttgaggttcgttattaagttcaacgctgctgttgggtttgtg

SEQ ID NO: 144196 - DNA, 1767 bp, Zea Mays
aacacatcgagcgactctgtttatatcagaatcgcgccaacgcgtcgccggcagcgtcgtctcgtgtgggtcgcggtcgcgaccaagcgacgacggcgagggagggaatgtacgccgctgtcccccactctcctccccactcccaccgcagtccatcgacagtggagggttcccggaagcaaagcgccagcggcagaagcctggctagctggcctctggtatgtggttggctcaaggattacaggatttcaatcagtaacaatcaagtatgaggaaggaacaacaacgggtgtccaagcttgggtggttggcttgccggttacagcaagtcaattagtaactacagatgggaggaaggcgaccgacgtatactacgcgtgctcgatcggcggcggcggctctacgacccgcggccgggatgggtcggcagccgtgctgcgacaagctgggggtgaagcgggggccgtggacggcggaggaggaccgcaagctcatcaacttcatcctcaccaacggccattgctgctggcgcgcggtgcccaagctcgccggcctgctgcgctgcggcaagagctgccgcctgcgctggaccaactacctccgcccggacctcaagcgcgggctcctcacggacgccgaggagcaggtcgtcatcgacctccacgccaagctcggcaacagatggtcgaagattgctgccaagctaccgggcaggactgacaacgagatcaagaaccactggaacacgcacattaagaagaagctgatcaagatgggcatcgatccagtcacgcacgaacccctcgaccggaagacaaccagcagcggcccggctacaacctctcagtcaaccaagtctgacgaggcgaccaaggagcagagcccgcagaacgacgacgccgtgataagggacgtgccggccgatggttgcagcccgacggaatcgagcacgaacaccgtgagcaccggcggaagcagcagcagtggtggcggcggccatgaccaagacccgctggtgaagtggcttttggaagaggagcctgccaccggcgacgaggcgtggctgaacttcactggcagtgtcgacgtggacgagttcagcagcattgccgccggtccggagttgttgccgtgggatggcgcgaccgactggctgctcgactaccaagattttggattgggggactcgagcttggtcgatggctacatggtcaacaacaacagctcaaacggagcaaagttctagctagctagccgaagatgtcatctcatctgcttgtgttgctttgctgccagtgaacgtagatacgtaagtaataaaagcattggtatcgaggttgtcaaaggtggatgaccacatcgcaggaagatcatgaagagtccttgcacgcactcctgtatctcgaaccaactaacggctgggatgcaattgagaaggggaggagcacaggccaatcaatctcaaagagataaaactggttcttgaagatctcgaagaaagatgtgtttcttcacaatcacaaagagaggttgtagaagttcttgctgttgtatacatggttgcgtatatattgctaaattgtaccttgttaggccattttgttcgcaaattgcacgagtcactaattagtcagcaaaaatgtgtgcataaagaagagcagttgaaatcgcctctttgtacgttgtgggtgacgttcttttagttacgttgtggatgacgttgatgcatttatagggtatttggtttgaggaataagttatctggtt

SEQ ID NO: 144197 - DNA, 1651 bp, Zea Mays
ggccgctgtgtgctccgtcgccatcgcgggggataaaaggaaaaggctccgaggaaacagtataaaagcgcccccggcacgcacgcacgcacgcaggctcactccacgcagcagttgccaggcgcttgtcactccagccagcggcagcccttttccttggcgaggcttggtttagtttagcccgcctgcggtctgccgcctgccaagtgccacctgagacctgatagccgcaaccgtgagaggctggtagcccgtagccggcatccctcgccctcgacccatttgaacagggcctcgagctttgcctctgctgctgctcgcttgatccgtctcttgccgtagtatactacgcgtgctcgatcggcggcggcggctctacgacccgcggccgggatgggtcggcagccgtgctgcgacaagctgggggtgaagcgggggccgtggacggcggaggaggaccgcaagctcatcaacttcatcctcaccaacggccattgctgctggcgcgcggtgcccaagctcgccggcctgctgcgctgcggcaagagctgccgcctgcgctggaccaactacctccgcccggacctcaagcgcgggctcctcacggacgccgaggagcaggtcgtcatcgacctccacgccaagctcggcaacagatggtcgaagattgctgccaagctaccgggcaggactgacaacgagatcaagaaccactggaacacgcacattaagaagaagctgatcaagatgggcatcgatccagtcacgcacgaacccctcgaccggaagacaaccagcagcggcccggctacaacctctcagtcaaccaagtctgacgaggcgaccaaggagcagagcccgcagaacgacgacgccgtgataagggacgtgccggccgatggttgcagcccgacggaatcgagcacgaacaccgtgagcaccggcggaagcagcagcagtggtggcggcggccatgaccaagacccgctggtgaagtggcttttggaagaggagcctgccaccggcgacgaggcgtggctgaacttcactggcagtgtcgacgtggacgagttcagcagcattgccgccggtccggagttgttgccgtgggatggcgcgaccgactggctgctcgactaccaagattttggattgggggactcgagcttggtcgatggctacatggtcaacaacaacagctcaaacggagcaaagttctagctagctagccgaagatgtcatctcatctgcttgtgttgctttgctgccagtgaacgtagatacgtaagtaataaaagcattggtatcgaggttgtcaaaggtggatgaccacatcgcaggaagatcatgaagagtccttgcacgcactcctgtatctcgaaccaactaacggctgggatgcaattgagaaggggaggagcacaggccaatcaatctcaaagagataaaactggttcttgaagatctcgaagaaagatgtgtttcttcacaatcacaaagagaggttgtagaagttcttgctgttgtatacatggttgcgtatatattgctaaattgtaccttgttaggccattttgttcgcaaattgcacgagtcactaattagtcagcaaaaatgtgtgcataaagaagagcagttgaaatcgcctctt

SEQ ID NO: 144198 - DNA, 2457 bp, Zea Mays
aataaggctcctggccctgatgggtttacaggacaattttataaatcatgttggcaaattataaagggggatattatggctgctgctatggtagtctggaataggaggctgctgaactttgacctactcaattcagcctacattattcttcttcccaaaaaggaggatgcctctctcgtgaagtcattcttttgctaagctcatcaccaagtttttggctaacagattggctggtcatcttgaattcttgataagttgctgtcgcataatcaaagtgcctttattaaaggtagattcaaccttgacaacttcatgctagttcaacagacggctaaattattccaccagaaaaggcttggtcggatacttcttaagttggatatcacaaaagcctttgattcggtcttgtggtctttcctgttagaagtaatgaagcatttgggttttgggcaaatttggtgtgatattgtgagcaatctccttgcttctgcattgacattgactcaagcgatgcttaatggtgaaccaggtcaaaaaattctccacagaagggaccttcggcagagggacccactctcccccatgctgttcattctggttatggatgttttattctacctgttaaagaaggcagctaacgacggtctgttgaaaccattacctgcaaactcagagctcagccgcacttctctttacgccaatgatgtggtgatcttcctacaccttgtggcttctaatattgagatcactacggacatcctaaagttttttggtggggcattagggctaaaaacaaatatggaaataagcagtgtatttcccattcactgttcggaggaaaaattatctactatccataatctccttccatgtcttgttgccaattttccttgcaaatacttgagggtgcctcttacactgaagtgacttggtaaacatcacattcagccgttcattgataagattgccgatcgtttgcctagttggaaagccgacctacgatccagagctggaaggctgattcttgttcagtcagttctcacttcgatgatggtttatttagccatggccatggaccttccttcttggcctctaaaggctatagacaaaattaggagaagtttcctttggagaggaagaaaagaagctacgagagggcactgtttggtggcctagaacaaggttacaaggccaaaagagcttggcggctaggacatctcccacctgcagcatatgagttgggcccttagactgcgttggctctagttacaaaaaactgatcctgaccgaccctaggcagccttcataattcatgtgcacccttcagttcttgccttcttttctgcggcagtttcatctgtggtgggtaatggcaggaatactctgttttggatagataaatggttaaatggccaaagtttgcatcagttggcacctcatcttgtcaagttagtcccttcaagggctaagaagaggagtgttcatgatgcccactactgggagctgggtacaggacataagaggggctattactattaacgtgttgactgatttttttagagtctgggaccttgctgcaaactggattttgcacccggaacaagaggataagcatatatggctgctctccagctcagaaaaatataccgccaagtcgtcttatgatggtttcttcattggttcaacaactttcaggtcatgggggagatttggaaaagctgggctcctggaaaatgtaaattcttcatgtgacttgtggcgcacgggcgttgctggacgctgactggctagcgaggaaaggtctgcctcaccctcaaagctgtctgttttttctcgaaaaacgcaagaggactgcgttttagatatatattaagaagagagagacaagggtctaaagagagccaaagttgtctgttatgtgaccaggaggaagaaactatgaatcatttgctagtattctgtgtattctcaagggaagtttggtttaatatcctgaaagctgtcggtttgcagcatctcactcctagtctcaattctacttcctttgatgactggtgggaggaagtaagcttgacccttattggcccttccaataagaagttgcgcaagggtctgaactcccttatcatgttaggggcttgggccatttggattcattgcaatcgatgtgtcttcaacggagaatagcctagggctagcaaggtcatcaattgggtgatggatgagtctcatctttggtgtagggttggggcttagggtttatctgatatccttttacctcagcatactaatcggtgatttggtctccagtctgcttgttgtagggtccagtccttcccttgtacaagtgcacctagtcaatagtgtgtggttttttttgtagagttgtacgaggtttttaacacctcacccctttttcttcttaatataatgatacgcagctctcctgcgtattcg

SEQ ID NO: 144199 - DNA, 1149 bp, Zea Mays
aagcaagatcaattatcaaaccaatctctctcccttgcaatgaccctctcaagcgcctagggctgctaccctagaaccaagcctgcggcagaggggtataacctcgccggagaagacaactacccccatggaccgaaggtccatgacacctggtatcagagccaggttatcctcaccaccaccagccgcccatccctcaccaccaccagccgccgcgccatctgccgccgcaacgccctcccacccgccctcaacaactctagatgcattcactcggctcgaagagaagtgggatcaattcgttgtgatgttccaccgctacaaggagaagacagaaaaggaactccaagcagcggtgcggcttcaggcggcagcgcgagggttcctggcacgctgccaggtacagtcccttcgtggggagaagcaccttgctgtggcctccagggccaccccatggccgtcatcacatgagcaggccgtggtgcgcctgcaagccgcagtgcgcggcttccttgttaggcgggcggtgcggaagctgcacttgctgatcagctcatcgctgcaccaactcgcagcctgcgcgcccaaccatcaggtctcgtctatactttttgaaccccctgcagaagtcgagatctgggtatgcagcccccctgcacggccaaagagggtcgtctccttcattcgggcaactgccttggtgctggacagacccaacataaggacgggttggtttctccttcacctttcatccaacgtgaagtccgcagttcagctctttccttgggatccaggaggacaggaggacatagctgcagttcaaatttatattttagttccacaattattttgtattttcgtcttaaataataaaggtaagtcgagatgtaaaaggcttaaccttaagtcgtgtcaggtaagtctatggcagctcgaggacgagctggtcctcaagggagggggagatgtcatgggcatcatagggagcgagaggcaacaaccaggctgggataaggctagagaacaagattgagatgagctgggataaggctagagaataagattgagatgagagaattgtggagagttagttagcatcagataagtccaaaaaagtaggagttagttgagagtcaaaagcacaacaaa

SEQ ID NO: 144200 - DNA, 1318 bp, Zea Mays
aagcaaccagaaccatacaattcttgccaaagcagaatctatttaacggcgacaacacaaccaaagcgtggcattcttccttccttctttccttcaccaatggccacgagaatagccttgtgtcttctcggccacgtcctcctcgccgtcgcgtcgatggcagtggcggcggcggccggtgacgcgggcaagatcggcatctgccacggccgcgttggcagtaacctcccgccgccgtcggccgccgcggcactgctcaagcggaacgggatcaccaaggcgcggctcttcctgccggacccggccgtgctcccggccttcgccgcggcgggcatcgacctcatggtgggcgtgcccaacgagaacctcaccttcctggccgcggcggggcccgagggcgcggcgcagtggctgcggtccgcggtcctggcccacgcccccgccgagcgcgtccggtgcctcgccgtcggcaacgaggtgctgtacaacaaccagttctatgcgcctcacctcgtgccggccatgcggaacctgcacgccgcgctcgccaccctggggctggacggcagggtcaaggtctcctccgcgcacgcctcctcggtgctggccgcctcgtacccgccctccgccggcgcgttcgacgccgcctccctccccgtcctccgccccatgctgcggttcctggccgacaccggtgcgcccttcatggtgaacgcctaccctttcatcagccacgtgaacgacccggcgaacgtgcagctcgcgtacgcgctcttcggagcgggcgcggcgccggtgcaggacggcgcgctggtgtacacgaacctgttcgacgccacggtagacgcgctggtggccgcgctggagaaggaggggttcgacggcgtgccggtcgcggtgaccgagaccgggtggccaaccgcggggcacccggccgccaccccgcagaacgccgcagcgtacaacgccaagattgtggagagggcggcgcgcggcgtcggcacgccgaagcggcccggcgtgcccgtggaggtgttcctgttcgacttgtacgacgaggacggcaagcccggccccgagttcgagcgccactttggcatcttcagggcggacggcagtaaggcgtatgacatcaactttgcctagagctggtagtttctggagcgatggacggcttgttgattagtggatcaactggtgtatgctgaagaaaaaatgcctcacatcccctcttgttttacatgtctcgtgactactgtgtcgtttattgatttattatagttgcccacatgcgaagactaataactgattcttagca

SEQ ID NO: 144201 - DNA, 1679 bp, Zea Mays
agcccttgtcccgttttgcctgcacctgattggctgggccatccctcccgcggatcgccttgatgtaatccatctcagccgtcgaaaatccttccggatcttatcgcttttcctcacactcggatcgacgggcccaccacatctccccgtccaggcgtccacgccattttaaatacatcccgtttcggggttgccgtcatcacaattcacagcgctcaagttctcgcgcccagagccaaatttttctccactcaatcactgcagccatggacgccagcggagccggtagcaaggcgaagaagggggcggctgggcgcaaggctggcggccccaggaagaagtcggtgtcgcggtccgtcaaggccgggctgcagttccccgtcggccggatcgggcgctacctcaagaagggccggtacgcgcagcgcgtgggcaccggcgcccccgtctatctcgccgccgtgcttgagtacctcgccgccgaggtgctggagctggccggcaacgcggcgaaggacaacaagaagacgcgcatcgtcccgcgccacgtgctcctggcgatccgcaacgacgttgagctcggcaagctgctggctggcgtcaccatcgcgcacggcggtgtcctccccaacatcaacccggttctcctgcccaagaaggtggcggagaaggcgtctagcggcggcagcaaggagagcaagtcccctaagaaggccgccaagtccccaaagaaggcagccaagtccccgaagaaggcttagaaattagtcactccactagcgctctgctgtagcatgttcgtgtttagatctgtggatgttatgtgttccggcctaatttcctctttgccttgtggcttctgatatgttcatcggcatgtttgccgtgttgtgtttccttgttctgattttgcaattcatcatcttgttgaatgaacttactatcgggaaatgaagcataataacgatgcaaaatgattgttctgaagtcgatgtttgctaacccagaccctgacaaatgtaaattagctcacattgcccagctgtctcatcctcatcgatctatcagtcggcagccaaggcgcctcgttcttcacttcttcacagattgggccaagttcaagaaaatatccaagttcaaacagcaggtcaaaaggagtacatgagagagtacccctttgattttttgtgaccataagatatgagcttttatcacgcagtaagagcgcgtttggttagagagtcaactagaatgaacaactccatttcagtttttcagaatgaaactgtttttagcaaacaaaacaaaaccgtttcattttttgtttgattgaagagtagaatagtgtaggaccgctccattttctgtttagttgcagagccaaataagtgtagaggataggagagggagagtgctcgtgttcaagagagtggttgtatacggtcgtttttatggagcgataacatttcaattatttatggtaaatttttatatgaagactctatgagtcattcaggtcctcttttattggaaaccaaacattcaaaaataggaataaagccactccatctttcttcactcaaccaaacataccctaatagcagggagcagggttaagggccacaacatctagcatgagtccactcgggaaaaaggacataatgcacgtacgacaaaga

SEQ ID NO: 144202 - DNA, 3264 bp, Zea Mays
ggcttctttactctctaaattttcttttttttaaaaaaaaatattgttctttggcgtacgctggtgcgcctctcctccccgcctcggcatcgacgcgatttgcgtgcccgacatgtcggactcgccggtggagctgccgagccggctcgccgtactgcccttccgcaacaaggtgctgctccccggtgccatcgtgcggattcgctgcaccaaccccagtagtgtgaagctggtggagcaagaactctggcagaaggaagagaaaggcctgatcggggtacttcctgtgcgggactcggaggcaacagctgttggctctttgctgtctcctggtgtgggcagtgattcaggtgaaggaggcagtaaggttggcggttctgcagtagagtcatcaaagcaggacacaaaaaatgggaaggagcccattcactggcacagcaagggagttgctgccagagctttacacctttccagaggggtggagaagccaagtggaagggttacatacattgttgttcttgaaggtctttgtaggttcagcgttcaggaactaagtgcaagaggaccataccatgtcgcccgtgtttcacgccttgacatgacaaagactgaattggagcaggcagagcaagacccagatcttatcgctctttctaggcagtttaaagctactgccatggaactaatttctgttctagaacagaagcagaagacggttggtagaacaaaggtgcttcttgatacagttcctgtttacaggctagctgatatttttgttgctagctttgagataagttttgaggagcagctttcgatgctggattcagttcacttgaaagttagactctcaaaggcaactgaacttgtagacagacacctgcagtccattcttgtagctgagaaaataacacaaaaggttgaggggcagctatcaaagtcgcaaaaagaatttctactgcgccagcagatgagggccataaaagaagaacttggtgataacgatgatgacgaagatgatgttgctgctctggaaagaaagatgcagaatgcaggaatgcctgctaatatttggaagcatgctcaaagggaaatgaggcgcctacgaaagatgcaacctcagcaacctggttatagtagctctcgagcctacttggaacttcttgctgaccttccttggcaaaaggtcagtgaagaaagggagcttgaccttagagttgcgaaagagagccttgaccaggatcattatggactaacaaaagttaagcaaaggattattgagtatttggctgttcgtaagcttaaacctgatgccaggggtccagtgctgtgttttgttggaccacctggtgttgggaagacatctttggcctcctccatagcaaaggccctgaacagaaaattcataagaatctctcttggtggtgtaaaggatgaagctgatattaggggccaccgaaggacatacattggaagcatgccagggagacttattgatggactaaagagggtatctgtgagcaatccagtgatgcttctagatgaaattgacaagactggttctgatgtacgtggtgatcctgcatcagcactactagaagttcttgaccctgagcagaacaaagcattcaacgatcactatttgaatgtgccgttcgacctgtcaaaagtcatatttgttgcaactgccaataggatgcaacctataccccctcctctgttagacaggatggaaatcattgagctgccaggctacacacccgaagagaagttaaaaatagccatgaaacatctcataccaagggtattggagcagcatggcttgagtacgacaaatcttcagattcctgaggctatggtcaaactggtcatcgagaggtacacgagagaagctggtgtgcgcaatcttgagcggaacctagctgcattggctcgtgcagctgctgttaaggtcgcagagcaagttaaaactcttagacttggcaaggaaatacaaccaattactacaacccttcttgattcaaggcttgctgatggcggtgaagttgaaatggaagttattcctatggagcatgatatatcaaacacttatgaaaatccatctcctatgattgttgatgaggctatgctagaaaaagtacttgggcctcctagatttgatgacagagaagctgcagatcgtgtagcaagcccaggagtctcagttggccttgtctggacttcggttggtggggaagttcagtttgtggaggctacagccatggtgggtaagggtgacttgcatttgactgggcagcttggtgatgttattaaggagtcagcgcagctagctttgacatgggtgagagcaagagctgctgacctcaatttgtcacctacttctgatatcaacttattggagagccgtgatatccacatacattttcctgctggtgctgtgccaaaggatggcccttctgcaggtgtgacattggtaacggcactggtgtcgctttttagtaacagaaaagtcagagcagatactgctatgactggcgagatgactctaaggggccttgtattgccagttggtggtgttaaggacaaggtacttgcggcacatcgttatggaatcaagagagtaattttacctgaaaggaacttgaaggacttatcagaggttccattaccaattctctccgacatggagattctgcttgtgaagcgcatcgaggaagtactcgaccatgctttcgaaggccgatgcccacttagatcacgctccaagttgtagcacccaagtcgcgtttggtatggatgtttgcttgagaggatcatcgtcacagtaccacgaatggtcaacagtgtgagagtaagagcctagctctcttgccagcacaggtcttggcacgcccttttcggtttggcttcgcgtctggaatgtgtatacaggattactggtcagaattctgagaataacgagaagattctctgctgggatagtgggattccctgcatatttatgtgaaaccagctgtcggtatttatgcacagatgcaacagcaacacaaatctggtaggaacactggtgggtttctgtcgataatttgagtgtatatgtaatattatgtaatctattccagggaaacatagttaaaccgaggttgtgaaagccaaagagattgagaaatatcatacgtactttagggttgggtgacttgttacaaaatgtgcatattcacatttcttcaataaacaaccgaaaatgcaaacatttgctcgttaatt

SEQ ID NO: 144203 - DNA, 1800 bp, Zea Mays
tttttttaaaaaaaaatattgttctttggcgtacgctggtgcgcctctcctccccgcctcggcatcgacgcgatttgcgtgcccgacatgtcggactcgccggtggagctgccgagccggctcgccgtactgcccttccgcaacaaggtgctgctccccggtgccatcgtgcggattcgctgcaccaaccccagtagtgtgaagctggtggagcaagaactctggcagaaggaagagaaaggcctgatcggggtacttcctgtgcgggactcggaggcaacagctgttggctctttgctgtctcctggtgtgggcagtgattcaggtgaaggaggcagtaaggttggcggttctgcagtagagtcatcaaagcaggacacaaaaaatgggaaggagcccattcactggcacagcaagggagttgctgccagagctttacacctttccagaggggtggagaagccaagtggaagggttacatacattgttgttcttgaaggtctttgtaggttcagcgttcaggaactaagtgcaagaggaccataccatgtcgcccgtgtttcacgccttgacatgacaaagactgaattggagcaggcagagcaagacccagatcttatcgctctttctaggcagtttaaagctactgccatggaactaatttctgttctagaacagaagcagaagacggttggtagaacaaaggtgcttcttgatacagttcctgtttacaggctagctgatatttttgttgctagctttgagataagttttgaggagcagctttcgatgctggattcagttcacttgaaagttagactctcaaaggcaactgaacttgtagacagacacctgcagtccattcttgtagctgagaaaataacacaaaaggttgaggggcagctatcaaagtcgcaaaaagaatttctactgcgccagcagatgagggccataaaagaagaacttggtgataacgatgatgacgaagatgatgttgctgctctggaaagaaagatgcagaatgcaggaatgcctgctaatatttggaagcatgctcaaagggaaatgaggcgcctacgaaagatgcaacctcagcaacctggttatagtagctctcgagcctacttggaacttcttgctgaccttccttggcaaaaggtcagtgaagaaagggagcttgaccttagagttgcgaaagagagccttgaccaggatcattatggactaacaaaagttaagcaaaggattattgagtatttggctgttcgtaagcttaaacctgatgccaggggtccagtgctgtgttttgttggaccacctggtgttgggaagacatctttggcctcctccatagcaaaggccctgaacagaaaattcataagaatctctcttggtggtgtaaaggatgaagctgatattaggggccaccgaaggacatacattggaagcatgccagggagacttattgatggactaaagagggtatctgtgagcaatccagtgatgcttctagatgaaattgacaagactggttctgatgtacgtggtgatcctgcatcagcactactagaagttcttgaccctgagcagaacaaagcattcaacgatcagtatcctttcatttatcattaaagggagctatgatttatttgttgttttttaaatgaacaagggacagttttacctcattggcaatgcttcttacaattaggcatgtgtgagttgtatgaggtcatcattactttgtcacgtagtgtgtgggttgctgatttagttgaataattgcagttggcagagact

SEQ ID NO: 144204 - DNA, 417 bp, Zea Mays
atggcaatgacgatgatgacggcgggctccggcaacgcgcgcaagttggccgcgagcgcgcgcaagttggccgcgagctcggtgccgacctcgtccacgcggacgaacaccttgtcctccgtccacaacacaacatgtaatcgatgcaccatggcagcagcggcgactgtatatatcgacgaagaagaggaacacgtctgtgacgacgccgacgatgacagcgggcttcagcaacatgcgcaggtcgcccgcgagctaggcagcgaccatgcccacgcgggcggacacctcgtcctccatccacaacacgtaatcgattacgccgacctcaacgttccgttcaccattgtagcggcgaacggcgtggaggaggggagaaagagtagggttgcgagtctgcgggcgctgagagcatga

SEQ ID NO: 144205 - DNA, 1095 bp, Zea Mays
gtacctgctcgatctacgcgtagctgacgaacgacgagcctgggcttccattgtcaatggtgcattcactttctttctatgcgagcatgcacggcactgtcatgtgactgaactgaactattgcactacgtgccatgctaacgcagggcttgaagatagcatcaagcagtcaatgtgacgcagggtcgcgctacggttttgacagctctgtggcatgatgtattttcaggtcgtcgggacgcaagggtacgccgcaccggagtacatggacacggggcacctgacgacgaagagcgacgtgtggagcttcggtgtggtgctttacgagatcctgacggggcggcggtcgctggaccggaacaggccggcggcggagcagaagctgctggagtgggtggcccagttcccgccggacagccgcaactttcggatgatcatggaccccaggctccgcggcgagtactcggtgaaggccgcccgggagatcgccaagctggccgacagctgcctgctcaagaacgccaaggagcgccccaccatgagcgaggtggtcgaggtcctcggccgggccgtgcaggcgcacgccgagcctgacagcggggctcccggccccggcgccaaggggaagaagaccgacgctgccacaccgtcccggcggcggcgtgactgactgctacatgtcgtcatcggtaaaggcgcttaccgagtccattggttagtctagtcgtgagctgtgacagcacaaaaggagtgagtgttgtgcttggggccctacatataattttttttggacatacagcattacttagacgtacgtagagacgagctggcggattgaactttgtgtagctttcgaaagtgagcattttgaaaagaaaaaaaagagtagaggtctcaagggtttcgaaagggggcatttcaaaagattttgcgctggctctacaaaaggatctgttttagcatagccgagtgaaatcagagtgtcagacgcgagcgcacagatttttcaggaagcagctggcaagagcttcgtcaagcatgtattaacagaaaacataatttataaaaaaaaaatagcgcacaaatttgattgta

SEQ ID NO: 144206 - DNA, 1993 bp, Zea Mays
gtacgagccgcgggccgtgtccacctttctgttcagccttgctgtcttgtcgcgcgctctcttcctctcccgcggccccgccccacagctctgctcccccgtccttccgacgttcacactgccttctcttctcagcccccacgtcgcgtcttacaagaggcatcgcagcctccgattccccgagaggcggcacgtcggcacggcacgctcttctcctagcgcgggtggtgtgggtaaccgcggcgcgagaagctgctcgatcttgcagctcgtgccgggcgccgggggtgtgcggtgcgggtgctgcggacatgagctgcctgtgctggttcaagcggaggtccaggaaagggcgatcgtcgtcgtcggggaagcgaggggcgtcgtcgacggcgacggtgtcggtgtcgggccccgcgaccgcgaccgcgaccacgaccacgacggcgtcggcggagagcacgagccggtcggacgactcgggcgcggtgcggccggtgagcaagtcggcgggctcgtcgcagtcgcagcggagcatctcgtcgctctacgaggagcggggccacggccagctgcgcgtgttcgactacgacgagctccagggcgccacggccgagttcggccgcgcgcagaagctcggcgagggcggcttcggcagcgtctacaagggcttcatccgcgccgccgacggcaagggggaccgcgtccccgtcgccgtcaagaagctcaaccagcgtggcatgcagggacataagcaatggctggcagaagtacagttccttggtgttctggagcacccaaatcttgtaaagctacttggatattgtgctgttgatagcgaaagaggggcacagagattgttggtctacgagtttatgcccaataagagcttggaagaccacttgttcaggcgagctaatcctcctctaccgtggaacagaaggcttcaggttatcttgggagctgcagaaggattggcgtacctgcatgaaggggaagttcaggtgatctaccgggacttcaaaacgtccaacattttactggacaaggacttcagagcaaagctatcagacttcggcctagccagggaggggccaactggagcaaacactcacgtctcgactgcggtcgtcgggacgcaagggtacgccgcaccggagtacatggacacggggcacctgacgacgaagagcgacgtgtggagcttcggtgtggtgctttacgagatcctgacggggcggcggtcgctggaccggaacaggccggcggcggagcagaagctgctggagtgggtggcccagttcccgccggacagccgcaactttcggatgatcatggaccccaggctccgcggcgagtactcggtgaaggccgcccgggagatcgccaagctggccgacagctgcctgctcaagaacgccaaggagcgccccaccatgagcgaggtggtcgaggtcctcggccgggccgtgcaggcgcacgccgagcctgacagcggggctcccggccccggcgccaaggggaagaagaccgacgctgccacaccgtcccggcggcggcgtgactgactgctacatgtcgtcatcggtaaaggcgcttaccgagtccattggttagtctagtcgtgagctgtgacagcacaaaaggagtgagtgttgtgcttggggccctacatataattttttttggacatacagcattacttagacgtacgtagagacgagctggcggattgaactttgtgtagctttcgaaagtgagcattttgaaaagaaaaaaaagagtagaggtctcaagggtttcgaaagggggcatttcaaaagattttgcgctggctctacaaaaggatctgttttagcatagccgagtgaaatcagagtgtcagacgcgagcgcacagatttttcaggaagcagctggcaagagcttcgtcaagcatgtattaacagaaaacataatttataaaaaaaaaatagcgcacaaatttgattgta

SEQ ID NO: 144207 - DNA, 2365 bp, Zea Mays
ctcactcctccggtgaccgtgcacccaacaattccttattactacggagctgtgcgcacccaccccgactgcgccacacccacacccacaccgcaccaaccaaccccggccggccagccagcccacgagccccatcccgccatccgcccgcgcggcgagcgcagagccgagccgagctgccggaacgcaggcagcggccaccgggaggcctccgaaacgcagcggaacacctgaggaggcggcttcccggcgaatgctctaggaggaggcgcggcgccggcggagatggggtccaagtacacgcgcgggtgctgcggctggctgatcgtggcgctgattgcggcgctggtggccacggccgcgatgttcgccatcatgaagcgcaagcccgggggccgccacatcaagccgctgccggtgccggggccgccgggggccatcgactccaagtacggcgacgcgctcggggtcgcgctccagttcttccaggtccagaaggcggggaagctggagaacaaccagatcccgtggcgtggggactcggcgttgaccgacgggaaggaagcggggctggatctttccaagggaatgtatgatgctggggatcacatgaagttcaccttcccgatggcattcacggcgacggtgctctcgtggtcggtgctggagtacggggatcagatgagcgcggcaaagcaactggaccctgccctcgatgcactgaagtggattacagatttccttattgctgcacatccttctgacaatgtgctgtatatccaggtcggtgatcctgatctggaccacaattgttgggaaaggccagaaacaatgaccgagaaaagacctctcacacagatcaacaagaagactcccggatcagatgttgctgctgaggcagcagcagccatggcagctgcttcaatggtcttcaaatccagagataccacgtattctgatgtgcttcttcagcatgctcagaaactattcacttttgctgacacttatagaggcctctcaagcgagagctatcccaagctccaggatttctataactccaccagttacgttgatgagcttctatgggcagcgagttggctctaccacgccacaggcgaccagacgtatctcagctatgtaactgtacagaacgggaaaagttatgctgattggggaaggccaacatggttcagttgggatgacaaaaatccaggcacacaggtgcttttgtccagactaaatttcttcgggtccaaacagatatctaatgccgaaaatgaggggttgaaaatgtatagagatactgcagaagctgtcatttgtggtctgattccagattcgcctcaagccactgccagcagaactggaggaggcttggtgtggataagcgggtggaattctctccagcatgccaccaacgctgcgttcctatctgttgtgtacagcgactacatgctctcgacgcggacagcggcagtgcagtgcagcgggaagtactacagccctaccgatatacgcaactttgctgcatcacaggctaactatatcctgggagacaacccgatgaagcttagctaccttgtgggatatgggagcagctacccaaagcaagtacaccacagaggggcgtcgatccccgcggatgcgaaaacaggctgcaaagggttcgagtatctccactcacccagcccgaacccaaacgtggctacgggcgccctggtgggtgggccgttccagaacgacaccttcgtggactcccgtgacaacgccgtgcagacggagtccagcacctacaacagtggcaccctggtcggtctcctctccggcctcgtcaccacttcctccgtggtacagtcgttcacctagagggctcctcctatgttctggcctggagcgatgcgtgtacgagtacgattgcagtttttttgcttggcgtggctgatggtgatgcgcgatctgtgactgtgagagagaaagcttggttgccaaccgttcagttcagacggatggcatatgcaggatgcagcagtagtttagtagtgcccacgcgtttcttctgttgtgtgtgtacaatgacggtgctgctcctgcagtgcagctatagtttttcaccgcgtgctcctatctggtttgctggtgtgcctgtaaggctgtagctacgagtaatgtattagactatttgtaggtcgtatttcatttgttcattctgtggtgaggtagttcagcagagctttgtactgtaccgatgaattgcaccgtctcccaactgaaatgtgccttgtggattcacagctggaggtgaatggcacgcattcgtgcggctcttcgctccatgtttttttttaaaaaaaactgggataaaata

SEQ ID NO: 144208 - DNA, 1794 bp, Zea Mays
tattattaacttcatcgctcgctgttccatagttagctaatcatttttaccaatttagaaaaccagatatctgaatttttggaaaactagatatctgaggacaaaaagtgaaaaaaacaaataactaaaaccacgaggtggtaactgaaaacaccgcccgtcttcttctcccaccgggccaccgcccccgccccccagcaggccagcacccctattctattcctcgagactgccccctcccctccacgaattctccttccaaatgcatatacaccgccacgatttcgtaccaccacgaccacccatctcaccgatctcctgctcatggacgccgacgatccctccgccgccaccgcttcctcctccgacgaaaccttcttcgatgcccttgactcgctcccctccccgtcgccttcgccttccccttccccttcgccttccccttccccttcccatatctcctcctctacgctccatcgccgcccgcgccgcgcaaaaagtgtaaagcagcccgactctattctctcatcacccccctcggcctccgcggccacctccaccgtcaccgccgtcgaggacgagcatctcaagcccgattcctccgaggccaccagcgccacttcccgtactgaccccgcacccaaggaggaggaggagcaggaggaggaggaggaggaggacattaaggctacggacgtggatgcggttgttgaggtggaggcgcctgctcctacggcgacgccgtcgccggccccgagcatactcgagtacctcgccgtgctcgtcgttaaggcagtggtcttccaggtcagcgcgctcgtcagctgcctcgcgttcccggttcggctgctgcaatggtggttcctcttcgtgaccgacccgctcggtctggcccggcgcgcgagggcgtgggtgctcggtatggctggggacgccgcgggcactctgatcgcacgtcttggaggaggggatggtatggggaaggtggcgcggaggattgtgtgggggtcgctctgggctgcatatgtctgcgcggttctgtgtgcgctgctgattatggcattcctgggaggggggctcttggtgggaagaattgttgaagaacctgttcaagtgacagagaccctgaattttgattacaccaaacctagcccaatggcgtttgtgccggtgccgaggttggtgccccccaatcagcggatgcagcttgaggttttgctgacactaccggagtctgattacaaccggaggcttggtgttttccaggtaagggcagagtttctctccgccgatggcaaagtgatctcaacttcaagtcaaccatgcatgctcaagttcaaaagcgtacacatgcacttcatcgagacttttctccagagcgtctctcttctgtccggctactcatcggaatctcaggttattagactgaagatgaggggtatcacccaaggtctggaaccaacaactgcggtgaggataatcctggagcaaagagcagagtttggtcgcggtgcaggcattccagagatatatgttgcatcactaaagctcgagggcgaacttcctctcgtcagaagattgctctggaactggaggtggaccttttttgtctggagcagcacggggttgtttgctattgaattgctgtttgggcttgtgtgctgtagatcctgtatatttcccaggagtggacacaatgttgctgctccttaagaccttgggctaacctcatgtaacgtattgtacaatttccgaaataaatgaaaaggcggcatttgatgtggtacaatacaa

SEQ ID NO: 144209 - DNA, 1381 bp, Zea Mays
ccccgtgtccggtggttgcggctgcccgcatcatattcccaccttgcgaacgaggacgaactgctaccccctcgcctcgccctcgccgcctgctcctctccagttctcccccaccaaccgcagcagcgagagcgagactgagaatggccgcggcgccgtcgtccctcgtgtcctcccatctctcccgcctcgccgacctccgccgcgcggcggcgccggccactcccaccgtcccacagcagcttcgcgtcggcttctcgcgccgccgcgcccagcgcgtcgtcgccatggctggatccggcaagttcttcgtcggaggcaactggaagtgcaacggaacaaaggactccgttagcaagcttgtctctgaactgaatgctgctaccctcgaaactgatgtagatgttgtggtggctcctccattcatctatatcgatcaggtcaagaattcactaacgggtcgcattgaggtttctgctcagaatgtgtggattggaaaaggaggagcctacaccggagagatcagtgcagaacaactggtggacatcggttgtcaatgggttattcttggacactcagagcgtagacatattattggtgaaaatgacgagtttattgggaagaaggctgcatatgcattgagccaaaatgttaaggttattgcctgcataggagagcttctggaagagagggaagcagggaaaacttttgaagtatgttttgagcagatgaaggcttttgcagatagtatttcaaactgggccgatgttgtgattgcatatgagcctgtttgggctattggaaccggaaaagttgctactcctgagcaagcccaggaagttcatgctgctgtacgcgattggttgacgaccaacatatcacctgatgttgcctctagcacccgaataatctatggaggttctgtgaatgcagccaactgtgcagagctagcaaagaaagaggatatcgatggttttcttgttggtggtgcctccttgaaggccccggacttcgccaccattatcaactcagtgaccgccaagaaagttgcagcctgatggaccaccctgtgaagaaataagaggccatcaccgtgtcgcctcatctgccacgccttaaagcctgtaggaggcgtcacctcctgtttttgctgatttgcagcacggggacagaaaataatgttttgctctcgtggatctgcacgtgacgaggagagttcagttgtcgtgagcgatgtacgttgggaatattgttatgtggtccttttctaaagaaaaaaaaatgttgacagtcaaggagaaatgtaagcgtgtttttttttaacagagaagctacatcttactgtgactgtgagtgttccatcactcgattctttcctttt

SEQ ID NO: 144210 - DNA, 715 bp, Zea Mays
ccccgtgtccggtggttgcggctgcccgcatcatattcccaccttgcgaacgaggacgaactgctaccccctcgcctcgccctcgccgcctgctcctctccagttctcccccaccaaccgcagcagcgagagcgagactgagaatggccgcggcgccgtcgtccctcgtgtcctcccatctctcccgcctcgccgacctccgccgcgcggcggcgccggccactcccaccgtcccacagcagcttcgcgtcggcttctcgcgccgccgcgcccagcgcgtcgtcgccatggctggatccggcaagttcttcgtcggaggcaactggaagtgcgtaagtgcatgttctgcttcttcagctttacgcggcttggagatgctgtgtaccgatgatcctggagatgctgtgtaactgtatcattttttggctgttgccgcattgggcattccaacgggacagggacgagatttttttgtcgtcatgcataccacggctccatcgaccatcgccacagtgttgcgccggcctcccctccttggttcctgccgtagtgcagcgctggccgccggcaccatacatatatcgtgatttactccgtacatggccacttctagaaatacaatcgcttctctgctgcccagcccagcttggtctgccagccagagccgttttgttcggtatataaaaagtgtgtctgtgtgtttttttggaaaggc

SEQ ID NO: 144211 - DNA, 744 bp, Zea Mays
tttttcttatgttactgaggctcctttgctgtttggtatcctgttcgttgattggtgcacagagagggggttctcgtgaaatgcgaagcatacggtgaagtccaagtaaactgcagcctcccgggtgtgccagagctgacaatgtcctttgctaaccctgcaattatcaatgatgttaccttccacccctgtgtccgattcaggccttgggaatcaaatcagatcctatcatttgttcctcccaacgggcagtttaagctcacgagttacagggttcagaaactgaagaaaacaccgatctatgtgaaaccacaattaacatcagattctaggaactgtcatgttagtgtgatggtcgggattcgaaatgatcctgggaaacctattgattcgataacaaggcagttccagttgccccctcttattgtttctgctgatctgactgcaaactatggcacggttgacatccttgccgacaaggttagtttacttcctaccataagttccacagtaactccactcatacctgatcttgtcaccggtcaaggtaaggggtctatagtaggtagtttcagaaaattctctgagaagctgagcactctacatgtacctggatacgctggtcgacttcgtggccgccaggccgggcatgcacctggtgagcgacgaggtgtacgcgagcacggcgttggcggatccgggcttcgtgagcgtgctagaggtggcggccgcggccgcgcgtga

SEQ ID NO: 144212 - DNA, 1521 bp, Zea Mays
gcaccaaagccctagctcggctcacttgctttcctggccgccgtctcctccgcggctcttaacgccgcatccactcgccggttcttaacgccgcccgccgcctcctccgcggctctgccctcccgccgctgccgccgcctacccaggaatcaggatgcgggtgaagaagcggtcgaagcaccgcaaagcggtcaagttctacgccacatgcttcggcttccgcgagccctataaagtcctcatcgacggcaccttcgtccaccacctcctcacccagcgcctcctcccggccgacgaggctctccgagacctcctctcggcctccaggacgccagccctcttcacctccaagtgcatcctcgcagagctcagacgtctcggcaagtcacatgccgaatcatttgacgccgcgcagcttctcaccacaaccaagtgtgagcatgacaaggtggtcggtgcagttaactgtgtccagtcactgataggtgataaaaatcctgaacatttcttcgttgccacccaggatcctggtctccgagaaaacttacgagagattcctggggttcctgtgatatatggtctgaagaactctttatgcatagaacggccctctatgcagcaacgcaagtttgctcaattggatgaggagaagcgtctcaatatggatatctctgaatacaagaagttactgaaggctgcatcagaaggaaagacaattgccagtgaaaatggaagtggcgaagaacaacatgagatgcctattagttctcttgtaaaaaatgcacttcatgttactgataaaaccaagtttaagaggaacaaagcaaaggttatatttatagccattggtatctcttgttatgcgattgactatacaatgtttattatctagtaagcataagttcactacacttatctatttcctgtattatttaacgtttacaagtatcattatgcagggtccaaacccactctcctgtaagaagaagaaaccaaagctccccacggctattcaaaagcaggcaggtacggctgatggcgaggcaaagaggaagagggttcggaagcggaagagaggccaaaaagataacaagcaattggaggctgcgaactagaaggatgggcttgcgtaggaagtttcagtgctcttgctagacatccatcctgactccggagcaagtcaactatggaggagttcctttctcccacacaggattcagtatgccatgccataccatgctcattatatgttgaagatgcttcttgcaacgtaacacttgattggttatggtgatcgtgaatccttctctagaggatgttattggatgtttcttttgtcgcaagatgcaactttaaatgttttttgaagcaaaagtttgatgccagtagctctaccaggttcttgcttgccctgctacatgtgtgatcccattcttcaattgtaagatgtgtttgttgagaatatgtataatagataatacttctattattttagattttagacagtagtaaccttagttt

SEQ ID NO: 144213 - DNA, 1391 bp, Zea Mays
gcaccaaagccctagctcggctcacttgctttcctggccgccgtctcctccgcggctcttaacgccgcatccactcgccggttcttaacgccgcccgccgcctcctccgcggctctgccctcccgccgctgccgccgcctacccaggaatcaggatgcgggtgaagaagcggtcgaagcaccgcaaagcggtcaagttctacgccacatgcttcggcttccgcgagccctataaagtcctcatcgacggcaccttcgtccaccacctcctcacccagcgcctcctcccggccgacgaggctctccgagacctcctctcggcctccaggacgccagccctcttcacctccaagtgcatcctcgcagagctcagacgtctcggcaagtcacatgccgaatcatttgacgccgcgcagcttctcaccacaaccaagtgtgagcatgacaaggtggtcggtgcagttaactgtgtccagtcactgataggtgataaaaatcctgaacatttcttcgttgccacccaggatcctggtctccgagaaaacttacgagagattcctggggttcctgtgatatatggtctgaagaactctttatgcatagaacggccctctatgcagcaacgcaagtttgctcaattggatgaggagaagcgtctcaatatggatatctctgaatacaagaagttactgaaggctgcatcagaaggaaagacaattgccagtgaaaatggaagtggcgaagaacaacatgagatgcctattagttctcttgtaaaaaatgcacttcatgttactgataaaaccaagtttaagaggaacaaagcaaagggtccaaacccactctcctgtaagaagaagaaaccaaagctccccacggctattcaaaagcaggcaggtacggctgatggcgaggcaaagaggaagagggttcggaagcggaagagaggccaaaaagataacaagcaattggaggctgcgaactagaaggatgggcttgcgtaggaagtttcagtgctcttgctagacatccatcctgactccggagcaagtcaactatggaggagttcctttctcccacacaggattcagtatgccatgccataccatgctcattatatgttgaagatgcttcttgcaacgtaacacttgattggttatggtgatcgtgaatccttctctagaggatgttattggatgtttcttttgtcgcaagatgcaactttaaatgttttttgaagcaaaagtttgatgccagtagctctaccaggttcttgcttgccctgctacatgtgtgatcccattcttcaattgtaagatgtgtttgttgagaatatgtataatagataatacttctattattttagattttagacagtagtaaccttagttt

SEQ ID NO: 144214 - DNA, 1381 bp, Zea Mays
gatgcaccaaagccctagctcggctcacttgctttcctggccgccgtctcctccgcggctcttaacgccgcatccactcgccggttcttaacgccgcccgccgcctcctccgcggctctgccctcccgccgctgccgccgcctacccaggaatcaggatgcgggtgaagaagcggtcgaagcaccgcaaagcggtcaagttctacgccacatgcttcggcttccgcgagccctataaagtcctcatcgacggcaccttcgtccaccacctcctcacccagcgcctcctcccggccgacgaggctctccgagacctcctctcggcctccaggacgccagccctcttcacctccaagtgcatcctcgcagagctcagacgtctcggcaagtcacatgccgaatcatttgacgccgcgcagcttctcaccacaaccaagtgtgagcatgacaaggtggtcggtgcagttaactgtgtccagtcactgataggtgataaaaatcctgaacatttcttcgttgccacccaggatcctggtctccgagaaaacttacgagagattcctggggttcctgtgatatatggtctgaagaactctttatgcatagaacggccctctatgcagcaacgcaagtttgctcaattggatgaggagaagcgtctcaatatggatatctctgaatacaagaagttactgaaggctgcatcagaaggaaagacaattgccagtgaaaatggaagtggcgaagaacaacatgagatgcctattagttctcttgtaaaaaatgcacttcatgttactgataaaaccaagtttaagaggaacaaagcaaagggtccaaacccactctcctgtaagaagaagaaaccaaagctccccacggctattcaaaagcaggtacggctgatggcgaggcaaagaggaagagggttcggaagcggaagagaggccaaaaagataacaagcaattggaggctgcgaactagaaggatgggcttgcgtaggaagtttcagtgctcttgctagacatccatcctgactccggagcaagtcaactatggaggagttcctttctcccacacaggattcagtatgccatgccataccatgctcattatatgttgaagatgcttcttgcaacgtaacacttgattggttatggtgatcgtgaatccttctctagaggatgttattggatgtttcttttgtcgcaagatgcaactttaaatgttttttgaagcaaaagtttgatgccagtagctctaccaggttcttgcttgccctgctacatgtgtgatcccattcttcaattgtaagatgtgtttgttgagaatatgtataatagataatacttctattattttagattttagacagtagtaa

SEQ ID NO: 144215 - DNA, 1381 bp, Zea Mays
gcaccaaagccctagctcggctcacttgctttcctggccgccgtctcctccgcggctcttaacgccgcatccactcgccggttcttaacgccgcccgccgcctcctccgcggctctgccctcccgccgctgccgccgcctacccaggaatcaggatgcgggtgaagaagcggtcgaagcaccgcaaagcggtcaagttctacgccacatgcttcggcttccgcgagccctataaagtcctcatcgacggcaccttcgtccaccacctcctcacccagcgcctcctcccggccgacgaggctctccgagacctcctctcggcctccaggacgccagccctcttcacctccaagtgcatcctcgcagagctcagacgtctcggcaagtcacatgccgaatcatttgacgccgcgcagcttctcaccacaaccaagtgtgagcatgacaaggtggtcggtgcagttaactgtgtccagtcactgataggtgataaaaatcctgaacatttcttcgttgccacccaggatcctggtctccgagaaaacttacgagagattcctggggttcctgtgatatatggtctgaagaactctttatgcatagaacggccctctatgcagcaacgcaagtttgctcaattggatgaggagaagcgtctcaatatggatatctctgaatacaagaagttactgaaggctgcatcagaaggaaagacaattgccagtgaaaatggaagtggcgaagaacaacatgagatgcctattagttctcttgtaaaaaatgcacttcatgttactgataaaaccaagtttaagaggaacaaagcaaagggtccaaacccactctcctgtaagaagaagaaaccaaagctccccacggctattcaaaagcaggtgttctgcaggcaggtacggctgatggcgaggcaaagaggaagagggttcggaagcggaagagaggccaaaaagataacaagcaattggaggctgcgaactagaaggatgggcttgcgtaggaagtttcagtgctcttgctagacatccatcctgactccggagcaagtcaactatggaggagttcctttctcccacacaggattcagtatgccatgccataccatgctcattatatgttgaagatgcttcttgcaacgtaacacttgattggttatggtgatcgtgaatccttctctagaggatgttattggatgtttcttttgtcgcaagatgcaactttaaatgttttttgaagcaaaagtttgatgccagtagctctaccaggttcttgcttgccctgctacatgtgtgatcccattcttcaattgtaagatgtgtttgttgagaatatgtataatagataatacttctattattttagatttt

SEQ ID NO: 144216 - DNA, 2652 bp, Zea Mays
cgggagccaccaccggttcgtgtcgggaccggaaaccacgatcagccttgcacagttcccggcttccagccgccgccgccgcggggagcaccggccgttggttcttcgtctccgccccgcttgcgagaagagcgacgcgtttccccttcgaaccctcgtgtatcgtgggtcatggtgacgcctcgtggtagcggcgggagatggtgaagatagtgacgtacaacgtgaatgggctgcggccgcgggtggcgcagcacggctcgctccgctgcctcctcgacgccctcgatgccgacatcatctgcttccaggagaccaaattgtcaaggcaggacctatctgcggatgtaattatggctgatggatatgaggcttttgtttcatgcaaccgctcttcaaaaggccgtggagcatactctggtgttgcaacattttgccgagtaacatcatcattttccagccaggaggttgctttgccagtagcagctgaagaaggctttactggacttcaggactatgcaaaaaatagtcaaactgttggggatttcagtattgcaatgcctgttgaggaggagggtcttggtgaactcacaagagaggacctcttaagggtggacaatgaggggcggtgcatcatcactgatcatggacattttgttcttttcaacatatacggcccagctgttgacggagatgataaagagcgtgttcgttttaagctactattttacaagatactgcagaaaagatgggaacgtctattggctcttggaaagagagtttttgttgttggtgatttgaatattgctcctgcttctatagacaggtgtgacgcggcacctggcttcgagaagcaaatgttccgggaatggctgagatccatgctgagagaacatggaggtcccttttttgatgcttttagatcaaaacaccctgaaaggacaggagcatatacttgttttaatcaaaaaattggtgcagaagagtataattatggttctagaatagaccacattctcatttccggttcctgtctccatcgctgtgattctgtggaggaccatagcattttttgttgccatgtagaagaatgtgagataatgaatcatttcaaaagagggaattctgaaaatttatcaaagtggaaagggggaagaagcagtaagctagaaggatctgatcatattccagtttatattttactgaaagaaatacctgaacttccggtccataatatcccaccatcagctgcaagatatcttccagagatccgtggaaggcaacaaagtatagtatcgttccttgataaagggaaaatttatgagctgcaaaatgctgcaaatttgattcaatctgaagatacagtacttgatagttactgtagtgatggcttggaaaatacaattctagctaagaaaggactggcaactggtataactgagtttgcaaaaggtggtaaccttcctagtttgatgtgcaaggggacagatctgaatcaatggataaatgaaggtttaatgggcatctctcatgtcagccagaaaaaatcactgtctagtaccaagtttgtgccacaaaagaaaattaaacgcaacttatcatcccaaccaacaatcaagtcattttttcaaagaccagggtcaaagacagtaaatgctagtaccagtaccttagttactccagcagaaacattagaccttacaaatcaagcatgtgtttcaaatggtgatacactgcctgaaaacatgcagtgcacaacttcagctgcaaaagttcaggataacacagatgcatcgtcatgttcactttcaacagacaagtctaatgctgcagcattggagtggcagaggatacagaaaaagatgaagatgacactaccacgttgcaaagggcatagtgaaccatgcattccgaggtctgtgaagaagggccctaatataggccgtttgttctatgtctgtgctcgtgctcagggacctgcatcaaatccagaagccaattgtggccactttcagtgggcacctggaaagtctaaagagaagagctctaaagagaaacgtctgtgacttcatttttctcccaggacattttgcttccaatgagtctggtacatcaccttgtcccagcatactgatgacgtggcgatgtatttgtggagaggtaagctgatcaagggcctgtttgggaggtctggctctgactggctccttgctctagtaaccggaggggccacaaaacgtgtcttcaccagctccccattgttttgaaaaggacagaaaacaacttcatgaacattgcagccacagtgccatggataagctacagtagcgcatcagctggaacagccaagagctgtcccaaacgtggcctgaacaagcacttctctcaggcaggtacatattctaatcctgtaattagttggttgacactaacatgcagccttccgttggttggctaacaactaagggcttgttcggttagctctcaatccatacgtacggattgagtaggattgggtgcgtttaaattccaagcaagtcaaacttctttttaattttttctaatctctcagggatcttctcagaagttatttatttttccgcctggtttagcgtattcaaattcttaatagacaagtcacaagtggccatc

SEQ ID NO: 144217 - DNA, 570 bp, Zea Mays
atgtggggcatgggcaatagatgggatgttgtgtggggagggggtggtggtataggcagccggttcgggacttcgagccgcagcaaggaggcagtgcagacgagagtcagtttaccggtggaaagagaaagggggaggagagggagagagagggatgtggcgacctccagtcgagggggtgtggggccgagggccgaggctagggagcacaggctaggtaggcagacactagaggcggtggctgctatggcgggcacggaggtacctgcgcgggcgtgggggcgagatacgtgggcgggggcagggacacgatggaggctgggcgagatctgcgggcgtggccggcagggacacgatgcctgcgcgggcgtggaggagagatacgtgggtggggggaggggcacgacgggggctgggaggatgcttccttgcatgggcgtgggagggggcgggggcacccagggtgcggccagcgggggcaggcatggcgaacgatctgggcgaagggaggcagcgggggcagacatgggtgagggcgaggtgtggacgctttccttatcttcttcatag

SEQ ID NO: 144218 - DNA, 1482 bp, Zea Mays
cagacacgaaggaagctgcaacatttacatcgtcatcgtttattaataataacgtgctccttttttcccttgtatatcttggttttcagtcaacacgagttctccatcgaacaagttcgatcccgctgctcatctatcgcgcgcgtcgtcaatcgtctcgtcatcaccatggttggaagcagccccctgcaggccgtgctggtggcccccggcgtcaaggacaggaaggtgctcgcgttcaagcgcgacgcgctcaaggacaaggacgccgtctccggcctcatccactccatcctcgcgtccagcccggcgcagcgcagcgccttctacgtcttcgacctggccaaggtcgtcgacctcttcagggcgtggcgccgggcgctgccggacgcgcggccctgctacgccgtcaagtgcaacccggacccggcgctgctcggcgcgctcgccgcgctcggcgcgggcttcgactgcgccagccgcgccgagatcgaggccgtgctcgcgctcggcgtccggcccggggacatcgtctacgccaacccctgcaagcccgaggcgcacctcgagtacgccgcggaggtcggcgtcaacctcaccacctacgactccgaggaggaggtggccaaggtcaggcgctgccaccccggctgcgagctcctgctccgcctcaagggccccgacggcggcgacgtccgggtcgacctggggaccaagtacggcgcgcaccccgacgaggtcgtgccgctcctgcgcgccgcccagcgcgcgggggtcggcgtggccggcgtctccttccacgtcggcagcggcgcgtccaacctccacgtctaccgcggggccatccaggccgcgcgcgccgcgttcgacgcggccgctgccctggggatgccgcccatgcgcgtcctcgacatcggcggcggcttcgtgtccggccccactttcgacgacgccgcggccgtcatcaacgacgccctcgcgcaccacttcggcgacctgccgtgcgtcgaggtgatcgccgagcccggccgctacttcgccgagaccgcgttcacgctcgccgcgcgcgtcatcgggaagcgcacgcgcggagaggtgcgcgagtactggatcgacgacggcctctacggctcgctcaactgcatcatcatggaccactacgtgcccaccccgaggccgctcgccagcccgcgccccggcgataaaacctacacttccacggtcttcggcccaacgtgcgactccctcgacacggtgctcaccgggtaccttctgccagagatgagcgtcggcgactggctcgtcttcgacgacatgggcgcctacactaccggagccggctccaacttcaacggctacgcgacgtcagatataaagatctatgtagcctactccagctgaatgcgaacgtctccacgacgtcgggcctggactaattgatatgttctttttttatttattctataatcgacccaaccctgt

SEQ ID NO: 144219 - DNA, 1526 bp, Zea Mays
agcaaagcaaggaaaaggaaagcaacaaggaggactcacgcagtacgcgcgagacctcgagctcaagtccttgcttatctttcttgctgcaaatagcttgaagtcgatccgcgaaaggacgaccgcaccagctagcattcgttaccttcatcagcttcgacagcaatggaggttaaggtgctgagctccaagctcgtcaagcccgcttacaatgccggtgcgggcccagcgccggcggtcagtgcggatgagtacacccccctgaccatcttcgacgtggtcacgtacaagatgcagatggccatcatctacgccttcccgccgccggccccatcgacggcggccatcgagaacggcctggccgcggtgctggccgagtaccgcgcattcgcggggcagctgggcgtggccccagacggcacgcccgcggtgctgctcaacgaccgcggcgcgcgcctcgtggaggcggccgtggacgcggacctcgtggacatggcgcccgccaagcccaccccggagctgctccggctgcacccggacctggaggaggaggagctccaggaggtggtgctcctgcagctgacccggttccggtgcggctcactcgccgtcgggttcacgtccaaccacgtcgtggccgacggccacgccaccagcaacttcctcgtggcgtgggggcgcgccaccaggggcctcccgacgggcctgccccccgtgccccgccaggcggggctcttcaagccgcgcccttcgccccgcgtcgacttcgaccaccgcagcagggagtggtacctgccgtcgcccgccgagaccgagaagcagcacggccacggccgcgagggcgcggcggcggcggagagcatcgtgatccagaaggcgcatttcaccaaggacttcatcgcgcggctccgcgccaaggcatcggaaggccgcggccgcccgttcagccggttcgagaccgtcctggcccacctgtggcgcgccatgacgcgcgcccgcgggctgagccccgacgagacctcgcagatccggctgtccgtggacgggcgccaccgcctcggcctccccgccgagtacttcggcaacctggtcctctgggcgttcccgaccgccacggtggcggacctgctggggcggccgctgaagcacgcggcgcaggtgatccacgacgaggtggcgagcgtcgacggcagctacttcaggtcgttcatcgacttcgcgacgtccggcgccgcggagagggaggggctggcgcccagcgccgtctgcaaggacgtcctgtgcccgaacgtggaggtggacagctggctcaccttcccgttctacgagctggacttcggcacgggcagcccgacctacttcatgccgtcctacttccccacggaggggatgctgttcctcgtgccgtcctacatcggcgatggcagcgtcgacgcattcgtgcccgtcttccagcaaaacctcgaggcgttcaaggagtgctgctacgccatggactaggatcgggctgcaggcgtcgtagcgga

SEQ ID NO: 144220 - DNA, 435 bp, Zea Mays
atggccctgcagtacccgctgcttttcccttacggtgatcatggatatcaccttggaataaaatacactgacgtgggagaaggcgatgccacatgccgcaagtatgttacgatgcttgaatttgttagacatcgttcacactataggctcaacgaaccgaacccattcacttgctatggtaggctgagcaaccagctagctgtcgatgcgtattctacgatcgaggcatctcgattgcaattcatagcggaccaccaaaaagaattacgttgtgaatccgtacaggggataaccgacgccattggcaggggtctcaccagtgcagattcagttggtggaagagtgattgtgcctgcatcttttacgggcggccgaaggtaccatgtaatgaactaccaagacgcaatggccatatgcagagtgtacggaccgcca

SEQ ID NO: 144221 - DNA, 1297 bp, Zea Mays
atctccacctatcaccttcgattcctcctaacctcgccggtccacctgcaaccgtgacggttcttgttcttcttcccacccagcgtgcgctccctcttcctcttccccttctctctcggcgacgactgggtggccgtagctgcctccatacgcctggtgccctggtcttcttcgggccattcgccggccgcgagcaccaccaaaagggagagcttcccaggtagagctgtttctccgtactctagcagatggcaaggataaagcctaagcaattgctaatccaaagcaaaacaaagaaggctccatctcgaatcagctactctactatcatcacatggaacttgattgtcatattggttgtgctatctctctatgctacctacagccattggcatcaaaggtctgcccaagacttcgaaatggagcttcatgaagctgagcttgctgtgagaccggaggatccaaaaatgataagtagaccaagatatgcggtaatgaacaccgcaaaaggcccaattactatagaaatatacaaagatgcttctgctgacgttgtggatagatttatcaacttgtgcaagagtaatcatttcaaaggaatgccatttcggcatatcataaaaaattttgtaattcaaggaggtgattttgattttgatggagcttcccaagaatggataacgaaagctaaagctagtggaaaaaatgatctcagtccaaaacatgaggcatttatgattgggactgcaaagaatcctaataccaaaggatttgatttgtttatcacgacggctccaattcctgacttgaatgacaagcttgttgtatttgggcgagttatcaagggagaggacatcgttcaggagattgaagaagtcgacactgatgagcattaccagccaaaggccgccataggcatcatcgatatcgtgctaaaacaggagccttgagcctggatgcacatgatgacgttaaccacatgccgacggacttttctgtagttggaaaatctatctcatcgagttggtttttgttttggtgccttattatgtgttgttgcgtggaaagcagttgtgacgcttgttccaggagtcgttgcagcagcgtttgtgtataaaatatattcacagggtttttggctgtcagcatgcgcgagcatatgctgctacaccttgtatcgtggttgtggtaacagtaagcaggctattctctgctattgctaccagtaatcggtttgggccttacgatttgcgaatgaatccaataaaatcagcgcacgtgcttctggtcgttgttt

SEQ ID NO: 144222 - DNA, 1306 bp, Zea Mays
atctccacctatcaccttcgattcctcctaacctcgccggtccacctgcaaccgtgacggttcttgttcttcttcccacccagcgtgcgctccctcttcctcttccccttctctctcggcgacgactgggtggccgtagctgcctccatacgcctggtgccctggtcttcttcgggccattcgccggccgcgagcaccaccaagtacgcccacctcttgaagggagagcttcccaggtagagctgtttctccgtactctagcagatggcaaggataaagcctaagcaattgctaatccaaagcaaaacaaagaaggctccatctcgaatcagctactctactatcatcacatggaacttgattgtcatattggttgtgctatctctctatgctacctacagccattggcatcaaaggtctgcccaagacttcgaaatggagcttcatgaagctgagcttgctgtgagaccggaggatccaaaaatgataagtagaccaagatatgcggtaatgaacaccgcaaaaggcccaattactatagaaatatacaaagatgcttctgctgacgttgtggatagatttatcaacttgtgcaagagtaatcatttcaaaggaatgccatttcggcatatcataaaaaattttgtaattcaaggaggtgattttgattttgatggagcttcccaagaatggataacgaaagctaaagctagtggaaaaaatgatctcagtccaaaacatgaggcatttatgattgggactgcaaagaatcctaataccaaaggatttgatttgtttatcacgacggctccaattcctgacttgaatgacaagcttgttgtatttgggcgagttatcaagggagaggacatcgttcaggagattgaagaagtcgacactgatgagcattaccagccaaaggccgccataggcatcatcgatatcgtgctaaaacaggagccttgagcctggatgcacatgatgacgttaaccacatgccgacggacttttctgtagttggaaaatctatctcatcgagttggtttttgttttggtgccttattatgtgttgttgcgtggaaagcagttgtgacgcttgttccaggagtcgttgcagcagcgtttgtgtataaaatatattcacagggtttttggctgtcagcatgcgcgagcatatgctgctacaccttgtatcgtggttgtggtaacagtaagcaggctattctctgctattgctaccagtaatcggtttgggccttacgatttgcgaatgaatccaataaaatcagcgcacgtgcttctggtc

SEQ ID NO: 144223 - DNA, 1287 bp, Zea Mays
atctccacctatcaccttcgattcctcctaacctcgccggtccacctgcaaccgtgacggttcttgttcttcttcccacccagcgtgcgctccctcttcctcttccccttctctctcggcgacgactgggtggccgtagctgcctccatacgcctggtgccctggtcttcttcgggccattcgccggccgcgagcaccaccaaggagagcttcccaggtagagctgtttctccgtactctagcagatggcaaggataaagcctaagcaattgctaatccaaagcaaaacaaagaaggctccatctcgaatcagctactctactatcatcacatggaacttgattgtcatattggttgtgctatctctctatgctacctacagccattggcatcaaaggtctgcccaagacttcgaaatggagcttcatgaagctgagcttgctgtgagaccggaggatccaaaaatgataagtagaccaagatatgcggtaatgaacaccgcaaaaggcccaattactatagaaatatacaaagatgcttctgctgacgttgtggatagatttatcaacttgtgcaagagtaatcatttcaaaggaatgccatttcggcatatcataaaaaattttgtaattcaaggaggtgattttgattttgatggagcttcccaagaatggataacgaaagctaaagctagtggaaaaaatgatctcagtccaaaacatgaggcatttatgattgggactgcaaagaatcctaataccaaaggatttgatttgtttatcacgacggctccaattcctgacttgaatgacaagcttgttgtatttgggcgagttatcaagggagaggacatcgttcaggagattgaagaagtcgacactgatgagcattaccagccaaaggccgccataggcatcatcgatatcgtgctaaaacaggagccttgagcctggatgcacatgatgacgttaaccacatgccgacggacttttctgtagttggaaaatctatctcatcgagttggtttttgttttggtgccttattatgtgttgttgcgtggaaagcagttgtgacgcttgttccaggagtcgttgcagcagcgtttgtgtataaaatatattcacagggtttttggctgtcagcatgcgcgagcatatgctgctacaccttgtatcgtggttgtggtaacagtaagcaggctattctctgctattgctaccagtaatcggtttgggccttacgatttgcgaatgaatccaataaaatcagcgcacgtgcttctggtc

SEQ ID NO: 144224 - DNA, 1500 bp, Zea Mays
atctccacctatcaccttcgattcctcctaacctcgccggtccacctgcaaccgtgacggttcttgttcttcttcccacccagcgtgcgctccctcttcctcttccccttctctctcggcgacgactgggtggccgtagctgcctccatacgcctggtgccctggtcttcttcgggccattcgccggccgcgagcaccaccaaaagggagagcttcccaggtagagctgtttctccgtactctagcagatggcaaggataaagcctaagcaattgctaatccaaagcaaaacaaagaaggctccatctcgaatcagctactctactatcatcacatggaacttgattgtcatattggttgtgctatctctctatgctacctacagccattggcatcaaaggtctgcccaagacttcgaaatggagcttcatgaagctgagcttgctgtgagaccggaggatccaaaaatgataagtagaccaagatatgcggtaatgaacaccgcaaaaggcccaattactatagaaatatacaaagatgcttctgctgacgttgtggatagatttatcaacttgtgcaagagtaatcatttcaaaggaatgccatttcggcatatcataaaaaattttgtaattcaaggaggtgattttgattttgatggagcttcccaagaatggataacgaaagctaaagctagtggaaaaaatgatctcagtccaaaacatgaggcatttatgattgggactgcaaagaatcctaataccaaaggatttgatttgtttatcacgacggctccaattcctgacttgaatgacaagcttgttgtatttgggcgagttatcaagggagaggacatcgttcaggtgctttctgaatttctctttctgggatctttccaatctaaaaattcagccccacctcgcttggaaagatgttcgactttgtgtgccagaactgtgaggagcctttttgtctggtgataaagaaagaaccctgtttcatatacttatccttcagcatttgagcccaaatagatgtttcgaatcttgatttatagactagcaggtgttcaaaatgccaagttatagatatgaaaaagcccgaccaaattgaattcgtcatttacgccaggactgttggcatatgcacatggcccaggctgttgatgcattttgatttgggtgatatcactataatagttgcttattagattttgtttttgtctgcttgcttatgtgaacaggagattgaagaagtcgacactgatgagcattaccagccaaaggccgccataggcatcatcgatatcgtgctaaaacaggagccttgagcctggatgcacatgatgacgttaaccacatgccgacggacttttctgtagttggaaaatctatctcatcgagttggtttttgttttggtgccttattatgtgttgttgcgtggaaagcagttgtgacgcttgttccaggagtcgttgcagcagcgtttgtgtataaaat

SEQ ID NO: 144225 - DNA, 1099 bp, Zea Mays
ccttgatgcttggtggcctcgaacaaagtacaggtccatttctagcctatcgagctcctcaggtagtaaaaccctacctacacctcgtgccgcctccgtcgccggctcgcctccccatcgacgcgcaggcagccctgcgtttgctccccgtcggtcgggaaaggggcgcgccggcgctgcctccagcaatcaactcgccgcatccaatcacggcgcctccctcctcgattggctcctcggtggttggttgttataggcaggcgggaaggatgttctcgctgagccagatcgagcacgacctcccgatgccgccgcacctgctgagccgcccccttcccgacgccatcaaggccgagctcgagaggctcttcttggacaaggtaatcacaaaacttgggctgtgcgtgtctgtctatgatatccgatccattgaaggcggttccatccatccaggggagggctgctcgacttataaagtttcatttcgtttgctgatgttcaagccttttaatggggagattcttgttgggaggattactggatatgacgataagggattgcaggtttcacttgaattcttcagtgacatttgcatacctggacacttgatgcagtttggcacagtaaggggaccagatggtaggtggatgctgaagactgaattaggcgatgagctttatctagatctagatgacgagataaggttcttggtttctagcacaaaatacccgcctataccaattgatcaaaatgaggatgacccaccatttgctccaatgcagattgttggaagtattaaaggggatggccttggtcttcttgtttggtgggcagctgatgaagaggagggggaggaggcggcagaggaagagcaatagcatcgtgttgcttgagggctcacttcgtgtaatttacagaatcagcctggtagcatgtgtagtgtaggggtcaggttcctaggagaattatgtatgtatgcaatcccctgaaattttctaaatatctgtgagctatatataattttatagcgcagagatctctccctgtaagagcatctccaaaagctccccagaagtctcctctaaatctattttttggg

SEQ ID NO: 144226 - DNA, 1155 bp, Zea Mays
ccttgatgcttggtggcctcgaacaaagtacaggtccatttctagcctatcgagctcctcaggtagtaaaaccctacctacacctcgtgccgcctccgtcgccggctcgcctccccatcgacgcgcaggcagccctgcgtttgctccccgtcggtcgggaaaggggcgcgccggcgctgcctccagcaatcaactcgccgcatccaatcacggcgcctccctcctcgattggctcctcggtggttggttgttataggcaggcgggaaggatgttctcgctgagccagatcgagcacgacctcccgatgccgccgcacctgctgagccgcccccttcccgacgccatcaaggccgagctcgagaggctcttcttggacaaggtaatcacaaaacttgggctgtgcgtgtctgtctatgatatccgatccattgaaggcggttccatccatccaggggagggctgctcgacttataaagtttcatttcgtttgctgatgttcaagccttttaatggggagattcttgttgggaggattactggatatgacgataagggattgcaggtttcacttgaattcttcagtgacatttgcatacctggacacttgatgcagtttggcacagtaagtgtacagtgcagtgtttcaaaggcatccaggtgaacctagcttgccttgggaaacagtggcgccatgtcgcctaggcgctgcctaggtgtccaggcatacccagcactggggaccagatggtaggtggatgctgaagactgaattaggcgatgagctttatctagatctagatgacgagcacaaaatacccgcctataccaattgatcaaaatgaggatgacccaccatttgctccaatgcagattgttggaagtattaaaggggatggccttggtcttcttgtttggtgggcagctgatgaagaggagggggaggaggcggcagaggaagagcaatagcatcgtgttgcttgagggctcacttcgtgtaatttacagaatcagcctggtagcatgtgtagtgtaggggtcaggttcctaggagaattatgtatgtatgcaatcccctgaaattttctaaatatctgtgagctatatataattttatagcgcagagatctctccctgtaagagcatctccaaaagct

SEQ ID NO: 144227 - DNA, 1041 bp, Zea Mays
ccttgatgcttggtggcctcgaacaaagtacaggtccatttctagcctatcgagctcctcaggtagtaaaaccctacctacacctcgtgccgcctccgtcgccggctcgcctccccatcgacgcgcaggcagccctgcgtttgctccccgtcggtcgggaaaggggcgcgccggcgctgcctccagcaatcaactcgccgcatccaatcacggcgcctccctcctcgattggctcctcggtggttggttgttataggcaggcgggaaggatgttctcgctgagccagatcgagcacgacctcccgatgccgccgcacctgctgagccgcccccttcccgacgccatcaaggccgagctcgagaggctcttcttggacaaggtaatcacaaaacttgggctgtgcgtgtctgtctatgatatccgatccattgaaggcggttccatccatccaggggagggctgctcgacttataaagtttcatttcgtttgctgatgttcaagccttttaatggggagattcttgttgggaggattactggatatgacgataagggattgcaggtttcacttgaattcttcagtgacatttgcatacctggacacttgatgcagtttggcacagggaccagatggtaggtggatgctgaagactgaattaggcgatgagctttatctagatctagatgacgagcacaaaatacccgcctataccaattgatcaaaatgaggatgacccaccatttgctccaatgcagattgttggaagtattaaaggggatggccttggtcttcttgtttggtgggcagctgatgaagaggagggggaggaggcggcagaggaagagcaatagcatcgtgttgcttgagggctcacttcgtgtaatttacagaatcagcctggtagcatgtgtagtgtaggggtcaggttcctaggagaattatgtatgtatgcaatcccctgaaattttctaaatatctgtgagctatatataattttatagcgcagagatctctccctgtaagagcatctccaaaagct

SEQ ID NO: 144228 - DNA, 696 bp, Zea Mays
aaagtgtacgtgcaggcagctctgcatgtgccgcacacgctagcttagctaaccagcagcagcgcatcggtcgtgtcgtctcgtcttcgtgtttcttccaccatgatgagctcgctgaagctgacggaggtcgtctccaagaggtggggcggcggcggcagcagcagcaaggtgacctccccgagcgcggcggcgtgcccgcgaggccacttcgcggcctacacgcgggagggccgccgcttctttgtccccatcgcctacctcgccagcgacaccttccgggagctgctcagcatggccgaggaggagttcggcgagcccggcgcccgccccatcgtgctgccctgctccgccagccatctggagcagatcctcgacgccttccgcagcggcggcggcgccaagaagaagaaggagagcgccggcaggatcagcaagatctggtagcaggtactacgaagaatgcagttgcattactgcactctgctgctagctagctgttgccgtcgctagcagctgcctgccgcctgatcgatccatgagcttgggtgcatgcatgagtgtgagattattattaatatatagtagcttcgatccattgctgactgttcactggcgctcaactagtgctgctgctgatcagcctagctagctaggcggtgttgtgatctattcgttaattaattgatgtttttt

SEQ ID NO: 144229 - DNA, 862 bp, Zea Mays
atggaccgccgtccgccgctcgctgtctccccgcgccgcctccgcccgcgtccgcccctcgtgccggcctccaccgtgcaaacgcctgcaggatcgaagaagcaggcggcggtcccgatgcgcgcgtccgtctgcgcgatcccttcgccggtgcgcgcttcaatctccgccctcccgtcgctggtccgcggcgaaccaaacccgatgcgcgcgcgcgtgacctccgcgctccagcccccgacgcacgtcgtggccgcgtcgtcgtcgcccccagcgagggaggcgggcgagaaggagaacttccttcccgccgcggcgccaccgccgacgcccccggcagctaggtcgggtttcgaggaggagaacctcctcccggccggcgcggacgcccacgacgagctagtggcgctgaacctcgcggcgatcgccagggcagcgggcacgccggacggcggcccgctcttcgtgcgcggcaggctgtacgacgcctactcggcgcgccgcaacgagcggctcaagcgcaagcagggcttcccctactactactactctgatgagtttgcgtccacgtactcggtagaacctgaggcgatggcgaaggacccctgtgtcgccgtcgagctgtccaagcgccgcgtcgccaagaaggcctacaccgccacgagcggcggcggcgagtccgtgaggaggtctatgccagccgtcgactttgcggcccgccgcggagggggcctggggccgaggtcctctctcaggagcagcaaggagatgaagaaggcttccgctgcgtcgggcgtcaaggagaggagggtgaaccccaggtcgctactttgccggttctgagggctggacaccttctcat

SEQ ID NO: 144230 - DNA, 821 bp, Zea Mays
agcaaagctgcctacctcttttccaattatatatccactcaacttcagttgacgcttcagacagaatccagtgttgtttcctacttcatgacgttgttgtctagatgtacgtcgaagtttaattgagtacatcaggtagtatatatacatgcattatggtaataaattgtgaagaaacagcttaaaagagggataataacacaataatgactactagctagctagtaatcgccatgctttatttattaatttagttgtaactatatataatgcaataatgcactgtctgcagattaaattatactatgatctaacaggtagctaactctctctctctatatattattttgtcaggactacaacgcatggggagggttggactggaaggacaagtcggagacggagatggacctgcaaagtagaggcctgtgcttggtacccgtctcatgcacccctcaggtgtacagggataacaacggcccggattactggacgcccccgtatagaagctgcttataccgatgaactgatatatatatcctttaccctgctatatatttattcgattgattaccttaccggccaagtggcaataatttgtacgtacgtgctgaatatatacattgttgttgttaaagaagacaaaacatgatggttggcggtataagtttagagatcaatttgtgtacgaccacgatttcattattttaaatttaaacctggtatgtatctggttattaattagaggcttcgtgacatcatcatcattgacatattgacatcgatgttgtaattgtctgttactcctctacctatatcta

SEQ ID NO: 144231 - DNA, 1527 bp, Zea Mays
cggcgaggttggaaggagcatgcaggccgtgcacgacgcccacgacgacagcgagaacttcctcgacctgctcaactcgagggcgctggcgccggagctcttcgccgagccgccggcctgcgactacctcaagaagatggagtacggcggcggcagcggcggctggccggaccacaacttcacgacatccgccctggagaagcacctgggctccggctacggcgcgccggagcggctcacggcgaacctgtccgaccttgtcagcaactggtccatcgcgccgccgagcccgtgtctcggcgacgcgcgccaccaccgcgtcgcagtcgcaggggcaggggcatgcgataacaacaacgccgcggtggccgccttggggctcggcggcaaggccgccgccggcctgttcctggactccggcggcgtcggcgtctgcaacagcaagcacgagataggcggccacggcgcgatgctggaggaagcggcggcggcgtccgggggcagcggccaggagttgctccggcccgcggggtacagctccatgctcgggctcagcagcagcagcaggatgtatatggacgtgccgtggggcaacaatgccagcaggagcctttccgacctgatatctttcggcggaacacctctgggaaaaccagagcaaccgacgccggcggccacgtcaacgaaggcgcaggcggcggagtacaagaagcaagggcgggaaatctcttcgccaccgaagacgagtagcgaaggtggcagcaagggaagctcggacgggaagaagaagaagagatcagacgggcggcaaggctcggaggcgaacgccaagaagtccaagaatgaggcgtcctcacccacgtcgtcatctctcaagcaggcatcgcagctgccaaaagtgaagttaggagacaagattactgcactgcaacagatcgtttcaccatttggaaagaccgataccgcgtcagttctgtatgaggcgataaattacatcaagtggttgcatgaacaagtgcagttgctgagtgatccatacatgaagacaagcagtagcaaggactacaacgcatggggagggttggactggaaggacaagtcggagacggagatggacctgcaaagtagaggcctgtgcttggtacccgtctcatgcacccctcaggtgtacagggataacaacggcccggattactggacgcccccgtatagaagctgcttataccgatgaactgatatatatatcctttaccctgctatatatttattcgattgattaccttaccggccaagtggcaataatttgtacgtacgtgctgaatatatacattgttgttgttaaagaagacaaaacatgatggttggcggtataagtttagagatcaatttgtgtacgaccacgatttcattattttaaatttaaacctggtatgtatctggttattaattagaggcttcgtgacatcatcatcattgacatattgacatcgatgttgtaattgtctgttactcctctacctatatcta

SEQ ID NO: 144232 - DNA, 115 bp, Zea Mays
gcgtgatgttctactggttagacagtttcacttagtgtctcccgcccttcttccatcagggtatgggttcgaatcccacctcctgaccatttttaacattttacgctgatttaat

SEQ ID NO: 144233 - DNA, 519 bp, Zea Mays
aaaagattgatcttttgcttgctatactcccagagaaaaacggcagcttatatggtaatttcaaaaggatctgtgacacacagattggtgtcatgtcgcagtgttgcctggataaaaatattaggaatgcaaaacttccgtactttgctaatgttgctattaagatcaatgccaagtttggaggaagaaacttagaatttgctaatcctgaagaaagcttaccgtttttttctactgaaccaacaattatgtttggtgctgatgtcactcaccctgctgctctagatgatacttccccgtccattgcttctgttgttgcctcccaagactggcccaaggtggctaactataatggcattatccgtgcacaaggtcaccgtcaagagctcattgatgggctggaaaatattgtcaaggaactcctacttgcattcgtggaacggtctaagcagagacccaagcaactgatcttctacagggatggcgtaagtgagagccaattcaaacaagtgctggagc

SEQ ID NO: 144234 - DNA, 1705 bp, Zea Mays
tcagttgccgctacttcccgacgtaaatcacagctacagggtggaccctgaccaaagcgcccaggtggccgctgccgatggaggcgctcctcaagtgggcggccgagctgggcgtctccgactcgccgtcgcccccttcctcctccccctctggaaacatctcttcgccgtcctgcctcggcggctccctcgtcgtcgccgacttccccgacgccggcgggaggggcctcgcggcggcgcgtgacttgcggcgcggggagctggtgttgcgcctgccccgagccgcgctgctcacaagcgaccgcgtcacggccgacgaccccaggatcgccgcctgcgtcagcgcccacaagccccgcctctcctccgtgcagatactcatagtgtgcttattggccgaagtggggaaagggagcaactctgtctggtacccctacctgtgtcagctacccagctactacactatcttggctaccttcaatgattttgaagtcgaagctctccaagttgatgatgctatttgggttgcacaaaaggctaaaagtgccataaaatcagactgggaagatgcgacaccactaatgaaagaattggaatttaaacctaagcttttgatgtttaaatcctggctctgggcatttgcaacggtatcttctcgcacattacatattgcatgggatgaagctggttgcttatgccctgtgggtgatttgttcaattatgctgctcctgatgatgacactttattggaggacgaggatacagctgaacttacgaattaccagcagaagaatgggatgaccaattcatctgagagattaacagatggtggatacgaagattgtaatgcatactgtctgtatgcaagaaaaaattataaaaagggggagcaggtcctccttgcttatggaacatacacaaacctggaactccttgaacactatggctttcttttgggtgagaaccccaacgagaaaactttcatcgagttggatttggatatttgctcagtgggaacctggccaaaagattcaatgtatattcatccaaacggacacccctcatttgcattgttatgtgcattaaggctttggtcaactcccacaaaccgtagaaaggctgtcagtcatcaggtttactctggatcaatgctttcgactgaaaatgagatggggattatgaaatggttaatcaacaaatgtgaaggaactttgcaacaattacctacgacagtagaatttgatgacagtctgcttgtccttctacgcacaatacagaacagtagcaactgcagagcagatgcgaagcggtcaggttttgagcaggagtttgctgtgttcctccggttccatcgagcggagcaggattgttctggtaacagtctactcccttttcgacttatgagatctgtggaaagatgggaactagctgtccagtggagatgcaactacaagaagacgctgaagaaatgtatttcgtactgtgaaggtttagttcacgagcttcccttgcaactaaaccagcaataataatcaaggtctcaattcatgtactccattttataatagtgtctctgtcttcatgaaccgacagaatgcctttaacacctcgccataggttagaatgatcttggatcagcaatgtactgccaaaccacttgatcaggtttacgataaaggtcaccgagttgtttagttgtccggtt

SEQ ID NO: 144235 - DNA, 1621 bp, Zea Mays
gacgtaaatcacagctacagggtggaccctgaccaaagcgcccaggtggccgctgccgatggaggcgctcctcaagtgggcggccgagctgggcgtctccgactcgccgtcgcccccttcctcctccccctctggaaacatctcttcgccgtcctgcctcggcggctccctcgtcgtcgccgacttccccgacgccggcgggaggggcctcgcggcggcgcgtgacttgcggcgcggggagctggtgttgcgcctgccccgagccgcgctgctcacaagcgaccgcgtcacggccgacgaccccaggatcgccgcctgcgtcagcgcccacaagccccgcctctcctccgtgcagatactcatagtgtgcttattggccgaagtggggaaagggagcaactctgtctggtacccctacctgtgtcagctacccagctactacactatcttggctaccttcaatgattttgaagtcgaagctctccaagtatatctcggttgatgatgctatttgggttgcacaaaaggctaaaagtgccataaaatcagactgggaagatgcgacaccactaatgaaagaattggaatttaaacctaagcttttgatgtttaaatcctggctctgggcatttgcaacggtatcttctcgcacattacatattgcatgggatgaagctggttgcttatgccctgtgggtgatttgttcaattatgctgctcctgatgatgacactttattggaggacgaggatacagctgaacttacgaattaccagcagaagaatgggatgaccaattcatctgagagattaacagatggtggatacgaagattgtaatgcatactgtctgtatgcaagaaaaaattataaaaagggggagcaggtcctccttgcttatggaacatacacaaacctggaactccttgaacactatggctttcttttgggtgagaaccccaacgagaaaactttcatcgagttggatttggatatttgctcagtgggaacctggccaaaagattcaatgtatattcatccaaacggacacccctcatttgcattgttatgtgcattaaggctttggtcaactcccacaaaccgtagaaaggctgtcagtcatcaggtttactctggatcaatgctttcgactgaaaatgagatggggattatgaaatggttaatcaacaaatgtgaaggaactttgcaacaattacctacgacagtagaatttgatgacagtctgcttgtccttctacgcacaatacagaacagtagcaactgcagagcagatgcgaagcggtcaggttttgagcaggagtttgctgtgttcctccggttccatcgagcggagcaggattgttctggtaacagtctactcccttttcgacttatgagatctgtggaaagatgggaactagctgtccagtggagatgcaactacaagaagacgctgaagaaatgtatttcgtactgtgaaggtttagttcacgagcttcccttgcaactaaaccagcaataataatcaaggtctcaattcatgtactccattttataatagtgtctctgtcttcatgaaccgacagaatgcctttaacacctcgccataggttagaatgatct

SEQ ID NO: 144236 - DNA, 1899 bp, Zea Mays
gaagctaccctaaaccccactaggaacacttctggatggctattccctttgtttcccatatttttggtcactggttatctgttgagcttgatatctgcaagcaagtcatgcaggcagtttatgattcaacttattgagccattcacgcacaacaagaaaacggtggacattagaggcaggtcggagggaactcccaaaaaaagaaaaacacggaagaaggatggacttgtcaatagctctgagaccttgacagcatctgacaaggagtgcagtgatactggtgggtcaactgaggcaccaatgaaaaattctgcgctaacagatgcccttggtggtcgtcagattggtaaggtatatgtctccaataaagaaattggcagagggagcaatggcacaattgtttttgaaggatcttatgatggtcgtcaagttgccgtgaaacgtctgctgcgttcccacaatgacatagccgaaaaggagactcgaaatcttattatatcggatcatgatcctaatattgttagactctacggttgtgaccatgacagtgattttgtttatatctcccttgagaggtgccactgcagcttggctgacctaatccaaaaacagtcatatttgtcttctggagagtctatttctaacaatgaggtcagtatgagcatcaactcaaagatttcaaatgttaagggaatagacgtggagttgtggacgcaggatgggcttccttcagcacaactcctgaagctgatgagagatgtggttgctggccttgtgcatttgcataacttgggaattattcatcgtgatttgaagcctcagaatgtcttaataagcgcagaaggacctattagagcaaagctttctgatatgggtatcagtaagcacctgcaagatgacatgacttctgttagccatcatggtacaggaattggaagctctggctggcaagcacccgaacagcttcgtcatggtcgtcaaactcgtgcaatggatctttttagtttgggctgccttattttctattgtatcactaaaggcaagcatccgtttggtgaatactatgaacgggatacaaacattgtaaacaatcgctttgatctctttgtggtggactacataccagaagcagtacatcttatatctcaactgttacaaccaaacccagagacaagaccaacggcagtatacgtcatgcatcatcctctcttctggagccctgaattgcgcctttcgtttctaagggataccagtgacagaattgagaaaaccagtgaaacggacctcataaacgcactggaaagcataggaccagtggcgtttggtgggaaatggggagagaaactggatgctgctttagttacagacatgggtcgttatagaaaatataactttgagtctactcgtgatcttctgaggtatatcagaaataaatcgggtcattacagagaactttcaaatgatctcaagggcatacttgggtcattgccagagggatttgatcactattttgctagccgatttccaaagttgctaattgaggtgtacaaggtcttgtgggtgcactgcaaggacgaagaagctttcagtaaacatttcaatggaagctccttatagctggagaggattgccttttcctactgtaaatactaaccctgatgtagaagttgtatgtacatttgatatgtataccatattacccgttttatagaataaagagagctcagtctgtacattatgtagcatattactgtgttgcctataaatccaagctttactgttgaatggtgaacaatggtaacacaatctgctggatggaaaccagtggtatgtataatacccactttgtaagaaaagtctaaaaagaaaaattatattactttgtatctgtatgtgtta

SEQ ID NO: 144237 - DNA, 2016 bp, Zea Mays
gaagctaccctaaaccccactaggaacacttctggatggctattccctttgtttcccatatttttggtcactggttatctgttgagcttgatatctgcaagcaagtcatgcaggcagtttatgattcaacttattgagccattcacgcacaacaagaaaacggtggacattagaggcaggtcggagggaactcccaaaaaaagaaaaacacggaagaaggatggacttgtcaatagctctgagaccttgacagcatctgacaaggagtgcagtgatactggtgggtcaactgaggcaccaatgaaaaattctgcgctaacagatgcccttggtggtcgtcagattggtaaggtatatgtctccaataaagaaattggcagagggagcaatggcacaattgtttttgaaggatcttatgatggtcgtcaagttgccgtgaaacgtctgctgcgttcccacaatgacatagccgaaaaggagactcgaaatcttattatatcggatcatgatcctaatattgttagactctacggttgtgaccatgacagtgattttgtttatatctcccttgagaggtgccactgcagcttggctgacctaatccaaaaacagtcatatttgtcttctggagagtctatttctaacaatgaggtcagtatgagcatcaactcaaagatttcaaatgttaagggaatagacgtggagttgtggacgcaggatgggcttccttcagcacaactcctgaagctgatgagagatgtggttgctggccttgtgcatttgcataacttgggaattattcatcgtgatttgaagcctcagaatgtcttaataagcgcagaaggacctattagagcaaagctttctgatatgggtatcagtaagcacctgcaagatgacatgacttctgttagccatcatggtacaggaattggaagctctggctggcaagcacccgaacagcttcgtcatggtcgtcaaactcgtgcaatggatctttttagtttgggctgccttattttctattgtatcactaaaggcaagcatccgtttggtgaatactatgaacgggatacaaacattgtaaacaatcgctttgatctctttgtggtggactacataccagaagcagtacatcttatatctcaactgttacaaccaaacccagagacaaggtaagaactaaaaactaagaccaacggcagtatacgtcatgcatcatcctctcttctggagccctgaattgcgcctttcgtttctaagggataccagtgacagaattgagaaaaccagtgaaacggacctcataaacgcactggaaagcataggaccagtggcgtttggtgggaaatggggagagaaactggatgctgctttagttacagacatgggtcgttatagaaaatataactttgagtctactcgtgatcttctgaggtatatcagaaataaatcgggtcattacagagaactttcaaatgatctcaaggtttgttggtgctgcactttactgtgttcgattttgtcatgctgtatgaatggagttaaattgttgattagttgctgatctaattagggtaggctgtgtgcgttacctgatagttttgactagacattaggtatggacggcatgcgaacgaacatgcatgttgtgaattagcagagaatttcctagggcaatttaaatacagcttatgttttatattgcaaatttgctctgctcatcagtcaagtcaacctttgttttgtctcataagctcacaattgatggatgcaaattccagggcatacttgggtcattgccagagggatttgatcactattttgctagccgatttccaaagttgctaattgaggtgtacaaggtcttgtgggtgcactgcaaggacgaagaagctttcagtaaacatttcaatggaagctccttatagctggagaggattgccttttcctactgtaaatactaaccctgatgtagaagttgtatgtacatttgatatgtataccatattaccc

SEQ ID NO: 144238 - DNA, 806 bp, Zea Mays
atcctctccccctttcagaaaaaaaagtaatcctctccggagtccaagctccgaccagatccggacccccccccccccctccgaacaagctcgggcatgcccagcagctgatgaggtcgctccgcggggtcctcatcccgctcgtcctcctcgcggggctcgccttccgcgtggacgacggcggcgccgcgctcctcccgctcccgccacccgcgcttcccgcttccccgtcccgcctcgcgctccccggaggcactccgaaggatgatggggcggcggcttcgcgctccacggaggtcgtcacggcgggggtgcgctccaccgagatcgtcgccccagtggggcccaagaagcagagcctccgggagctccttgtccggccgcagcctgcacgtcacgagccgtctagcttggttagcggcgaggcgaaagccgaaaccagatctgtgctccagttttacgacaatggcacgattcagcttgtggacaagctgtctcaatctcctctgtgggagattgccacagggcctccactctcagaccatattactaccactgagtctggtccgaattacctcatttatcctttcaatgggaacgagaacatgaatgggaatagtactgaactttgggaggtttataatgggaacagcgtgaggctcccatggaaattggaggaattcgttgccaggagcccatatattcgggattctgttgttactatcggatcaaaagtttcaactgtttttgtagttgatgctgatagtggtgagattatttacaggcatagtatcccatctgcgtta

SEQ ID NO: 144239 - DNA, 1576 bp, Zea Mays
ccaggcgtgagaggcgctaacgagagccacaaactctgctccgcgtgcacgccgcgctccatggccgccgccccagcagcagccggaggccttatgcagctccagcctccgctatgcgtgtcgcctcgcgccagcgcttcttgcgcaccaagcatctggggggccctgccccagcttcgccgccgccgggccctggcgcgcgcggcgtcgtcggtagcggccggggaggctgaggcgtacacggaacccgagctggtgttgctggaggccctcctcggcatccagggccgcggccgcgccgtcgctccgcgccagctccaggaagtggagagcgctgtgcaggctctcgagacccagggaggcattcctgatccgacaagttcaagtttaatcgaaggtagctggcggctcatcttcactacgagaccagggacagcatcgcccattcagaggacatttgttggagttgactctttccgtatcttccaggaagtttatcttcgaacagatgatccaagggtggtcaatgttgtcaagttttcagaatcagttggtgatctgaaagtagaggcagaagcaactattaaggatggaaagcgcatacttttccgttttgaccgagcagcatttgccttcaagtttctgccatttaaagttccatacccagtgccatttagacttcttggagatgaagctaatggttggcttgacacaacgtacttgtcccacactgggaacatacgaatttcaaggggaaacaagggaaccacttttgtcctacagaagagtgcagacccaagacaaatcttattgtcagctatatctgcaagaacaggagtagaagaggtcatcaatgattttatttcaagccaaaatggaacaaaggctgatctaagcattctggtgggtgaatggcaactattgtggtgctcacagactgaaggtgaaagttggtcatctgttgcatctgccggtctcaaggacttccagattataagagaagatgggaaattaaagaattcagctagccccttcccaggtctcactcttaatgcaacaggcaacatatgcaaaaatgggagtggaaacacctttaccatgtccatgaaagaaggagctgttaaagttggtggtttacagtttcccttggatgctcaaggagaatttgtgatggaaatcttgtatatcgacaacaagataaggatatccaggattaaccagcacatgcttgtccatttacgcattgcgaatacaacatgacaccttaatgaagactatgtgaacatatatcctaatttcattgctgagcacacctcatcagatgtgactaggtcatgcgacataattttaaatttactggtgtatagctaacattttagcacaaaattttctacatagttttcttgtactcaaaccgttttctcacaaacatatggaaccacagttgagcagtttgtatggcaacattctgtaaatgcctgtttgaaaccagatccgatttctcaggggatttcttatgtaacttcagagttcctagaagacatgggcagaaagtagatctcaaaatgcccttgtg

SEQ ID NO: 144240 - DNA, 101 bp, Zea Mays
cttttatgttgaacttgctaccagaaactcttcatccagttatacatttgtagcgcaagacataataggaaacttaatatcatgcaaacttatataagcag

SEQ ID NO: 144241 - DNA, 84 bp, Zea Mays
gcaggcagatggtcccatcacacgctaccctttgctccgtctgatgcaaccagagacgggcccaatatagagacatgcacattc

SEQ ID NO: 144242 - DNA, 1174 bp, Zea Mays
tatagccggccggcccccttatatatgttgccatagcagaatcccgttcttcaccattgagccgagcatcctgcgagagcgagcaagagaatcacgacttataactagggttctccacaggtaccgagatacgaatagctagctaggatgatgctgcttgcactgcattctccatctaccggtaccgtcgcttggcgtcgtcgtcgtccggctccattacccgccatctcgcgccgcgctcgcattatccggccgtctccattcgctctgtccaccgcggcggccacggacacgagcaccggccatgccccggccacggccgatcgcgaggcgccgctactccagctcctccacagcggggtgcgggcagagtcgctgccgcggcacgtagggttggtgatcgatgggcacgcgagatgggcgcgcgccagggggctgtcggtgtcggagggccacgcggttgggcggcgcacggtggagcacacggtgcgactgtcgcgagcgtggggcatccgcgtgctcaccgtcttcgcctgctcccacgagaacatgacgacccgccccaaggcggagatggacttcttcatgcagctgtacgaggggtttatccgtgacaacgtcgaccagttctgcagggagggaatccggctgcatctcatcggcgactcgccgggattgccagcgtccctgctgcgcgcggcgagggaagccaaccagctggccacgcagagcgagtcggagatggtcctgatgctggccatgggctacagcgggcggcgggacatactgcgggcgtgccaagagctcgccacggaggtgcagcggaacctgctgaggccagaggacatcgacgaggcgctcatcgccgggaagctggggaccagtatcgccggcggcgagctctcttaccccgacctggtcatcaggaccagcggcgagctgcggctgagcaacttcctgctgtggcagtccgcattcgcggagctcttcttctctgacgtcatgtggccggattttggggaggacgagtacctcggggccttgcgttcctaccagaccagacaacggcgcttcggccaacgaaagtagagctcacttcttcttcttttttcctttcaaaatacaacaaacgaggaaataaaaagctacatcactactatatagatttgatcca

SEQ ID NO: 144243 - DNA, 125 bp, Zea Mays
gaagaggtcttcctagccgctgcgggtctgcgtcgcgtcgccactgcaccgacccgccacagccccactagcctgactccaccgccaccctaggtataacctctatttccgcatcatggtcgtag

SEQ ID NO: 144244 - DNA, 782 bp, Zea Mays
actgcgagcagccggtcacagcgcgcagcgccgtctcctgcgattcccggctgcctccacctcttctcccacagcgccggcgtgctcctctcctttcacgctacgttccctccggccccggcgtcgacggctaagaaacccttaacctaggaacgagttcgcaccctcgggacctgtggcgatgcatctcactctcgaattcgggggcgggctggagctgctcctggagaactccaccaaggtgcacaaggtggaggtcaccacgcccaaggacggccaaggcaaggtgacgatgaagttcttgctctcttgggtcaaggagaatctgatcaaggagcgaccggagatgttcctcaaggctgattccgtgaggcctggggttcttgtccttataaatgactgtgactgggagctgtgtggtggtcttgatgcagagttggaagagaaggatgttgtggttttcatctccactttgcatggtggttagtttgattacatcaggatgatagcatcctatgattttcctgaaaatcgcaccttgtatcaagtctttggaagggatggattggtctgagttgtgtggctttctggagatactaattgcaaactgtggaactgcacttgttggtgccaatatcatcaaactatagttccattttcttactgggacgcaggcacataatattgtgcacaaccgatcctgtatttttccagtactgctgtggctctcccccgtttgctgtatatacataaatgaaaggtcaagtgaagtacgtatttct

SEQ ID NO: 144245 - DNA, 691 bp, Zea Mays
cgtaccgagcgtccgagccacgactcttccctcgctcgctcgttcgtctcctcccaccaaggcaccaaaccaatctagccaccaaggcaccaaccaagagccatggcatccccgttctgcgccgctgccgccgcttgccgcctcgccgtccccgccccgtcccctcccgccgcacgggcgcctaggccccgacgcggcctggtggcggtgcgcgcggaggcgggcggtgggataaacccggccatccggaaggaggaggacaaggtggtcgacaccgttctcaccggcgagctcgccaagccgctcaccgcgtactgtcggtgttggagatcaggaacattcccactgtgcgatggatcccatgtgaagcacaacaaagcaaccggtgataatgtgggccccctgctcgttaagaagtagatgcagtttctttcgacttttgccctagcgtcatgttgagcgctgagctgaacactatctgtatgtcatgatatatgtttttttagccaagataaactatcatgacgcaacgatccttcattcggaataaagtaagctgctcatgtcaacaagtctcagtttcatgattgtaggaaacgttagtgactggtgatacatgtagtgggatgtatgaaaatcggaaaaatattttgttctctgtgttgaacaatcaagtcatgagcttatgatc

SEQ ID NO: 144246 - DNA, 148 bp, Zea Mays
atttgactgaacattagtttgtatatcaaatccatacgggaaaattacagttctaactttgttgctataatgcgcctacttaatttagattcaagcttaaagattattcgtgagacaattgcaatattactttgttgctataactctg

SEQ ID NO: 144247 - DNA, 1369 bp, Zea Mays
tctctcctgttctctctctcccatccgggtccgctccaacctccaatgccgttgcctatctgccccacctgccgcttctcataaacgcctccggcctccccggcacaaaccctagccctcaatcacgccgagctcgacggaaccagcccaacccgagcccatttctgctcgggtcccggccgatccggcagctcctcatcagcacaacccggggcaacgtcccccagcggatgctagcctgatcgggtccccacggtcgatgggttcgcccgggtccgccaatggcagacgcggcgagtacgtgaggatccctgaggaggtggaggtggcgtccaagggggaggcagatgccgcggcggccatcaaggcggccgtggcagcggagtgcccgagggtgctgcggtgccgcgcgatccggtggtgggccaaggtcgccgtgcttgggatcttccttgcaggggccggagctgctgccgtggtcttcctcggcccgctcgttattaagaagtggggatgagcataggcatgtcgttgccgtattttataggttctgcattccactgcaggatacatagatggctggagaagtggccaaagaaagcagcttttgtaaggcttgctggcgagggagattggcatcatcaatttaaggctgttgctttactcaggatttctccatttccatatttagtttttaactacgcttctgtggctacgaacgtcaaatattacccatacatagctggttccatggctggaaccatacatgaaactttccttgcaatatacagtgggaaacttctacagagcttggctgtagcaactagccaagggtcattcttgtcggtggatcagattatctacaatggaatcggctttacaattgctgcaacttccactgctgctatcactatttatgcaaagaaagcgcttcaaaagctccaagcggaggacgagatattttgagaggtccaaggccaggatcaaacccgtaacgctagttttctttcaggtgtactatatatgaacagctggtactaatctggtttcctgtgtcgactaccggactgctactaccatccatctgaggaagaggagggggggaggtgcttcagcaattgtaaagaaaatagaggcccagagtttttcgttcttgttttgttttctgtagagagaattaccaacctcatctgtgtattgcaattgcgctatgtaaatccccaagttgaaagttgtttccttatcttgagaagtataacaaggtatgctggctgcgtcgaaatatattacatacactgcagccatgatttgcgtgttgtatagtaatgcatcttaagctaatatatatacgacgaaaaactttggggct

SEQ ID NO: 144248 - DNA, 1526 bp, Zea Mays
tctctcctgttctctctctcccatccgggtccgctccaacctccaatgccgttgcctatctgccccacctgccgcttctcataaacgcctccggcctccccggcacaaaccctagccctcaatcacgccgagctcgacggaaccagcccaacccgagcccatttctgctcgggtcccggccgatccggcagctcctcatcagcacaacccggggcaacgtcccccagcggatgctagcctgatcgggtccccacggtcgatgggttcgcccgggtccgccaatggcagacgcggcgagtacgtgaggatccctgaggaggtggaggtggcgtccaagggggaggcagatgccgcggcggccatcaaggcggccgtggcagcggagtgcccgagggtgctgcggtgccgcgcgatccggtggtgggccaaggtcgccgtgcttgggatcttccttgcaggggccggagctgctgccgtggtcttcctcggcccgctcgttattaagaaggttgttgcacctattctttactgggaatcaataactttcagcagaccagctattgctctaatatgttttggcacaatcgccttattcccaagtgttttgttaccttcttcgcccttcatgtggcttgctgggatgacttttggatatctttatggctttttgataatcacagtggggatgagcataggcatgtcgttgccgtattttataggttctgcattccactgcaggatacatagatggctggagaagtggccaaagaaagcagcttttgtaaggcttgctggcgagggagattggcatcatcaatttaaggctgttgctttactcaggatttctccatttccatatttagtttttaactacgcttctgtggctacgaacgtcaaatattacccatacatagctggttccatggctggaaccatacatgaaactttccttgcaatatacagtgggaaacttctacagagcttggctgtagcaactagccaagggtcattcttgtcggtggatcagattatctacaatggaatcggctttacaattgctgcaacttccactgctgctatcactatttatgcaaagaaagcgcttcaaaagctccaagcggaggacgagatattttgagaggtccaaggccaggatcaaacccgtaacgctagttttctttcaggtgtactatatatgaacagctggtactaatctggtttcctgtgtcgactaccggactgctactaccatccatctgaggaagaggagggggggaggtgcttcagcaattgtaaagaaaatagaggcccagagtttttcgttcttgttttgttttctgtagagagaattaccaacctcatctgtgtattgcaattgcgctatgtaaatccccaagttgaaagttgtttccttatcttgagaagtataacaaggtatgctggctgcgtcgaaatatattacatacactgcagccatgatttgcgtgttgtatagtaatgcatcttaagctaatatatatacgacg

SEQ ID NO: 144249 - DNA, 138 bp, Zea Mays
atgacagtaattaatagttttggtatgcacctgttgtcaccaagcacccagctcggcatcgcacgcattccatacttggtgaagaatctgccaccaactcttctagggtgtggtatccacaacttggtcaaaaattac

SEQ ID NO: 144250 - DNA, 1590 bp, Zea Mays
aaacccaaacctgattaatgcctcgcctccattccgtactctcctgctgaagcttttttctctgaaactagtatatcccccatctgtttggtcccgacgattttccgctttgggagcaccaccaagctcttccagcttgcagggctggagtctttgccagggacagcaatggtgccgacgcatggcgatacagccggaccgagctccagccaggatgacccggcagccagcgtgaagaagcgcaacagcaacaggcctcagtatcatccgtttactcagcaacagcttccagcttgcaagcctatacttgcgcctcagacggtcatccctgtactcctgtttgtgggcgtagtttttatcgtgattggccttggctgcattgcagcctcaaacagggtggttgaagtggtctatgagtatgagacttcatgcataccaagacacatgcttggcaacaaagtcgcctatatccaaaacccatctatagataagacatgcacatggattctcaaggttcctagggatatgaagcacccaatctacgtatattaccagcttgacaagttctaccagaaccacaggaggtacgtgaagagccgcagcgacaagcagctgagagatcccaaggaggccaacagcacgcagcagtactgcaagcccgaagctaccaccgagcacgggagcgccgtcgtcccctgcgggctcgtggcctggagcctgttcaacgacacctacagcttcgcccggggcaacaacagggcgctgagggtccacaagcgaggcatctcgtggaggagcgagagggaacacatcttcgggaagcaggtgttcccgaggaatttccagaaaggagctctgatcggaggaggcacgcttgatccaagaatacctctgagtgagcaagaagacctgatcgtgtggatgcggaccgcggctctgccgacgttccggaagctgtacggcaggatcgaggcggacctccgcgccggcgagctggtcacggtgacgacgcagaataactacaacacctacagcttcggcgggaagaaggcgctggtgctgtccacggccggcgtgctgggaggcaggaacggcttcctcggccgcgggtacgccgtcgtcggcctggcctgcctgctgctggcgctgctcctcaccatgctctgcctcgtcttcccactgaaagaggaacaccttgcgctgcagtaccctttgctccggcctgccacggtgaccatgcatgcctagctagatcagtagacggtgtacagattgaaacagtttcttctttttcatttttgatgtatactcagattgaaacagtttgttctttttcttcttggatgtatacttggggtctgatcggtgatttcttgcgcacaggaacagctataggtcgagctgcgacatgtaaatagacactcaaagatttgagttgtacttgtacatttctactagggtctaggggttacagagtttaaaattggaatatgacagtggatacgagggtaacccccaatgtaatcgccaagtgatttggtagtagagcaccgcagtgtgtctaaaaatgaggattgaagtttctctgtc

SEQ ID NO: 144251 - DNA, 1481 bp, Zea Mays
gtctctactcccaaacccaaacctgattaatgcctcgcctccattccgtactctcctgctgaagcttttttctctgaaactagtatatcccccatctgtttggtcccgacgattttccgctttgggagcaccaccaagctcttccagcttgcagggctggagtctttgccagggacagcaatggtgccgacgcatggcgatacagccggaccgagctccagccaggatgacccggcagccagcgtgaagaagcgcaacagcaacaggcctcagtatcatccgtttactcagcaacagcttccagcttgcaagcctatacttgcgcctcagacggtcatccctgtactcctgtttgtgggcgtagtttttatcgtgattggccttggctgcattgcagcctcaaacagggtggttgaagtggtctatgagtatgagacttcatgcataccaagacacatgcttggcaacaaagtcgcctatatccaaaacccatctatagataagacatgcacatggattctcaaggttcctagggatatgaagcacccaatctacgtatattaccagcttgacaagttctaccagaaccacaggaggtacgtgaagagccgcagcgacaagcagctgagagatcccaaggaggccaacagcacgcagcagtactgcaagcccgaagctaccaccgagcacgggagcgccgtcgtcccctgcgggctcgtggcctggagcctgttcaacgacacctacagcttcgcccggggcaacaacagggcgctgagggtccacaagcgaggcatctcgtggaggagcgagagggaacacatcttcgggaagcaggtgttcccgaggaatttccagaaaggagctctgatcggaggaggcacgcttgatccaagaatacctgtgagtgtactacagtacctctggaactttattactggggaaaaaaaacagggctgtgatgaagtcgaaattccacagctgagtgagcaagaagacctgatcgtgtggatgcggaccgcggctctgccgacgttccggaagctgtacggcaggatcgaggcggacctccgcgccggcgagctggtcacggtgacgacgcagaataactacaacacctacagcttcggcgggaagaaggcgctggtgctgtccacggccggcgtgctgggaggcaggaacggcttcctcggccgcgggtacgccgtcgtcggcctggcctgcctgctgctggcgctgctcctcaccatgctctgcctcgtcttcccactgaaagaggaacaccttgcgctgcagtaccctttgctccggcctgccacggtgaccatgcatgcctagctagatcagtagacggtgtacagattgaaacagtttcttctttttcatttttgatgtatactcagattgaaacagtttgttctttttcttcttggatgtatacttggggtctgatcggtgatttcttgcgcacaggaacagct

SEQ ID NO: 144252 - DNA, 98 bp, Zea Mays
ggaaagaaggtttcccgctgcctttatatttcaaaaagaaaaacagttcaagtactgcattttcagcgcgtccgcctcacagagaagaatgccttaag

SEQ ID NO: 144253 - DNA, 1892 bp, Zea Mays
gcaaacccggtttcacactagttctgtattcgtgtcctctggtctctcgcaggccaaacaaaagcgctgccgccgccggcaatgttccgccgcctcctcccccaccgtcgctacatctccacctcgcccgcctccaactccaccccgaccctctactctgacggaaccatcccattctctatcctctcgtggggccgtggcgcttccggacagctcggcggtggcaaggaggagcgccgcctctacccatcccccgtcgcccacctacttctccccgaatcagacccacgccttgctcccacccccggacgccttccctctgcagaggatacgtctggagtggaggttgggatctcttgtgggctcttccactcctcgctcctcgtcgaaggaggcgcctgggtgtggggcaagggcgacggaggccgcctcggcctcggtgacgagtcttccgccttcgtgccccactctaaccccaatctccgcgatctccgcctccttgcgcttggcggcatccactccgccgcgctgaccacttccggtgacgtcttcacctggggttatggtggatttggagctctgggtcaccatgtataccatagggagcttttgccaaggcaagtgaatggcccttgggaagggaagataacacacatttctactagtggagcgcatactgcagcaatcactgactcaggtgaactttacacttggggtcgtgatgaaggtgatggtaggctggggcttgggagtggaggtggtccaggtgaagctggctccctcagcgttccttccaaggtgaatgcactgcctgttccagttgctgctgtagcttgtggtggcttcttcacaatggctcttacttcagatggacagttatggagttggggagcaaattcaaacttcgaactgggtagaggaagcaatttcagtgattggaggccacagcttgtccctagtctgaaaagcacccgtgtaatccaagtagcatgtggtggatatcattctttagctttgactgatgaaggcaaagttctctcttgggggcatggtgggcatggtcaacttgggcatcccacccttcaaaatcatagagtcccacttgccatcaaagctttatcagatgagcgaattgtccatatagcctgtggaggatcaacctctgctgctatatcagagaaaggtgacttgtacatgtggggaaatgcaagagactgccagctaggcatccctggtctgccagaagttcagccactcccagtcaaggtgattttcctcagagacgatgatgaagggttgggcccttctcgtgtcatctccgttgcaataggagcctcccatgccatgtgcttggtctccacgcaacaaaccgagaagtagggcagtctgggtttctgctttgtgaaggcacttatgtttcggtattcatacgtctgagtcagttcgaagcggaccctgttctcttttgatttgatccagctgttcctgttggtggaaactggaatccctgctcggttaagctgaacacatctggaagaaagaataaaaaaactgccacacgctgatagaaagcaggaaaggccccctgtggctggctccgggtaggcatagctgtagtagattcgaatccttgaatttcatctgtggaagttcttatgagtgtagacattgttcttgctttttctgtagcactgtaatacgagggacgaaactgcgagaagcgcggatgtaagacatgcgcccttgtgcgttctcaccaaagatttgtagattctgtctgtagttgagatggctagaattttgtagcgctaattttattgtgactctgtcaggaggcctggcctgattttagttgctgttcaataaaggcaaccgttggtgttttattcctt

SEQ ID NO: 144254 - DNA, 417 bp, Zea Mays
atggataggctattcctagttccaaagacaagaagtctcactaccaagaactccataaatattgagacgttcgccgcagatctaatatctagggtagagcaagcatcagctcaaatcctcaaaaccatgtacgacaacgagaagtcgcagggtcagagtctgggtgatggggatacacatgcatacctcgagctctgcggacttcatagcgatggggatgcagatgaggaagacgccgaacatggcgatggcggtgttacggcgccagtggacggggcggcagtacgggccgcccgtcatgctccataccttctggcggaagtcgccgccggcgtgcccaccgccatggtcaccgcccatcgccgccgcagccttcgattcgatcagatcgggggtgaggttcgatgcggggggtga

SEQ ID NO: 144255 - DNA, 827 bp, Zea Mays
gaatcaagcttcaacattaagtgtgcagacgacatgccatgtttacaattacatgatcaaaaccctcgagtaaattcatcacaggcttttgtatcaccggtcattatttgagttcatcaggcatttcacatgtaacacgaaggaaagaagaatcaaaagatactacgcgaagcattccagagatgctcctaacacttaacccagcattatggctaggcacaggtttccacaaaaagaaggcaaaagcaaggtgcccgcacttcatgctagttggagggtccttcagtattccttcttaccaaagtttttgcaccacagttgagatgggattggccggactgggtgatgcgggcgttgctgcataaaagtatcatattacattcgttagcactgtgatttccccagtctattttacaaacaaaacgatgaacacattgagtcagtatgcctgtcttttagcaacatggctccagcctgaaaaaaagggccaagctctggtacctgaaccatataacacaaatagcagttccttattgtattatgtacgtacacgttctcagtcaagcagatattcagtttagcatgtactcatagctcacttacatagaactaataatatgaagttttcagattgttctagatgtgaatgtagcacatttctcacattgaaaaaggaaacaatttgctcaaatgcagcacactttcagagactctactcggtttatcacgctctcacaggtgcacagcatgccattcaaaacatcagtggcaaagcagacataggtgcagtttccaacacatcaaacaatggcaaaccaaatgctcca

SEQ ID NO: 144256 - DNA, 233 bp, Zea Mays
gtacgcttaacacgactcatgaatatggttggacgcatgcgtgagcgcgtctgtctgcagcctgctgctgcatctgcatgaaccgagtttatatctctggagaaagcagcgcagcgccaagtctatggcagcccaacaggcaacagcaccatatgcatgtcagcatgtcgccactcgccatggcatcccaacaggcaacagcaccatagatccttggtgcggcgctctgcctc

SEQ ID NO: 144257 - DNA, 3101 bp, Zea Mays
cccctccgccttcggccgtggccatggccgccgccgccactttcggcttcctccaccctctaatccggaaacctttagttccaccactgtacatcctcccgcttcccacccaaccccacgccaaaacgcaccctcgctctctccccctcctcttcctcctcccgcgccgccgccggggaggccccatcgctgccttacccaacaccacatcttcgtccacgaatgcctctgcctcgcccacctacgacgtccgggaggcagaggccgccgtcgcggatctcctccgcgagggcggcgcctccgcggacgacgccgccgccatcgccgcgcgcgcgccggcctacgccgctatgctcgccgatggcgtccgcgagctggacgagcttggcctctgggcgtcgtggagctccggtgccagtgctcggctgggcctcagcggtgtcgtcgagatggagatggggaggctcggttttaggaggaaggtgtatctcatgggacggagcaggcctgaccacgacgtggtgccgctcctcgagagcttgggagtgcgtctctcctcggccaagctcatcgcgccttacgtcgcttctgcgggccttactgtgctgattgatagggttaagtttttgaaggaaatgttattttcaagcagtgattatgcaatactaattggaaggaatgctaagcgcatgatgacatacttatcaatacctgcagatgatgcactccaaagtactttatctttttttgaaaaaatggaggctagatatggcggtgttagcatgttgggacatggagacatgtcatttccttacctcattgaatcatttccaatgcttcttctctgctcagaagataatcatctcgagccgttagttgattttctcgagcacattggaattccaaagccaaagattgcatcagttttgctgctatttcctcctatcattctttctgatgttgaaaatgatattaagcctagaattcgtgaatgggagaaggctggcattgaacacgactatattactaggatgttgttgaagtatccatggattctttcaacgagtgtgatagagaactacagtaaaatgttgttgtttttcaaccaaaaagggatttccagtacagtcctcgctattgctgtgaaaagttggccacatattcttggctcctcttcaaaaagaatgaattcagttttggagctgtttcgtgttctgggcatcagtaaaaaaatggtggttccagtcattacatcaagtccacagttattactgagaaaacctgatcagtttatgcagaatgttttgttttttagagaaatgggtgttgataagaaaacaacaggaaaaattttgtgtcgttcgcctgaaatatttgcttcaaatgtggataacactctcaagaagaaaattgactttcttatcaactttggtgtttctaaacaccatcttcctcgcatcattaggaagtatccagaacttctattgttggacctaaattgtacattgctccctaggattaactacttattggagatgggtttgtctaagaaagatctgtgctcaatgatctctaggttttccccacttctaggttacagtatagaacttgttatgaaaccaaagcttgagtttctgctaagaaccatgaagaaaccacttaaagcagttgtagaatacccaaggtacttcagttattcacttgaggggaagatcaaaccgcgtttttggctattgcagagtagaaacatagactgcactctgacagagatgttagcaaagaacgatgaactctttgctgaagagtacttggaacttggaggattgctcgagaaacctgtacaatcaagcataggtggttaatttctggacttatttgaaccatgcagtgcactatgctgaagctgttcagctttatgcttggattggtgaggctgtttttcagatgggaggccacttttttttcctgaaaacgaaggagagctgtgtttctttgtattcaaatgtcgtggctctgataaccactcttttctggaccgataaatggctgcttggttcctgtatcggagatgtggcgccagctgttcttgctatggtaccagcaaaaataattaaaacaagggctgtggctgacgcactctcaaacaacagttaggtatcaaatattaatggaggactgtccatgattggtctgttcaattttttcagctatgggatgccacacatgaagtttctttaaccattgatgatggtcgccatatctggagattctctggttcggttgaattctcggcgatatcggcctatagagtttcttccatggtttggtctcctttgatccttggaagcgtatttcaaaaacttgggctccacctaagtgcaagattttcatttggctagctgtccgaaatcgctgttggactgcagaccgattgccttggagaggactggcacacctagttcattacgttctttgcgacctggaagaggagaatattaatcacattttgttttcctgtgttttctcgagggttctggtttagagttttctcccggctggggtatatttattgaccatgtgttggggtcccaggagcaatcgtttgcagattggtggtgaaaggcttgcaaatatctcccaaaagaaagaaaaaaggaagggcatggattcaatgattatgttgcgaatatgtggagtgttctgcatgctctcgaagatgaacaacatctctggtgtcttgctgtaagagttttgttcttgtccggagtgcaagcacagcccctcacggctctgtccggagcgagggtaaagtttgtacgggaggccacttttccggtgcttagtatcaaaaaggtaatacttgttctcatgaaagtcacctaacggaagttacaggtgcaaatttagattgatgagtgatgttgttaactcaatacagcaatgcattgggtattgggaaggtgatgaagaaattagttttcgccatacgcctcagttttactaatgcttcgtttagatgtcgatattggaggtcatgtaattgaatttgtttgaataccaaattaatcatagtatagtattgaaatgagatgtaattccaa

SEQ ID NO: 144258 - DNA, 867 bp, Zea Mays
ctcgctcctctggccttccctccagctcgttccgacgttcccctccgccttcggccgtggccatggccgccgccgccactttcggcttcctccaccctctaatccggaaacctttagttccaccactgtacatcctcccgcttcccacccaaccccacgccaaaacgcaccctcgctctctccccctcctcttcctcctcccgcgccgccgccggggaggccccatcgctgccttacccaacaccacatcttcgtccacgaatgcctctgcctcgcccacctacgacgtccgggaggcagaggccgccgtcgcggatctcctccgcgagggcggcgcctccgcggacgacgccgccgccatcgccgcgcgcgcgccggcctacgccgctatgctcgccgatggcgtccgcgagctggacgagcttggcctctgggcgtcgtggagctccggtgccagtgctcggctgggcctcagcggtgtcgtcgagatggagatggggaggctcggttttaggaggaaggtgtatctcatgggacggagcaggcctgaccacgacgtggtgccgctcctcgagagcttgggagtgcgtctctcctcggccaagctcatcgcgccttacgtcgcttctgcgggccttactgtgctgattgatagggtcagagatgctcaacttgcttacataacatgcgtagatcgaaaatacactatacgtttacgtgccgtacaagggagtttcagtatttatttatttttaattgatgcattggttcctctgttgaaattcaaacttctattgcaatcgtttgcaaaattgttaaccaagatcaagtggtttcttaagaaatttcaaggttgacaaaagttta

SEQ ID NO: 144259 - DNA, 1779 bp, Zea Mays
ggaaccctataggcggagcagaagtgagcctccacctccacccgccgccgccatggctctccgtcgtgtcaccccgcagaggagacccgttctccccctcccccgtgccttcttctcctcgtgccccccgttcactccgcccccgtccccggcgaacgaccccgacgacgaccattccccgtcctcctctccgccccccaaccccggcgcgccgcggaatccgtcatcctcgcttttccaggacatcaaggatcgcctccgcttgtctcccacgtcgtcccctccgcgccggaatccatcgaacttgctccgtcccaaccccgcgcgtggtcctccttcgaaaccgtcccttgaagaggttcgccggatgctcgatgacttccgcccaaccgtcggcgcgccctccccctccgcacccggagtcgccccctcctttttggacataatcaagaggagcagcgtcgcccagggtgccaacgctgggcagggggtgaccggcttcgattccgtccgagagagtctcaagcgctccccgctgcggacaccgcatcctccgtcgacgccgtttctgactctttcgcagagcaacatcttcagcccggagttacagaggaagtttaaggctgtagatgcgcggaaggatgggaaggaatctaacgtggcgctttcgaggctctacagctacgaagagcttgggaagaagctaggcgagctccggccagcggttggggccaaagacggtaaggagtggttctctcttaaggagctgcaggggcggatcgccaagctggcggagttggagaagcaggaaaaccagttgtcagggtctctctgggaaatcaagaattgcattgggaacctgaatcataaaccagaaaacgccactcagcgggtaaacattcatgcactgctgaaccttcgcggtcagccgacgccagactacatgagtcagcctccgcaggaggagttgttagagaagtacttccatccagatcatatgtcatccgaagagacgatgaaattggagctccaaagggtgagggatgagttcaagatgtccgagaatgactgtgggtctgcacgagttcaaattgcacaactgactctgaaaatcaagcatctgtcagctgttctacacaagaaggataaacattctagaaaggggcttcaggagatggtccaaaagagaaagaaatacatgaaatacttgcgaagaaccgactgggactcgtactgttttgttctatcaaagctggggctacgcgatgtgcccgagtacaaagctcctgattacaagagcaaagcaaccactaaggccaaatctaagaagagcaagagcaagaggagaaagatgaaggcataggagcggtgaacaaacacaccctttttggtcttgaattgcatggctaggaaatgattcgagaagatggatccatccaatcttacagttttttttttgactcgaagctgtttgtaataaccatctctttggaggccacggtttttccttgttctgcttggagcggcaaccttcctgtaagttttgtaacaactgatttattatattatttgcttttgagttctcccgctcgatatgccttattatgagggaagggaggaacagatacgacgatatgataccattacgtcatcatcagtttgtagctttgccagttttttttgtttgacgtaattttccagaattcttgtataagaatgcttgaacaatcttgctagctagcctagcgaaacaatcaagtagaaattcttctattttct

SEQ ID NO: 144260 - DNA, 1127 bp, Zea Mays
ttatatgaaattcttggattattggttagtgcgcacaaagtacactacacagtatacagcatgagggacaccgcacgtatactgacacgggctgtgcatgcaggtgcagtatagagtagagaagggagatggagtgatcagctagctgtgcggtatcggcgaggtgcctccgcggcggcgcgtgtccggtggcggatccacgaagccgtagtcttgtcccgccgccgccgcagcagcagcgccgagcagcagctggtcgccggcggcaagtcccttctcctcctgcgagggtgctgcggtgttcacctgcagggaggagtccgcgccaagcaccggcgacggcgaggacgacggcggacgcggctgttgccgtccatgacgcgctgcgagtccggcggcggcggcgccgccgccgcagctggccgtgcacacgccaaccgcgagaagcagcgccaccgccaggcaggcgcccgacgttgctgccgccgccgcgagcagcagccgcgacgacgacgacgaccgcatataatatggaagaaggttatgagtacacgggcggctcgatcgccgtcgtatgctcatatagagtagactgcgcgtgcggcattcgggcatccggccggccagcaggccaggagcaagcgatgctggcagctggttggctggctgtgtcagtggtacggcgcccgagatggggggagagagagatgagacggcgggcgactgtggccgggttcggttggcgtcacggaaatggcgtggcacttctaatcaagccgcgctgccgaaacaggaggcaaagccgaccagcgtgcggcgagatgccgttacctggcccccagcaaatccggccggtgctccaccccacctggctgcaaagggcaaagcaaacccaggcgcgcgccggagcaggagccggacttacgacacgacgatgcgtgccgcgcgctcttccatcgcgctcacctctgtgcttatctcatatactgtactccccaagcgtgcgacccacgcgtaggagagtatatattggctacctagctgtccatggtttgtttccgttacgttgtgtgccaaattcagttatgttccccaaaccgagtagtaagtagtttacatatggatcc

SEQ ID NO: 144261 - DNA, 1432 bp, Zea Mays
ccttataaccaatgtggtttgattcctttgggcaataaagttaggtattattttattattattagagaagatgtagatatagatagatagagttagagatatagatatagatatagttttttaatcatacaacaacaaagattaaccaacggaaacttgtgaaaaaaaacataatagaaaactctctaaataaactgctataccagtaccgttcaccactcactcctggtatagcttgatggcgaggcaaccacacctaagattttatcggtcgcctactccactgtgtcattgaaaaatactcctaagtgtatttaataagatatactataaaataaacacggtacgcgttaggcagcacgtaccgtcacacttggctctcgatctcaaacttgaagaaattgtcaggtgcagtatagagtagagaagggagatggagtgatcagctagctgtgcggtatcggcgaggtgcctccgcggcggcgcgtgtccggtggcggatccacgaagccgtagtcttgtcccgccgccgccgcagcagcagcgccgagcagcagctggtcgccggcggcaagtcccttctcctcctgcgagggtgctgcggtgttcacctgcagggaggagtccgcgccaagcaccggcgacggcgaggacgacggcggacgcggctgttgccgtccatgacgcgctgcgagtccggcggcggcggcgccgccgccgcagctggccgtgcacacgccaaccgcgagaagcagcgccaccgccaggcaggcgcccgacgttgctgccgccgccgcgagcagcagccgcgacgacgacgacgaccgcatataatatggaagaaggttatgagtacacgggcggctcgatcgccgtcgtatgctcatatagagtagactgcgcgtgcggcattcgggcatccggccggccagcaggccaggagcaagcgatgctggcagctggttggctggctgtgtcagtggtacggcgcccgagatggggggagagagagatgagacggcgggcgactgtggccgggttcggttggcgtcacggaaatggcgtggcacttctaatcaagccgcgctgccgaaacaggaggcaaagccgaccagcgtgcggcgagatgccgttacctggcccccagcaaatccggccggtgctccaccccacctggctgcaaagggcaaagcaaacccaggcgcgcgccggagcaggagccggacttacgacacgacgatgcgtgccgcgcgctcttccatcgcgctcacctctgtgcttatctcatatactgtactccccaagcgtgcgacccacgcgtaggagagtatatattggctacctagctgtccatggtttgtttccgttacgttgtgtgccaaattcagttatgttccccaaaccgagtagtaagtagtttacatatggatcc

SEQ ID NO: 144262 - DNA, 1797 bp, Zea Mays
taaacgtgtatttcgacttgtatgcctggcttttgtgtggttgatgttacatctatcaagataacaaatatttattcctgtatttaatttagaaataatttgctataagagttcattcaatatcaacgaaatacactgattttgattatggagatttacgagttacctacccatgctgatggttttgctacttctgtcaactagctttggaacttgttgaacatcttagagcagtgggggaaacaaatgctctctttcaaagaaatcctgagcttcacagtgctcgatcttcatttgagcaagcctgtttcaacctggatggtgaacagttgtatgggatctgtgaagcaattgatgaagaaaaggatccagagtgcttgatgctttcttttcatgtagtggaagttgtcatggagctgtttccagatccatctggtttggcagcacagttcacaggggacgtttttgagattctgagcaagtattttcctgtctacttcacacacggagtgggtaatggtttggacactacacaggaagacctctctatagcattgatggtatggatgtcctatttcacttgatttatttatgctttcaagtttcgatttccttttttatgattccaactaaagatttggacaaatgcattcgcttctatggagctgatagaatggttagacatgcatcaactgtttggtacaagttgaaagaagtgatttttaacctttctttagatcaattattaatatcagaggctctgaattgtttgaagactgctattatgtatactgattcttctgataaagatcttttcattaatttgatcttgttggatgaggatattgtgaacaagatccactctgtatcaagcgtggaaaagaccatattgagttcattagaggacctgtcccaactgcatgcacttggaagtgttatttctatccttgctgaatcgtctacatatttctgtactagagttcttcaagagcactttgcacacttggtagatattgtgggaaccaaagctgactatgaatcctggcagttgaataattgtaatggatcatcttctgctcctgtcaactatggagcactctatttatctgttcaattgctttcatcctgtagagaagtggctttggtatcttatgaagatttttcttctgttaaattagcaaagggttcctggtggcttatcttgcagaaaaagctggagcagttaatccatctctttcgatccatttttactatagcttctcaatctatgcagccaaatttcagacaagaatatgtctcttgtgctatgaagggcttgctaacactagcaacattcccggaacaatatattaatcaggttcttgcttatgcacaacaatcaagagaaagggcaaacaaggaacaagcttctcttgtcgagaggatgcatgagtacaaaaggcagatagaccgtgagactcggtcttctataaatggtttgaatgattcttataatggtgatggaatacagactattggcagaagttcacataaacagatcgaggcagttatgcagtcaacttcaaaaggcaaggttcagaccattcgtcaaggttatctttcgaaaagatcttcaaacttgagagccgactggaaaagaaggttctttgtacttgatagtcgaggaatgttgtactactatcggaaacaaattactaggccacctgtaggtctctgttgtaacattcgctgttgaaatgctcattaaattggcacaatattttgttccatgatgcatgatatatatatatttattta

SEQ ID NO: 144263 - DNA, 792 bp, Zea Mays
aatttcagcacatttatggtaaaaaaaaaaacaatttcagcacatgcatcactaattgatggactagggtagtttcattttggctgttggcttctcttgcaactttatggtagtctgattaataaggttacagttttaggttatcttcctttaacaagtttattctcttatactaacgacatcttgtccactatagacatgatttcctgattactgaaggggcagtatataatataaagattgcagaatttgttgcttttgtatttgctctgtcctgtttccggactgtttcattcttcgcacataacttcttgtatttaatgtgttgttttattattatttctcagtatggtatggctggtgggcatccacataggagccatccccaaatgctgactgaccaaatgttcggtatgggagccacaaatagcagcatgatgggaatgcagcagcagcagcaagggctatacgggaacatgcaggcaggtgcacagaacgtgccacagggtatggcgggccttcagaaccagacccagaatcccaacttcactcagcagaggcaacaaaaccaacaatgatttaacactaacgttcacggaggttgaaagatgagcaatatatccgtcgttttgctgcttgtctgttggtctttactcagcttatctgtgagactgatagtagccccaggttagccttcgttttgctgtaaatcattagcgagatgcaggtcaattataattatatacgttgtaactgtgtttcggatatgtctaatatgttttgttggaatcg

SEQ ID NO: 144264 - DNA, 1708 bp, Zea Mays
acatcctccattagtccgcctccggccaccccctttcattccgccgcaacgccaccgcccccaacgcaagtttccggcgatggaccccgcggcggccgcgctaggtgcagtacccgccgctggcgcgccacctccgggcgcagccgcaggggaccagcaggcagctccccgggttgagcggctcagcgcgggggtgcagcagcagttgaacctggaggggatgcgcgcgcgcgcggtggggctgtacaaggccatctcccgcatcctcgaggactttgacgtcatcatacgcaccaatcccagcgcctcccccaagtggcaggacgtgctcgggcagttctcgatggtgagcatggagctcttcaacattgtggaggacattaagaatgtgtccaaggtgtttgtcgtgtacccccggaatgtcaatgccgagaatgcaacaatactacctgtaatgctgtcgtcaaaactgctgcctgagatggaagttgaggaaactactaagagagagcaactattgtctggaataactaatctacctgtgcctacacagattgaaaaattaaaggttagaatagacatgattgggagtgcatgcgaaactgctgagaaagtaattgcagaatgccgtaagagctatgggctgggaagccgtcaggggacaaatcttggtcctacattggacaaagcacaagctgcaaagatacaggagcaggaaggcctacttagagcagcagtaaattatggtgaaggattacgggtacctggagatcagaggcatccacaatctcttcctatccatctgatagaagtgcttcctttaggagacggtgcacaaaattttggtgatagttctggtagttatcccaaaaatatgtcaacatttgcacctaatagtgtcaacagccagggaaatcagattcaggcatccggaggacagttacttggaaggcctgcgccatcacctggaaccacaggaacccctaatttcgagaatgtgtccactcctccaatgccatatgctaactctcctaggtcaggcaccaatatgatgaataccccttccccccagcaacatctaacaccacaacaacagaggcaaaaactgatgcaacattctcaaccgcttcaccagccggtgaggccatcagctgctgggatgctagcacagagcgcacttcctcaactacaagatttacaggggcaggctcaacaaaaactacaggtccctggtcaacagcaaatgcaatacaaccaagcattgtcacaacagtttcataacagacagatgcaacctggacgtatgcaaccaggcatggctcagagtcaattgaatcaaggaactcagctacgaagtcatttaggccagtttactggagctgcaaataatgcgatgttcaatgctgcacaggcatcatcaaactcacaaatgatggcaaatatgcatggatcacagtcgcttatgccacaaatgcagtatggtatggctggtgggcatccacataggagccatccccaaatgctgactgaccaaatgttcggtatgggagccacaaatagcagcatgatgggaatgcagcagcagcagcaagggctatacgggaacatgcaggcaggtgcacagaacgtgccacagggtatggcgggccttcagaaccagacccagaatcccaacttcactcagcagaggcaacaaaaccaacaatga

SEQ ID NO: 144265 - DNA, 907 bp, Zea Mays
ttagttattgcatgaattatatatagaggccagctatatatacacatacgtattctagtcagagctcaaagcaccagctgctgatccaagagaaggctacccgctagctagcaaattctaacacgacttgcgccggatcggcctgagaatgagatgaattggacggacgtacgcgcgccagatatatgctgcatgcaccaactaatcaacaagctaagcatgcaaagcatctgctcagagcttgagcgacaagtcgatctcctccccgctctggccatggccgtggccgaggccgaggcggccgcagccaccatcagcggcggccgcagtgtctgcaccccagcccatcgcgaagcccggtggcgccgcctgctgcgccatggcgtcctcctccctcgcgagcctcgtggcgccgtagtacgcggtcggcacgagcccgctccttctgttgctttccggcgcggcagcatggaaggctacggccggggccggtggtggcggggacgacggtggaggcgcggcgaggatgtcccggctgcgcttggcgagggtgcgctcgagcttgtgcgcgttctggtgtccgcccagcgcctgcgagctgcagaacttgcggtggcagtagttgcaggcgaaggcctcccccgggcggtggtcggcagcgaagggcggcgcgggcacgggcaccgcggcggagcgatggagcggagatgggtccaggcgcaggtcgaggctgacgccatgagcgtgtgacgtcggcgcgttctccatcgatcgaagggggaaaaaatcgaacctttttttgttgttgtttcacgagtgcgagaagaagtgacgaggccacgagggaggagagagcgtgtgtttgcagggtagggtagaagccaagccaaggcccaagagggcgact

SEQ ID NO: 144266 - DNA, 1941 bp, Zea Mays
ctcttgacaaaattatgccccgtccgattgccgagcggcgctgttggtgatagtcgtttcattccccaatctagctctagtagcagtggcatgagggcggggcggccgaagatcggcgaccaagcgaccagcgacgtggtagtgcggctacggacgccggagggccgcgacgagtggctctactgccactccgcggtcctcgccgccggcagcacctacttcgccgaccgcctctccgacgcctggccgacgtgccagatcctcggctcgcgctactgcgtcgaggtctactgccaggagctggacctgagctcctatgtcacagcgctccggctcctatacgccatcgagccctgctcgcatttcggcgtccgcggcgcgctgggcgtgctccaggcggccgtgcaccttggatgcgggcagatcgccgccgcctgcgccggctacattgagtccgccccctgggaggaggccgacgaggaggagattctgaggaccgtccccggcctcggcccgcagtacgagtgcatcctcgcgcgtctccggccaatcgatccggctccggtgacgagcatattcctttcggcgttccggcacgcgacgctctcgtcggcggctgggccagcgcgggagctcaagtccgccgctcaggagcagctggagtacatgctcaccgaagatgacgacgccccattggtagcccttgacaacgacactgtgaagtctcaagtgaaggattgtgccactgctttactaagccagttcagtgctttcatgagctctatcctgacgaaacaaaaggaggcgcctcctcttgatggtgagcacggccagcttcagcaggagttacagttttttctttgtgatatctcttgggtctctcaggtcctgagcaagctcgagatgatgaagtgcattgttgtctactgggtcggagtgtccactgatatggtagaaactgttgacgcggtatgcactggggatgactgtctgaagaccaggctgaaggtggtagaggtgtctgcaaaagtcctggaggctgttgcatttggcaatgtcatccttccagccgaaaaacgccgtcatatggtgaatttatggattcgattcgcaagggtgacaaaatctttggctgatcaggccgatcaggatggtgacggcgaagctgagacaccaaaggaaaacctggacaatgaggtctggcagggcctggagtctgcaattgtttcgattgtgctgacactgccgtcaaatagtcaagctgagattttgtcagagtggcttcagtcgaaacatgttagatatcctgacctgacagaggcatttgaagcctggtgttatagatcgaaggttgctaaaagaaggctctctttcttgagcgacattggccaggtatcttgattcctgaccaattaacaattaaccgaagcggacatgagatatctgaattgaacaagtttgcatgctttctgctggggaaaatcatcaggttctgtgatcaccagcataaattttggaatttggaggcagtgcagaaaagggctcttgccaatattcgtatccatgacatgaatcctgataacaagtagccgaagcggggagggcctgttcggttgtttgggattggagccccgaattaattcctagccgaattacttatctaatttatatagattttaataagctggaatgaatcctggcttattccggtacaaccgaacgggcccttagtaaattacccagagtttgtctctatagattgcagactaactttaatctgaagcgaaacggcctgtgattaatagggtgtcatttcttgcttgtggaaaagaagtttgtaatgagtgatcagttaacattgtctttgagaaaagactcaagggatgcgacatattcacttaccgaatgtaaatcatgattcatgagcagttgacatgcatc

SEQ ID NO: 144267 - DNA, 2082 bp, Zea Mays
atggcgacgccgacgcctgaggaacaatttaagcccgattggttgtcgaagatatgggcccttcagctccgtccaacgtgcatcgagattcgtgatcctgaaacttgtggtatttggtttcgcttctctggcctccgtcctgctcgcctgccccatccgccgcgccgcgagccgcctctccttcctcggcgtgttcctggcttgcctttgccgcgctctagtagcagtggcatgagggcggggcggccgaagatcggcgaccaagcgaccagcgacgtggtagtgcggctacggacgccggagggccgcgacgagtggctctactgccactccgcggtcctcgccgccggcagcacctacttcgccgaccgcctctccgacgcctggccgacgtgccagatcctcggctcgcgctactgcgtcgaggtctactgccaggagctggacctgagctcctatgtcacagcgctccggctcctatacgccatcgagccctgctcgcatttcggcgtccgcggcgcgctgggcgtgctccaggcggccgtgcaccttggatgcgggcagatcgccgccgcctgcgccggctacattgagtccgccccctgggaggaggccgacgaggaggagattctgaggaccgtccccggcctcggcccgcagtacgagtgcatcctcgcgcgtctccggccaatcgatccggctccggtgacgagcatattcctttcggcgttccggcacgcgacgctctcgtcggcggctgggccagcgcgggagctcaagtccgccgctcaggagcagctggagtacatgctcaccgaagatgacgacgccccattggtagcccttgacaacgacactgtgaagtctcaagtgaaggattgtgccactgctttactaagccagttcagtgctttcatgagctctatcctgacgaaacaaaaggaggcgcctcctcttgatggtgagcacggccagcttcagcaggagttacagttttttctttgtgatatctcttgggtctctcaggtcctgagcaagctcgagatgatgaagtgcattgttgtctactgggtcggagtgtccactgatatggtagaaactgttgacgcggtatgcactggggatgactgtctgaagaccaggctgaaggtggtagaggtgtctgcaaaagtcctggaggctgttgcatttggcaatgtcatccttccagccgaaaaacgccgtcatatggtgaatttatggattcgattcgcaagggtgacaaaatctttggctgatcaggccgatcaggatggtgacggcgaagctgagacaccaaaggaaaacctggacaatgaggtctggcagggcctggagtctgcaattgtttcgattgtgctgacactgccgtcaaatagtcaagctgagattttgtcagagtggcttcagtcgaaacatgttagatatcctgacctgacagaggcatttgaagcctggtgttatagatcgaaggttgctaaaagaaggctctctttcttgagcgacattggccaggtatcttgattcctgaccaattaacaattaaccgaagcggacatgagatatctgaattgaacaagtttgcatgctttctgctggggaaaatcatcaggttctgtgatcaccagcataaattttggaatttggaggcagtgcagaaaagggctcttgccaatattcgtatccatgacatgaatcctgataacaagtagccgaagcggggagggcctgttcggttgtttgggattggagccccgaattaattcctagccgaattacttatctaatttatatagattttaataagctggaatgaatcctggcttattccggtacaaccgaacgggcccttagtaaattacccagagtttgtctctatagattgcagactaactttaatctgaagcgaaacggcctgtgattaatagggtgtcatttcttgcttgtggaaaagaagtttgtaatgagtgatcagttaacattgtctttgagaaaagactcaagggatgcgacatattcacttaccgaatgtaaatcatgattcatgagcagttgacatgcatc

SEQ ID NO: 144268 - DNA, 2527 bp, Zea Mays
gatctttcccgacgagagacaaaatcaatctaagtcattgtatcaaactacacgggctgacagatttggcgcaaatagaatagatctgaagaatcctgagaagcttaaggtgttaaatgaaagcaacaaaccctggcaccagcgtattctagaccctggaagtaatattgtactgagatggaacagggtgtaccttgtggcatgtttgtttgctctttttatagatccttttttctattaccttccattgattagacaaaatggcaatggatcttcatgtgttgccaaggaccagggactgagcataagaatcactgtcctacgatcacttgctgacttattttacatgttgaacatagcaatcaagtttcatactgcatatgtggatccaaagtccagagtccttggaaagggagagcttgttgtggatattaagaagattcaacgaagatatataagaactgatttctttgtagacatacttgcagctgtgccacttccacagatgcatattattttgactaaattgattgatttgcgtctatgtggcggtaagattctcatggtaagcctttgggttgagtccatgtcattattttccttaatataagtaagtcatccgaccttcctggtgatgttgctatttcctatcctaggaaattgtaggcagtaaacgtacaattgcgacaaccacattgtgacttaaggttactgtgtggttaattatgcctgcgataaaaagctcagattataacatccggaacactacatttgctctcgtaattgtaattcagtatgtcataagaatgtatctcatcatccctttaagcaatcagattatcaaagctgttggagtagttgcaaagtcagcttgggggggagcagcatacaatcttcttctctacatgcttgcaagccatattactggtgcaatatattaccttctctccatcgaacggcagattacatgctgggatcagcagtgcgttgctgagtacaatgatacacattgcaactttagttttataagctgtgagaataatggttctaatgattattctgtgtgggcaaataagacaaaagtatttgccaactgtgatgccacgaatagtagtatatcatttaactacgggatgttttctagtgcactgagtaaaggtgctgtatcatctccattccttgagaagtatttcttttgcctatggtggggcttgctgcagcttagttcaagcggaaatcctctcgtgacaagtgcatttatcacagagaatgcatttgcgatagcaattggtgctatcagtctcatactctttgctcagttgattggcaaaatgcagacatacctgcagtctatcagtaaaaggcttgaagagtggaggctgaggcaaagggacatggatgagtggatgagacaccatcaactcccatctcatcttcaagaacgtgtgcggcggttcgttcaagtcaaatggcttgctacaagaggagtagaagaagaatccatcttgcaagctttgcctgctgatattcgtcgggatgtgcagcgtcatctttgtttggacctcgttagacgtgtaccttttttctctgagatggataaccaacttctcgatgccatctgtgagcggctggtgtctttcctgtgccctgagaacacgtacatctctcgcgagggtgatcctgtgaacgagatgctcttcattatacgcgggaaactagagagctcaacgacaaatggtggccgcagcaacttcttcaactccatcatcctgcgccccggcgatttcgcaggcgaggagctgctcacgtgggccctgctccccaagaccaacgtccacttcccgctctcgacaaggaccgtacggagccacacagaggtggaggccttcgctctgcgggctgaggacctgaagttcgtcgcgaaccagttccgtaggctccacagcaagaagctccagcacacgttccggttctactcccaccactggaggacctgggccgcctgcttcatccaggccgcttggcggcagcaccagaggaggaagctggccgagagcctcagccgctgggagtcgtactcgtggtggtcggcggaggaccacccaaccggcgataagccgaggcaggagggcacctcgagcggcggcggcggcacgaggacgatcgctgaaggtgccatcgcccatatgcacaagctcgcctctgcttccagaaggttccgcaccgaggacgtcgctatccgcaggctgcagaagcctgacgagcccgatttctccgcggaccattttgattgaaccttcttaatattgtgcttcgcagctgggagttgcatgttgtacgaacgatcgcagccgtagcatatatactctactgtaattttactgcacagccatcttaggtgtcgtgaattgtaatagaaaaagaagatgtatcgtgtaattctaaatccagaatctaccctgtataggcttaaccttttgtgcagtgcataaacttgagtatttcgaagcgtcatatgtgacttgtt

SEQ ID NO: 144269 - DNA, 2649 bp, Zea Mays
ggcatgtttgggagcaaaggaaatgaaggggattggaggggctaaaatccccttgttatttaaaattgaatagcaagggaattttagcccctccaattctctccatttccattgctcccaaacaagcccttaaacggaaggtagcatgatgaactaatggttttgcctatcgggtgaagatggtccgtggaatcctatgtattattcttctattgttactactttggttcgaaaccacactatttcgacccaaaatcattggtttttgttgtatttatatttcttgcgcttttgctatttttctaactttctgtttatctttaggatctttcccgacgagagacaaaatcaatctaagtcattgtatcaaactacacgggctgacagatttggcgcaaatagaatagatctgaagaatcctgagaagcttaaggtgttaaatgaaagcaacaaaccctggcaccagcgtattctagaccctggaagtaatattgtactgagatggaacagggtgtaccttgtggcatgtttgtttgctctttttatagatccttttttctattaccttccattgattagacaaaatggcaatggatcttcatgtgttgccaaggaccagggactgagcataagaatcactgtcctacgatcacttgctgacttattttacatgttgaacatagcaatcaagtttcatactgcatatgtggatccaaagtccagagtccttggaaagggagagcttgttgtggatattaagaagattcaacgaagatatataagaactgatttctttgtagacatacttgcagctgtgccacttccacaggttactgtgtggttaattatgcctgcgataaaaagctcagattataacatccggaacactacatttgctctcgtaattgtaattcagtatgtcataagaatgtatctcatcatccctttaagcaatcagattatcaaagctgttggagtagttgcaaagtcagcttgggggggagcagcatacaatcttcttctctacatgcttgcaagccatattactggtgcaatatattaccttctctccatcgaacggcagattacatgctgggatcagcagtgcgttgctgagtacaatgatacacattgcaactttagttttataagctgtgagaataatggttctaatgattattctgtgtgggcaaataagacaaaagtatttgccaactgtgatgccacgaatagtagtatatcatttaactacgggatgttttctagtgcactgagtaaaggtgctgtatcatctccattccttgagaagtatttcttttgcctatggtggggcttgctgcagcttagttcaagcggaaatcctctcgtgacaagtgcatttatcacagagaatgcatttgcgatagcaattggtgctatcagtctcatactctttgctcagttgattggcaaaatgcagacatacctgcagtctatcagtaaaaggcttgaagagtggaggctgaggcaaagggacatggatgagtggatgagacaccatcaactcccatctcatcttcaagaacgtgtgcggcggttcgttcaagtcaaatggcttgctacaagaggagtagaagaagaatccatcttgcaagctttgcctgctgatattcgtcgggatgtgcagcgtcatctttgtttggacctcgttagacgtgtaccttttttctctgagatggataaccaacttctcgatgccatctgtgagcggctggtgtctttcctgtgccctgagaacacgtacatctctcgcgagggtgatcctgtgaacgagatgctcttcattatacgcgggaaactagagagctcaacgacaaatggtggccgcagcaacttcttcaactccatcatcctgcgccccggcgatttcgcaggcgaggagctgctcacgtgggccctgctccccaagaccaacgtccacttcccgctctcgacaaggaccgtacggagccacacagaggtggaggccttcgctctgcgggctgaggacctgaagttcgtcgcgaaccagttccgtaggctccacagcaagaagctccagcacacgttccggttctactcccaccactggaggacctgggccgcctgcttcatccaggccgcttggcggcagcaccagaggaggaagctggccgagagcctcagccgctgggagtcgtactcgtggtggtcggcggaggaccacccaaccggcgataagccgaggcaggagggcacctcgagcggcggcggcggcacgaggacgatcgctgaaggtgccatcgcccatatgcacaagctcgcctctgcttccagaaggttccgcaccgaggacgtcgctatccgcaggctgcagaagcctgacgagcccgatttctccgcggaccattttgattgaaccttcttaatattgtgcttcgcagctgggagttgcatgttgtacgaacgatcgcagccgtagcatatatactctactgtaattttactgcacagccatcttaggtgtcgtgaattgtaatagaaaaagaagatgtatcgtgtaattctaaatccagaatctaccctgtataggcttaaccttttgtgcagtgcataaacttgagtatttcgaagcgtcatatgtgacttgtt

SEQ ID NO: 144270 - DNA, 2468 bp, Zea Mays
cggccacgggcagcgcccggtccacggcgcccgcctggctgacgcgcggggcccagggtcccccagctggcgcgcgcggcaggtggcgcgccgggcgcacgcgggcggttgatgcgggaaggaagaggacgaggacgaggacgacggacggaccggggccccccgccgggccagccagccccagccagcctcctctcggttccggtgatccggtctcccactttccgcggctcccctccccacctcgtgctccctcctcccctttctttcgccccgcgggccgattcctactcatcagccgcggcgggagaagacaagcgcctttctccccggaattccgcgcccaccaccaccaccaccacctcctccctcccctgtgcatttggcagcgcagatcccgccgctcccgtccagccatcctcttctcccttgctctactaggccttgactgttctcgactccccagtcaccaactcggtttcctcttccacgccgcgttccgttcggccgcttgatccaacacgccagcagctgctgccgcgtaaaacaccgggaaatacctgccttcctttctggtgtaagcaagtttcaactcccgaagtttgctgctttgggtaaatcttttctgacctttcaggtctcagcatcaccaggccccttttactaccaatctttctgtccgatcactgcaattttaagcttcagtcccctttttcggaaaatccagtctctgacaaagctgttcggcggctcatgcaccagtagcttcagctaagatctccccatgccacagactcctcctcctccaggaccgtcagccatggtatagagctatagcgctgctccggccggcctgcctgcctaagctgcggaattcgggccccctccccggcttcccgcgccatggacggcctccccgacgccgacacggcgccggttgcggccgcgccggcgcagaagcgcgacgagtggagcgagagcggcatcctgcgcctgctcgaggcctacgaggccaagtggctgctgcggaaccgcgccaagctcaagtggagcgattgggtcgacatcgcccgcgaggtgtccgtgcattgcgccgacgacgccgcagccgcggggaagccccccggccatggcggcggcagcagcgccaagacccccaaccagtgcaagaacaagatcgagtccatgaagaagcggtaccgggcggaggccgcggcggcggcgcgcgcgggccccgccgccgccggcccgacctggaggttctttgcccgcatggacgggctgctcaaagggccgcccgtctgctctgcccaggtgcagcagcccgagctgactagcagcatagacttgcgagctccggcgaaaccagaggccgaggtagaactagccgattttgccacgcagttgcgggaggcagttccagttccaggtgcattctctgatctgatgaacatcgacacgaatggcgctgtcccggataaagcggagaaggttgacaacagcatgcagaaggagagcaggcctgctgatagcgatgccaacgtgagctccccaaggagtaaggtggccgacgaggacgtggaggaggtggacaaggcctgggaccggcccagcaagagaaagagcacagaattcgatatagccaagagcatcgagctgctggctagctcgttcttgaagattgagcacgccaggatggagatgtacagggagacagaaaggatgagggttgaagctgagattaagaagggggagatggagctcaagagaactgagatcatggcgaaaacgcaccttcagatcgctaggctttttgcaaagaaattgaaacagagcagtggaaagaatggtgtcagttcgtcagtaacagctgaagtggacacccttaccaagaaaggcgagaatggttccgggtgatgtggcatgcccggcagttgattctatcctcagcgtacatggcacctcacttttcctgtgcagcaagtgtaccgagtctgattgagaaatagtcagctgtaaacttacagatgcaataatgggagcgaagatttgactgtttggcccattgcgggattatagaagcgatttttgaatcagtgacttcctaagtctgaaagtttctgccctctgttcgtgtagtaatttactgacaagtgacaaccaccatttgtataagcacatgcccatgctgtgaagaaatgaagcagcaatcaccaatgctgtggtaaaaatgtactccccttcaggcctcgatgaccaggtagaacgacttctgcgtaaacgagccttagatgtaaatatgcgagcgagacttttataggctgtttggtttgaggaatgatctagtccatcgtcttctcactcctcacatttttgtttggtttgtggaatggattgagttgatccaccatcagctcatttcttatagttatttagttagtactaatatgaggaatgaggttattcca

SEQ ID NO: 144271 - DNA, 1618 bp, Zea Mays
aattttaagcttcagtcccctttttcggaaaatccagtctctgacaaagctgttcggcggctcatgcaccagtagcttcagctaagatctccccatgccacagactcctcctcctccaggaccgtcagccatggtatagagctatagcgctgctccggccggcctgcctgcctaagctgcggaattcgggccccctccccggcttcccgcgccatggacggcctccccgacgccgacacggcgccggttgcggccgcgccggcgcagaagcgcgacgagtggagcgagagcggcatcctgcgcctgctcgaggcctacgaggccaagtggctgctgcggaaccgcgccaagctcaagtggagcgattgggtcgacatcgcccgcgaggtgtccgtgcattgcgccgacgacgccgcagccgcggggaagccccccggccatggcggcggcagcagcgccaagacccccaaccagtgcaagaacaagatcgagtccatgaagaagcggtaccgggcggaggccgcggcggcggcgcgcgcgggccccgccgccgccggcccgacctggaggttctttgcccgcatggacgggctgctcaaagggccgcccgtctgctctgcccaggtgcagcagcccgagctgactagcagcatagacttgcgagctccggcgaaaccagaggccgaggtagaactagccgattttgccacgcagttgcgggaggcagttccagttccaggtgcattctctgatctgatgaacatcgacacgaatggcgctgtcccggataaagcggagaaggttgacaacagcatgcagaaggagagcaggcctgctgatagcgatgccaacgtgagctccccaaggagtaaggtggccgacgaggacgtggaggaggtggacaaggcctgggaccggcccagcaagagaaagagcacagaattcgatatagccaagagcatcgagctgctggctagctcgttcttgaagattgagcacgccaggatggagatgtacagggagacagaaaggatgagggttgaagctgagattaagaagggggagatggagctcaagagaactgagatcatggcgaaaacgcaccttcagatcgctaggctttttgcaaagaaattgaaacagagcagtggaaagaatggtgtcagttcgtcagtaacagctgaagtggacacccttaccaagaaaggcgagaatggttagtgtcaaacacaacatcctgataaaaattttatactttcgcaaaaaagtttctaaaacttgttatatggttacaacatgacaaagcaaagttttccctcgagagtacatagctttctctgtgttagagtcccccatttgttaggtctgtacttctgtgcctgttcctgaatatatgaatagaattgggagtctcagcctaaattagctatagcagttctctctatcagaagttgattattatgtaatgtttgtgacaatttgagagtttatgctgtggtagggctgtaacattccaactttgctgctgttctctgcttttcattattctcagctaattcttagaaatgaagtattggtttgttattgtgagtcaagatctttccatagtaaatggaca

SEQ ID NO: 144272 - DNA, 1591 bp, Zea Mays
gctcaattcccgccaaatctgctgaaatccgtggtgccccaacaaaaaaagcgggccacacccacactccgcagcaaaaccatactcgagtcgggctcggggctgacactagcgatataattggtgctgctgccgggctcctgtgtcctgtctcctttcctacgcggctacgccggtccgcccactgactgtacgacagcacttccgccgcagttcacttgctctctgcctcctcttcgctcttctgctcacataaccacggccgtctccccaacgtggtgctcgcaccgcagccgcaatgtcgtggctccttgtcgccgcggtgcttgccggcttcgcgcttggtccctccgccggcacggaccacatcgttggggccaaccatgggtggaaccccaacatcaactactccctctggtccggcaaccagaccttctacgtcggcgacctcatctcgttccggtatcagaaggggacgcataacgtgttcgaggtgaacgagacggggtacgacaattgcaccatggctggggtcgccggcaactggacctccggcaaggacttcatcccactccccgccgcccgccgctactactttgtctgcggcaacggcttctgcctgcaaggcatgaaggtcgccatcactgtccacccgctcccgcacaacgctacctccaagggctccagcagccatgcggacaccggcgcacaggaagaggccgccgcggcggcgctcgggaccaggagcgccgcgtggctggcgacgctcgcagtcgccgcagctgcagtggctgctttctgctaggagccttattccatgcattcactgaacattgttctagtatttttgtttttgctcccatctcattcggatctttcacttttctgcaagcaaatctgcttgagaagctaaactacccttccgacaactcatcaatgcatttcacaaaaaaaccaatttaagcaccaacatgccatgtattacaggttgcgacgactctgaacactagaaagaaggaagcaacaaaccctataagagattgtcgaatagaatcccttttcttatatacaccacctcactatccttttttgtctattatccaccggttagagctccacagcacggtgtgccactcaacgcctacttcggggggtaatctgggccatcgacctcgctgttcacaaaggcaactcaaattctgaaagaataacttgggattttacaacgctgagatttcaaacgctgctagtgtagtagcttcagtcaaaggaaagcttacttgggccgcatcccttctgcagtggtagcagactgctcagcgctagaagtagcaacagctaaagctggtttcttgaattgaaccacaataaccgtcatgttatcacatccttcgccaccagatgtaggtgccacacagcggttgagcaacttctcacacacactagatatcttatcctcctgttaagttattaggcgcatgagggaacaatttaaagtgtaaaggtatcaaacacaacagtgtgctccacttacggtctttagctgtttatgtacaaaatcaactacttcttgacttgacatgcaatccct

SEQ ID NO: 144273 - DNA, 1910 bp, Zea Mays
cacttaatgtttactttttctttatgcatgcaatctttaattctttgttggaaccctttatatatttatctgtacaaataaattctcgtacacatttttttcagacaaaggatgagaaatacttcatacacaaccatttgtcatttacggtgaagtatcacaaggacgataatttggaacattctagaatagtgggatttgaggtcaacccacacagtgtcaagcaccaggttgacgataaatggaatggtgtagacacccgcttgagcacttgtgatcctcatgcgagcaaatttgtaataaactctgattctcctcaggaagttgaagttggcaaggaaatcatattcacatatgatgttcgctttgaggagagtgagatcaagtgggcgtcacgctgggacacctacctgttgatgaccgatgatcagattcactggttttctattgtgaactctctcatgatcgtgcttttcctatcaggcatggttgccatgataatgcttcgcactctctacagagacatttctagatacaatcagcttgaaactcaagaagaagcacaagaggaaacaggctggaagcttgttcatggggatgtgttccgtcctccaacctactctgacttgctctgtgtttatgttggcactggcgtccaattctttggcatgctcgtagttacaatgatctttgctgtgttgggtttcctttctccatcaaaccggggaggactcatgactgcaatgcttctagtctgggttttgatgggtctgcttgctggctactcttcttcccgcctttacaagatgttcaaaggttcagagtggaagaagataaccctgcaaacggctttcctatttccaggggttgcatttgttattttcttcatcttgaatgctcttatatggggggagaagtcatctggtgctgttcctttcaccacaatgtttgccttggtcctcctttggtttggcatctcagtaccccttgtcttcgttgggagttatcttgggttcaagaaacctgccatggaacctccagtcaagacaaacaagattccacgtcagatccctgagcaggcttggtacatgaatccgcttttcaccattctgattggcggtgtccttccatttggagcagttttcattgaactcttcttcatcctcacctccatctggctgcaccagttctactacatatttggcttcctcttccttgtgtttgtgatcctgatcatcacctgcgccgagatcacaatcgtgctctgctatttccagctctgcagtgaggactacatgtggtggtggaggtcttaccttacctcaggatcctccgccctgtatctcttcctgtacgctggtttctacttcttcacgaaactgcagatcactaagctggtgtctggcatcttgtacttcggctacatgcttctcgcctcatatgccttcttcgtgctgactggcacaattggtttctgcgcctgcttctggttcactaggttgatttactcttcagtgaagatcgattaggtgccaagatgacagaacagcacatgtttcaatggagtcaagataattgtatgattaatgtggattggggaattaccccccctcctttttttgaaggttttcaggaaaattttactgtttaggatttagtttacagatggtttatgttttgttattgtcaggttatacactttagtgatttggaactgaaaaatataagggtaaacacattatgatgaggctgtaccttgtgacaaatttttttgtggggctctatataaattaaattcattgtgacaggtatatgcttgtaccggtgaattactgtagggctccaagaccagtatgaaatccaccgtttggatcctggaattgaatagtaaatttagatatagattaatt

SEQ ID NO: 144274 - DNA, 2503 bp, Zea Mays
atcaataaaaaccctagcagatccacccgtcacccgaagcttcctcctcgcagcgcgccgcgcgtcgtcgcctctacccacctgacttcgcgcgccacgccgagcctgcgagccatcagcccatcacccacccaacccctcgccacgcagatctagggagcttgccctcccaccgggcggtgattcttccgtcccatcaccgatgcggacgccggcgatgctccggtgggccgcggcgctcgcggtcctgctcgccgtcgccgcgccggccgccgggttctacctccccggcgttgccccgagcgatttcgcgaagggtgatccgcttccagtgaaggtgaataagttgacatctatcaagactcaactcccgtatacatattattcccttccgttctgcaagccagataccatagtcgacagtgccgaaaatcttggggaggtacttcgtggcgatcgcattgagaactctccttatgtgttcaaaatgggagagcccaagatgtgtcagattgtctgcagagcaccgatcactgagaaagaagccaaggagctcaaggaaaagatagaggacgaataccgagtgaacatgatccttgacaacctcccgctagttgttcctgttacaaggcaagataagaacagtattgcttatcaaggtggatatcatgttggtgccaaaggcctgtattctggaacaaaggatgagaaatacttcatacacaaccatttgtcatttacggtgaagtatcacaaggacgataatttggaacattctagaatagtgggatttgaggtcaacccacacagtgtcaagcaccaggttgacgataaatggaatggtgtagacacccgcttgagcacttgtgatcctcatgcgagcaaatttgtaataaactctgattctcctcaggaagttgaagttggcaaggaaatcatattcacatatgatgttcgctttgaggagagtgagatcaagtgggcgtcacgctgggacacctacctgttgatgaccgatgatcagattcactggttttctattgtgaactctctcatgatcgtgcttttcctatcaggcatggttgccatgataatgcttcgcactctctacagagacatttctagatacaatcagcttgaaactcaagaagaagcacaagaggaaacaggctggaagcttgttcatggggatgtgttccgtcctccaacctactctgacttgctctgtgtttatgttggcactggcgtccaattctttggcatgctcgtagttacaatgatctttgctgtgttgggtttcctttctccatcaaaccggggaggactcatgactgcaatgcttctagtctgggttttgatgggtctgcttgctggctactcttcttcccgcctttacaagatgttcaaaggttcagagtggaagaagataaccctgcaaacggctttcctatttccaggggttgcatttgttattttcttcatcttgaatgctcttatatggggggagaagtcatctggtgctgttcctttcaccacaatgtttgccttggtcctcctttggtttggcatctcagtaccccttgtcttcgttgggagttatcttgggttcaagaaacctgccatggaacctccagtcaagacaaacaagattccacgtcagatccctgagcaggcttggtacatgaatccgcttttcaccattctgattggcggtgtccttccatttggagcagttttcattgaactcttcttcatcctcacctccatctggctgcaccagttctactacatatttggcttcctcttccttgtgtttgtgatcctgatcatcacctgcgccgagatcacaatcgtgctctgctatttccagctctgcagtgaggactacatgtggtggtggaggtcttaccttacctcaggatcctccgccctgtatctcttcctgtacgctggtttctacttcttcacgaaactgcagatcactaagctggtgtctggcatcttgtacttcggctacatgcttctcgcctcatatgccttcttcgtgctgactggcacaattggtttctgcgcctgcttctggttcactaggttgatttactcttcagtgaagatcgattaggtgccaagatgacagaacagcacatgtttcaatggagtcaagataattgtatgattaatgtggattggggaattaccccccctcctttttttgaaggttttcaggaaaattttactgtttaggatttagtttacagatggtttatgttttgttattgtcaggttatacactttagtgatttggaactgaaaaatataagggtaaacacattatgatgaggctgtaccttgtgacaaatttttttgtggggctctatataaattaaattcattgtgacaggtatatgcttgtaccggtgaattactgtagggctccaagaccagtatgaaatccaccgtttggatcctggaattgaatagtaaatttagatatagattaatt

SEQ ID NO: 144275 - DNA, 995 bp, Zea Mays
atcaataaaaaccctagcagatccacccgtcacccgaagcttcctcctcgcagcgcgccgcgcgtcgtcgcctctacccacctgacttcgcgcgccacgccgagcctgcgagccatcagcccatcacccacccaacccctcgccacgcagatctagggagcttgccctcccaccgggcggtgattcttccgtcccatcaccgatgcggacgccggcgatgctccggtgggccgcggcgctcgcggtcctgctcgccgtcgccgcgccggccgccgggttctacctccccggcgttgccccgagcgatttcgcgaagggtgatccgcttccagtgaaggtgaataagttgacatctatcaagactcaactcccgtatacatattattcccttccgttctgcaagccagataccatagtcgacagtgccgaaaatcttggggaggtacttcgtggcgatcgcattgagaactctccttatgtgttcaaaatgggagagcccaagatgtgtcagattgtctgcagagcaccgatcactgagaaagaagccaaggagctcaaggaaaagatagaggacgaataccgagtgaacatgtaaggactatgaacatatgtgcattgttattaaaacgtcgcttaaacgtcgtttaagcgtcgtttaaacgacaaaacgtgcttagagtttagaacgtccggtcgttttagcaaaaacgcgtagaacgtccgtttatcacgtttaaacgtcgcttaaacgtcgttttctcgttttcggacgttctaagcacgttcaggacgttctacgtgtattgggtctttcacaggccaaaaaatacacagggctaccaggcgtccagtgccgacagcctccctcctctcctctcctctcctctcctctcttctgccccctcctccctctccatcctccaacagttcagcgctgccaggccagtgaagcgccaccctccctagttttagactttcaatcatcaagagttcca

SEQ ID NO: 144276 - DNA, 925 bp, Zea Mays
acccgaccccacccctcctgagggccgacggccgagcgcaaaaccctaaccttgtcttgtgcgcagctccgctattaaagtctgcgtacagtccgccgcggctaggcgaccgcatccgcatctccccaacgtcttctcgccggtcgcgcacgggcaaagcagcgatggctacagcgacggcagttggcggacccgacagggtggagactgcggcgtcgtccgcggcggcagtgctggccgtcgccgttgcctcgcagaggttgctaggtctgctcgctcttgcggttcaaactgtaaatgttggagcagaaatatataataaagatcagcgggcaatatacaagttattatctggaagaatcaaatctgaaaatgtccctgaaaataaggatgggtcagatgacgacgatgatgatgacgacgatgaagacaatgacgatgagggtggtgacgacgatgatgatgctgaggaggaattctctggagaagaagatgggggtgatgacgatgatgaagatgatgatcctgaagctaatggtgaagaaggaagtgacaacgacaatgatgacgacgaagatggtgatgatgatgacgatgaggacgacgaaggtgatgaggacgacaaagacgaggacgatgatgaagatgacgaagaccagccaccttccaagaagaagaaatgatttgctcatccatggatttacctcagcttctccatgctgttagttgtgttgtttagatcatggacagctttgggatcaatgtagcttgttgcttgtcatggtatcgtagtgtaggaaaatttgacatctgatgttaaatcactatcctgctttcccctctgtgcatgtagtcttaaatcttgatttttactctattggagctgcgattgtgtcatgccattcaattttgttctgccgaggcc

SEQ ID NO: 144277 - DNA, 742 bp, Zea Mays
agtatgttgcgaaatatgctttgctttgtttatttcatcttttcttttctaacgttggccagtgctttgtgctgatgcgcctgtgctctgtccttatgctttcttaggttcaaactgtaaatgttggagcagaaatatataataaagatcagcgggcaatatacaagttattatctggaagaatcaaatctgaaaatgtccctgaaaataaggatgggtcagatgacgacgatgatgatgacgacgatgaagacaatgacgatgagggtggtgacgacgatgatgatgctgaggaggaattctctggagaagaagatgggggtgatgacgatgatgaagatgatgatcctgaagctaatggtgaagaaggaagtgacaacgacaatgatgacgacgaagatggtgatgatgatgacgatgaggacgacgaaggtgatgaggacgacaaagacgaggacgatgatgaagatgacgaagaccagccaccttccaagaagaagaaatgatttgctcatccatggatttacctcagcttctccatgctgttagttgtgttgtttagatcatggacagctttgggatcaatgtagcttgttgcttgtcatggtatcgtagtgtaggaaaatttgacatctgatgttaaatcactatcctgctttcccctctgtgcatgtagtcttaaatcttgatttttactctattggagctgcgattgtgtcatgccattcaattttgttctgcc

SEQ ID NO: 144278 - DNA, 2773 bp, Zea Mays
aaccatacacgctaatcaaaaagattagtggagcactgcctgagccttgatttctcgttctttagtactacctgctccacgagaccagaccacgccagcggaaagataaaggattagtagaccagaagcttaagcttgctgccttgctgttcatttcccttgcctgagccgttaagcgtactgtactggcagtttgttcgtttactccgttccacgcatcccaacaattcgtcaatccccagccgcacgcacgagaaagaggcagattcgctgctccgaccgcgtcttcgttgccttgttggtttccgttctgtgactctgtccttcgcttgcttttgacttggggtagttggcttttctctcccccctcgccttcctccaggctttggggatttggttgcttcctgtcggggtttgagaggagcggcgctcttgaattgttgctttcaattggtccgtttggcagggtttggcaatagaaagatttgttgccggagatgggcaagccgtcgctgaagaagaagagggcctccggcggcggcaagtccggcgaccacgggggcaagccggcgtcactggagcggtctggttccaaggtcctcgacggcgatgagaccctcttcacggacatggcgcaggagcacaaggaagagggcaataagctcttccagcgccgggactacgaccgcgcgctgctcaactacgacaaggccataaagcttctgccccgggcgcaccccgacgtcgcctacctccacagcaacatcgccgcctgctacatgcagatgagcccgcccgactactaccgagccatcaacgagtgcaacatcgcgctcgaagcgtcgcccaagtacaccaaggcgctgctcaagcgggcgcgctgcttcgaggctctgggcaggctcgacctcgcgtgcagggacgtcaacaaggtgctcgctctggagcccaacaaccttactgcgctggatgtatccgacaggatcaagaagactatggaggagaagggaatcgttctggacgacaaggagatcatgcccacgccggaggaggtggtggccgctgcacccaagcagaaaccgcgcaagaagaggggaggacggaagttcgctgccaaggctgcggctgctgctgtggaggaggtcgatgaacagaagattgcggaagctatcaaggaggaggtggaggagcagccaaggcaggtgaaactcgtgtttggggaggacataaggtgggctcaggtgccggcgagctgcagcatggcacagctgcgcgaggccgtccggagcaagtttcctggactgaaggctgttcttgtcaagtacaaggacaaggagggtgatcttgtgacaatcaccaaccaggatgagctgaaatgggctgaggagttggctgaggctgggagctcacttcggctgtatgttaccgaggctgatccggaacatgaaccttatgttgacgacaccaatatggagagaaatgtaaacagcaattcggataatggaagtattagaagcaataggcaggatgaggacaggagcactgtgacctgtattgatgattggattgtgcaattcgcccggcttttcaagaaccatgttgggattagctctgatgagtacctggacctccatgaggtcagtatgaagctctacactgaggcaatcgaggacactattactactgaggaagcccaggaggtgtttcatcttgctgagggaaactttcaggagatggcagcacttgcatttttccactggggtaatgttcacatgtcccgggccaggaagagattgttgctatcaggagattccccaagtgaattggtgcttgagcaggtgaaggaagcatatgaatgggcaagggacgaatacaataaggctggaacaagatatgaagatgccgtgaaggccaagccggacttttttgaaggtttccttgcactggcgcaccagcagtttgaacaagcaaaactgtcatggtactatgcaattggtagtaatgcagatttggacagctgttcttctgaaattctggagctcttcaataaagctgaggataatattgagaaaggtatagagatgtgggaggaaatggaagaacagcgtctgaagaatcgatctaaacctagccaggagaatattgtgctagagaagatgggcttggaggagtatatcaaggatgtatccactgatgatgcggctgaacaggcttccaatttaaggtctcagataaacattttatggggtatgctcctttatgaacgttcagttgtggaatttaaattaggtctcccaatgtgggaggattgtttgatggctgctattgaaaagttcaaacttgggggagcttctgccacagatattgctgtgctggtgaaaaaccactgtgccaatgaaactgctcaagatggtttgggcttcaagattgatgaaattgttcaagcctggaatgaaatgtatgacattaaacggtggctgcgtggtgttccatcatttcgccttgagccattatttaggcgaagagttccacaattgcatactgcacttgaacatatatagtactcatgaagttgttctacatcatattggatttcaatgcttttttatcagtgacacttttctctttttttggtgagtacaataactgtatttttatcttgtaatagattagttttattcatacgacaagcactatgcactgtgatatttgttgatttttcctttacctgcccccttgcactttctaattaaatgtttgtgactatggaatg

SEQ ID NO: 144279 - DNA, 363 bp, Zea Mays
atggacatgttctactcgacctcctcttcctcgttggcgtcgtacggtggaggttggggctacgattcgctgaagaacttccgccaaatccgtcgtgttgtccagacccacctcaagctcagaaagaggtacgagatgttgatggcggctaccctcctggaagacccctcatcattcttgccatggaatatgacccaagggaggaaaagcagggtagcccgaatctctgttggcgtcgcgtgtttcattgtgttcatgatgatcctttcagtaatagacctttttaggcttacacagacctgttttgacaagagccgaacagcgatgcttccatttcgggaccacgacctagctaaaggctaa

SEQ ID NO: 144280 - DNA, 465 bp, Zea Mays
gaataggcgaaagaggttgatggaaaagcttcatggtacattgctataatttttctccactgcagtttctcacggccggacgagcagccgctccaccggaactccgcactagaaagaaaaaagaacgcaggcgctaggcagagcatgccgtatttgccgtgccgggcactgctgcagctgagccgccttttagttctcttcgtcccgaccgcagaggtgcatctgcgatcaggagagcaggtctccggaacccttcgtcttctagatcctgcaccgggagagggcgaataaggtttttgggaagcgtcttcacgcgactgctcgtgatcttctgacatcgtcgactcagctgatcctggcgcgcgccaacaatcagtaagtctaatcagtacgcatcatctgatttggcttttatttcagttcttctgatttggtcatgatttatattcggaatttaatttggaa

SEQ ID NO: 144281 - DNA, 2560 bp, Zea Mays
cagctcagcgttcaccgcgccatccccgatcccggtcgcggcgccgacggatcagacgggacaggcgggctagcctcgacacgacgagaaccccgaggtccgcacggccgggctcttcccgtcgtgccagatgtcagacgccgtcacgacgcgcggagcatccggcacccccgccgcacattccgtcacggcgcctgacggagaccgcggccgctataaatgaaacccgcgctgtcctgctcgctcgcgcacacggcacacacaccacaccacacctcctcgcttgcactccgctcgtctgacatctcgtcccgtcctttcgtttcgaagcctcgcgagccccgacgatggccaccaccgcggtgtcggtcgacgagaagctcgataagcttcgcgccgaggtcgccaagctcgaccagatcagcgagaacgagaagtccgggttcatcagcctcgtgtcacggtacctcagtggggaggcggagcagatcgagtggagcaagatccagacccctacggatgaggtggtggtgccctacgataccgtcgcgtcgcctcccgaagatctcgaggagacgaagaagctgctggataagctcgttgtgctcaagcttaacggagggctcgggacgaccatgggctgcactgggcccaagtctgtcattgaagtccgcaatgggttcacattccttgaccttattgtgattcaaattgagtccctgaacaagaagtatggatgcaatgtccctttacttctgatgaactctttcaacacccatgatgacacacagaagattgttgagaagtattccaactccaacatcgaaattcatactttcaatcagagccagtatcctcgcattgttaccgaggacttcttgccacttcccagcaaagggaaatctgggaaggatggctggtatcctcctggtcatggtgatgtgtttccttctttgaataacagcggaaaacttgacatcttattggctcagggcaaggagtatgtctttgttgcaaactcagacaacttgggtgctatagtcgacatcaagatcctaaaccatctgatcaataaccagaacgagtactgcatggaggttactccaaagacgctggctgacgttaagggtggcactctcatctcttacgaaggaagagttcagcttttggagattgcccaagtacccgatgagcatgtgaatgaatttaaatcaatcgagaagtttaagatattcaacactaacaacttgtgggtgaaccttaaagctatcaagagactcgtagaggctgaggcacttaagatggaaattattccaaaccccaaggaagttgatggtgtgaaagtccttcaactcgaaaccgcagctggtgcagctattcggttcttcgacaaagcgattggaattaatgttccccgctcaaggtttctcccagtgaaggctacatctgatctgttgcttgtgcagtctgatctttacaccttggttgatggctttgtcatccgcaacccatccagagcgaatccagctaacccttcaattgagcttggacctgagttcaagaaggttgccaatttccttgctcggttcaagtccatccccagcatagttgagcttgacagcttgaaggtgtctggtgatgtctggtttggctctggaattacactcaagggcaaggtgacaattatcgccaagcctggagtgaagttggagattccagatggagacgtacttgagaacaaggtgatgtcaatggccctgaggatctttaagcaatgtttgtcatcaccagtttttcccaaggacatgtcacaggaactgccgagcctaatcactcctactgagctctatatttttgtaattttcatgtgcattccgattccgctgcgagggtcatgtgagcccgctagagaataattgtaatcttctttgctgcgtctgtacttgtgtttttgtgcgccaggacgtatatttttactgaaatgatactccgaagagcacgtatggtgtcttaccgggaggactcattgccgccattctgccacatgcccccggtgctcgagaatattgttatggaaagggcacaaagtggccatattcccaaggtgataaacgccgtcatgcgggacacttttcgagcgaatggcgtttgtggtccgggagaccgggaccttgcggataagttcctcgcctgcttgttcgaatccaaggtgctagatccatcccgaataccagccggcaatcctgttagcactttagctccattctgcgggttgttagactagctctaacaagaaactctaaagagttctgtaccctaaatttagaggatcagatcgttctctatttactccagcagcgtcgtctaaacgatcctctaaatttagaaaacgttgttggattttctatatatagagtttctttaaacgttattctatttatttgaatactttaaacaatcgatttagcaaaactaaaatatgtacaatatatttaagagtatggtaaatatatatatatatatatatatatatatatatacaaaaaataaaaattaaaaa

SEQ ID NO: 144282 - DNA, 2558 bp, Zea Mays
cagctcagcgttcaccgcgccatccccgatcccggtcgcggcgccgacggatcagacgggacaggcgggctagcctcgacacgacgagaaccccgaggtccgcacggccgggctcttcccgtcgtgccagatgtcagacgccgtcacgacgcgcggagcatccggcacccccgccgcacattccgtcacggcgcctgacggagaccgcggccgctataaatgaaacccgcgctgtcctgctcgctcgcgcacacggcacacacaccacaccacacctcctcgcttgcactccgctcgtctgacatctcgtcccgtcctttcgtttcgaagcctcgcgagccccgacgatggccaccaccgcggtgtcggtcgacgagaagctcgataagcttcgcgccgaggtcgccaagctcgaccagatcagcgagaacgagaagtccgggttcatcagcctcgtgtcacggtacctcagtggggaggcggagcagatcgagtggagcaagatccagacccctacggatgaggtggtggtgccctacgataccgtcgcgtcgcctcccgaagatctcgaggagacgaagaagctgctggataagctcgttgtgctcaagcttaacggagggctcgggacgaccatgggctgcactgggcccaagtctgtcattgaagtccgcaatgggttcacattccttgaccttattgtgattcaaattgagtccctgaacaagaagtatggatgcaatgtccctttacttctgatgaactctttcaacacccatgatgacacacagaagattgttgagaagtattccaactccaacatcgaaattcatactttcaatcagagccagtatcctcgcattgttaccgaggacttcttgccacttcccagcaaagggaaatctgggaaggatggctggtatcctcctggtcatggtgatgtgtttccttctttgaataacagcggaaaacttgacatcttattggctcagggcaaggagtatgtctttgttgcaaactcagacaacttgggtgctatagtcgacatcaagatcctaaaccatctgatcaataaccagaacgagtactgcatggaggttactccaaagacgctggctgacgttaagggtggcactctcatctcttacgaaggaagagttcagcttttggagattgcccaagtacccgatgagcatgtgaatgaatttaaatcaatcgagaagtttaagatattcaacactaacaacttgtgggtgaaccttaaagctatcaagagactcgtagaggctgaggcacttaagatggaaattattccaaaccccaaggaagttgatggtgtgaaagtccttcaactcgaaaccgcagctggtgcagctattcggttcttcgacaaagcgattggaattaatgttccccgctcaaggtttctcccagtgaaggctacatctgatctgttgcttgtgcagtctgatctttacaccttggttgatggctttgtcatccgcaacccatccagagcgaatccagctaacccttcaattgagcttggacctgagttcaagaaggttgccaatttccttgctcggttcaagtccatccccagcatagttgagcttgacagcttgaaggtgtctggtgatgtctggtttggctctggaattacactcaagggcaaggtgacaattatcgccaagcctggagtgaagttggagattccagatggagacgtacttgagaacaaggatgtcaatggccctgaggatctttaagcaatgtttgtcatcaccagtttttcccaaggacatgtcacaggaactgccgagcctaatcactcctactgagctctatatttttgtaattttcatgtgcattccgattccgctgcgagggtcatgtgagcccgctagagaataattgtaatcttctttgctgcgtctgtacttgtgtttttgtgcgccaggacgtatatttttactgaaatgatactccgaagagcacgtatggtgtcttaccgggaggactcattgccgccattctgccacatgcccccggtgctcgagaatattgttatggaaagggcacaaagtggccatattcccaaggtgataaacgccgtcatgcgggacacttttcgagcgaatggcgtttgtggtccgggagaccgggaccttgcggataagttcctcgcctgcttgttcgaatccaaggtgctagatccatcccgaataccagccggcaatcctgttagcactttagctccattctgcgggttgttagactagctctaacaagaaactctaaagagttctgtaccctaaatttagaggatcagatcgttctctatttactccagcagcgtcgtctaaacgatcctctaaatttagaaaacgttgttggattttctatatatagagtttctttaaacgttattctatttatttgaatactttaaacaatcgatttagcaaaactaaaatatgtacaatatatttaagagtatggtaaatatatatatatatatatatatatatatatatacaaaaaataaaaattaaaaa

SEQ ID NO: 144283 - DNA, 2110 bp, Zea Mays
cagctcagcgttcaccgcgccatccccgatcccggtcgcggcgccgacggatcagacgggacaggcgggctagcctcgacacgacgagaaccccgaggtccgcacggccgggctcttcccgtcgtgccagatgtcagacgccgtcacgacgcgcggagcatccggcacccccgccgcacattccgtcacggcgcctgacggagaccgcggccgctataaatgaaacccgcgctgtcctgctcgctcgcgcacacggcacacacaccacaccacacctcctcgcttgcactccgctcgtctgacatctcgtcccgtcctttcgtttcgaagcctcgcgagccccgacgatggccaccaccgcggtgtcggtcgacgagaagctcgataagcttcgcgccgaggtcgccaagctcgaccagatcagcgagaacgagaagtccgggttcatcagcctcgtgtcacggtacctcagtggggaggcggagcagatcgagtggagcaagatccagacccctacggatgaggtggtggtgccctacgataccgtcgcgtcgcctcccgaagatctcgaggagacgaagaagctgctggataagctcgttgtgctcaagcttaacggagggctcgggacgaccatgggctgcactgggcccaagtctgtcattgaagtccgcaatgggttcacattccttgaccttattgtgattcaaattgagtccctgaacaagaagtatggatgcaatgtccctttacttctgatgaactctttcaacacccatgatgacacacagaagattgttgagaagtattccaactccaacatcgaaattcatactttcaatcagagccagtatcctcgcattgttaccgaggacttcttgccacttcccagcaaagggaaatctgggaaggatggctggtatcctcctggtcatggtgatgtgtttccttctttgaataacagcggaaaacttgacatcttattggctcagggcaaggagtatgtctttgttgcaaactcagacaacttgggtgctatagtcgacatcagtatccaaataggatgatcaaatttgcatacctgttttaatacttactattgccgtgtgctttgaattgaaaattgtatccttaatcagcacagagatcctaaaccatctgatcaataaccagaacgagtactgcatggaggttactccaaagacgctggctgacgttaagggtggcactctcatctcttacgaaggaagagttcagcttttggagattgcccaagtacccgatgagcatgtgaatgaatttaaatcaatcgagaagtttaagatattcaacactaacaacttgtgggtgaaccttaaagctatcaagagactcgtagaggctgaggcacttaagatggaaattattccaaaccccaaggaagttgatggtgtgaaagtccttcaactcgaaaccgcagctggtgcagctattcggttcttcgacaaagcgattggaattaatgttccccgctcaaggtttctcccagtgaaggctacatctgatctgttgcttgtgcagtctgatctttacaccttggttgatggctttgtcatccgcaacccatccagagcgaatccagctaacccttcaattgagcttggacctgagttcaagaaggttgccaatttccttgctcggttcaagtccatccccagcatagttgagcttgacagcttgaaggtgtctggtgatgtctggtttggctctggaattacactcaagggcaaggtgacaattatcgccaagcctggagtgaagttggagattccagatggagacgtacttgagaacaaggatgtcaatggccctgaggatctttaagcaatgtttgtcatcaccagtttttcccaaggacatgtcacaggaactgccgagcctaatcactcctactgagctctatatttttgtaattttcatgtgcattccgattccgctgcgagggtcatgtgagcccgctagagaataattgtaatcttctttgctgcgtctgtacttgtgtttttgtgcgccaggacgtatatttttactgaaatgatactccgaagagcacgtatggtgtcttaccggg

SEQ ID NO: 144284 - DNA, 1819 bp, Zea Mays
tccggcacccccgccgcacattccgtcacggcgcctgacggagaccgcggccgctataaatgaaacccgcgctgtcctgctcgctcgcgcacacggcacacacaccacaccacacctcctcgcttgcactccgctcgtctgacatctcgtcccgtcctttcgtttcgaagcctcgcgagccccgacgatggccaccaccgcggtgtcggtcgacgagaagctcgataagcttcgcgccgaggtcgccaagctcgaccagatcagcgagaacgagaagtccgggttcatcagcctcgtgtcacggtacctcagtggggaggcggagcagatcgagtggagcaagatccagacccctacggatgaggtggtggtgccctacgataccgtcgcgtcgcctcccgaagatctcgaggagacgaagaagctgctggataagctcgttgtgctcaagcttaacggagggctcgggacgaccatgggctgcactgggcccaagtctgtcattgaagtccgcaatgggttcacattccttgaccttattgtgattcaaattgagtccctgaacaagaagtatggatgcaatgtccctttacttctgatgaactctttcaacacccatgatgacacacagaagattgttgagaagtattccaactccaacatcgaaattcatactttcaatcagagccagtatcctcgcattgttaccgaggacttcttgccacttcccagcaaagggaaatctgggaaggatggctggtatcctcctggtcatggtgatgtgtttccttctttgaataacagcggaaaacttgacatcttattggctcagggcaaggagtatgtctttgttgcaaactcagacaacttgggtgctatagtcgacatcaagatcctaaaccatctgatcaataaccagaacgagtactgcatggaggttactccaaagacgctggctgacgttaagggtggcactctcatctcttacgaaggaagagttcagcttttggagattgcccaagtacccgatgagcatgtgaatgaatttaaatcaatcgagaagtttaagatattcaacactaacaacttgtgggtgaaccttaaagctatcaagagactcgtagaggctgaggcacttaagatggaaattattccaaaccccaaggaagttgatggtgtgaaagtccttcaactcgaaaccgcagctggtgcagctattcggttcttcgacaaagcgattggaattaatgttccccgctcaaggtttctcccagtgaaggctacatctgatctgttgcttgtgcagtctgatctttacaccttggttgatggctttgtcatccgcaacccatccagagcgaatccagctaacccttcaattgagcttggacctgagttcaagaaggttgccaatttccttgctcggttcaagtccatccccagcatagttgagcttgacagcttgaaggtgtctggtgatgtctggtttggctctggaattacactcaagggcaaggtgacaattatcgccaagcctggagtgaagttggagattccagatggagacgtacttgagaacaaggatgtcaatggccctgaggatctttaagcaatgtttgaactgccgagcctaatcactcctactgagctctatatttttgtaattttcatgtgcattccgattccgctgcgagggtcatgtgagcccgctagagaataattgtaatcttctttgctgcgtctgtacttgtgtttttgtgcgccaggacgtatatttttactgaaatgatactccgaagagcacgtatggtgtcttacc

SEQ ID NO: 144285 - DNA, 1336 bp, Zea Mays
ttccatttttttccttatattcttgctctaatgtttttgttacctttaactagttcttcgacaaagcgattggaattaatgttccccgctcaaggtttctcccagtgaaggctacatctgatctgttgcttgtgcagtctgatctttacaccttggttgatggctttgtcatccgcaacccatccagagcgaatccagctaacccttcaattgagcttggacctgagttcaagaaggtaaaacagtttgtctccaagatattgaagatacctttcataatagagttccatcagtagcattgagaatgctccttcacaaaataaagatcagactgttttatctttcataatagagttccatcagtagcattgagaatgctccttcacaaaataatgtgttgatgaaaccatttttttaacgtaaactggcaggatctgccgtttttttattaattaatataggggaaacactgatgaaaccattgatcagtaaaaattgtcactccttaactggtgtcagatcacagcaagcactgatgaaatatctccttcctaatacaggttgccaatttccttgctcggttcaagtccatccccagcatagttgagcttgacagcttgaaggtgtctggtgatgtctggtttggctctggaattacactcaaggtaaactttaatttgatgttcttctttctcctttgttgccgtatgtgctgcttaggtactctttgtatttggattttctcctttgttgccatatgtgctggtgctgcttaaatactgtttgtatttggacatgaatacctggtgcaaatttcgttggctgtttctgtctgatctgatcttgtatacctggtgcaaattttgtcagttgtttctgtctgatctgatcttgtatctgctcattccactccataccgcctcctagttcagctgtggcatatgtgttactgagtagtgcctgattcatattgttggtgctatttctagggcaaggtgacaattatcgccaagcctggagtgaagttggagattccagatggagacgtacttgagaacaaggtgcacgtagttcttcgctatgcataaatccttcatgctccatagggaatttgagtgcttcttctttattaagaattaaggtggtagtgctttcagggttaataccaaacctgccgtagagactattcatagtggtcttgttaataaaatctaaagctttcttccctctagcctttgcttcaagccttcttcggtagatatcattcacaaaatccttgaatggtgattccattatgtcaaacagatagccgcagattgggtagaccttgtaaccg

SEQ ID NO: 144286 - DNA, 1907 bp, Zea Mays
cagctcagcgttcaccgcgccatccccgatcccggtcgcggcgccgacggatcagacgggacaggcgggctagcctcgacacgacgagaaccccgaggtccgcacggccgggctcttcccgtcgtgccagatgtcagacgccgtcacgacgcgcggagcatccggcacccccgccgcacattccgtcacggcgcctgacggagaccgcggccgctataaatgaaacccgcgctgtcctgctcgctcgcgcacacggcacacacaccacaccacacctcctcgcttgcactccgctcgtctgacatctcgtcccgtcctttcgtttcgaagcctcgcgagccccgacgatggccaccaccgcggtgtcggtcgacgagaagctcgataagcttcgcgccgaggtcgccaagctcgaccagatcagcgagaacgagaagtccgggttcatcagcctcgtgtcacggtacctcagtggggaggcggagcagatcgagtggagcaagatccagacccctacggatgaggtggtggtgccctacgataccgtcgcgtcgcctcccgaagatctcgaggagacgaagaagctgctggataagctcgttgtgctcaagcttaacggagggctcgggacgaccatgggctgcactgggcccaagtctgtcattgaagtccgcaatgggttcacattccttgaccttattgtgattcaaattgagtccctgaacaagaagtatggatgcaatgtccctttacttctgatgaactctttcaacacccatgatgacacacagaagattgttgagaagtattccaactccaacatcgaaattcatactttcaatcagagccagtatcctcgcattgttaccgaggacttcttgccacttcccagcaaagggaaatctgggaaggatggctggtatcctcctggtcatggtgatgtgtttccttctttgaataacagcggaaaacttgacatcttattggctcagggcaaggagtatgtctttgttgcaaactcagacaacttgggtgctatagtcgacatcaagatcctaaaccatctgatcaataaccagaacgagtactgcatggaggttactccaaagacgctggctgacgttaagggtggcactctcatctcttacgaaggaagagttcagcttttggagattgcccaagtacccgatgagcatgtgaatgaatttaaatcaatcgagaagtttaagatattcaacactaacaacttgtgggtgaaccttaaagctatcaagagactcgtagaggctgaggcacttaagatggaaattattccaaaccccaaggaagttgatggtgtgaaagtccttcaactcgaaaccgcagctggtgcagctattcggttcttcgacaaagcgattggaattaatgttccccgctcaaggtttctcccagtgaaggctacatctgatctgttgcttgtgcagtctgatctttacaccttggttgatggctttgtcatccgcaacccatccagagcgaatccagctaacccttcaattgagcttggacctgagttcaagaaggttgccaatttccttgctcggttcaagtccatccccagcatagttgagcttgacagcttgaaggtgtctggtgatgtctggtttggctctggaattacactcaagggcaaggtgacaattatcgccaagcctggagtgaagttggagattccagatggagacgtacttgagaacaaggtgcacgtagttcttcgctatgcataaatccttcatgctccatagggaatttgagtgcttcttctttattaagaattaaggtggtagtgctttcagggttaataccaaacctgccgtagagactattcatagtggtcttgttaataaaatctaaagctttcttcc

SEQ ID NO: 144287 - DNA, 1559 bp, Zea Mays
aaaattccaaatttgttgttgtacacacggcacaccctaaccaaaacatcctgccgtttcccgttcacccagcgtgcgctccatcttggcgaggccgcgagggcgaccgctacagcagcagccgccgccgccgccagatccccaggccttcgttgaacccttcgccgtaacgagatcagatggctgggtatatgtcaagagggccccaaaatggttctgtgtatgtctgcaatctacctcctggaactgatgaaaatatgttggctgaatattttggcaccataggcttgctaaaggtatgggtcttaccagaaggacaaaaggactgggcgtccaaaaatttggatatacagggacaaagttactaatgaaccaaagggtgatgcaacagtcacctatgaggatccacatgctgcttcagctgctgtggaatggttcgataacaaggatttccatgggagcactattcaggttcacatagctgagtcaaaaagcaaagatgcattcgataaccccacaagtttgaacatcattggtggtgttggtgaacaagatgaactggataatggagcaggcagaggcagagggcgtggtgatggtccaggcaaggcttggcagcaagatggggattggatgtgtccaaatacaaggtctgttatgattgttgtggcaatgtaaattttgccttccgtggtgtttgtaatcgctgtggagctgcacgccctgctggtgctggtggaactgctgctggtggtggcggtaggggtagaggccgtggtagctctgatgcaagaggaagcagccatgctggtgctgctgttggtggtccacctggattgtttggcccgaatgattggccatgtccaatgtgtggcaacatcaactgggctaagcggaccaaatgtaatatatgtaacacctccaagcctggtaccaatgaaggtggtgtgaggggtggccgtggtggtgggtacaaagagcttgatgaagaagaactagaggaagttaaaaaacgtcggaaagaggctgaggaggatgatggagagatctatgacgaatttggcaacctgaaaaagaaatttcgctctaaagctctgcatactgaaggtgcacaggcacttcctgggtctggacgtgctggatgggaagttgagcatcgtggtcctagtgaaagggaaggcagggagaggagcagggatcgtgttagggatgactactatgaaaaggaaaccaggggcagagatagaggtgatcttggaagggaccagcgccggagcaggagtcgaagcagagaccgtgaaagggaaaggagggagaggagaagagaacatgattatgagagaagggagcgtgaccgggatcgggaccgccgccataggtgaagatagaaataacaaggctttctgttcgtacactgcatttgccaatttttgtagccatgcgacccgtggtcttgtgttagtaactgggggcgtgcgttgttgctctgaatctgatttttgctttgaatgattcgctgcactggcattttattcagatattctgtttcttctgtgatt

SEQ ID NO: 144288 - DNA, 390 bp, Zea Mays
atggatatggattcagcagactccatagccgacaaggcaattggaaggatgcaagagattgcggacaagatattttccgtagctcgtgaaacaatccgtccaggacgcgggttgtcctcatttgaggctaccaaattacgtgtagcattggaggacattgcttgcatgcttgagcaagactctctggtgttgcaagagaatttggacaacgtgaacaacgttgtaaacaaccctgctgacagcagctatgaaccgtcagctgtgtcctcaccacccccagctgacgagtttcttagtccggattgggactttgctgaccactttgcaaacttctggggtcttgaatatgactcagaccagatgccatcattcagtgacaatgaagtttaa

SEQ ID NO: 144289 - DNA, 312 bp, Zea Mays
atgtcaggcaggggcaagggcggcaaggggctcgggaagggcggcgcgaagcgtcaccggaaggtgctgcgcgacaacatccaggggatcacgaagccggcgatccggaggctggcgaggaggggtggcgtgaagcgcatctccgggctgatctacgaggagacccgcggcgtgctcaagatctttctcgagaatgtcatccgcgacgctgtgacctacacggagcacgcccgtcgcaaaaccgtcaccgctatggacgtcgtgtacgccctcaaacgccagggccgcactctctatggcttcggcggctag

SEQ ID NO: 144290 - DNA, 861 bp, Zea Mays
atgataatagctcctgaaagcttgccatgtcacatcgaagtatctgaaaaggcagtactgatgctggcttacaggagaacttggttgggtacctttagaagctatgtctcccaatctgagaagatgacctggtgtgaaatgagcaaagattgtcaaaccttggtgctcctcacctatcgcagcctctttgacatcgccatgagacttcctgtcacgctgctccgagataggtgcacccgattttctaacaggaatgctatctatttatctatcagcattgcagaactaactctagattttaggaatgcttttgtttctcgtaaatctggttcctttgttcaagtcctgacaaagcaaagcactagcactggtctgtcatcatccaagcacgctatacaattactatttctggctctggttatctgtacacttatggttggaagctatcatcaaccttgtgcaactattcatgagtattttactctttgggaattgatacagagaactgttcctacaaacatggaatgtcagcaacagataattccaacagtgaaaatattccttctgggactggaaaggctatacttcgagtgcctgaggtttcagtaccaaaattcgggtgagagaaattttcccagtgctgtacgaggagaggggagccagcgacctctaggagttcaggtcccaggagccaccgacttcagccgcctgctcaaggacggcgagggcgatgcctacctgacaagcccacgcggcggcatggtagttgccatcaagaaactcaatcccaatgacataaggctaggccacaattcatattctatcgtgatggtgtggaagagatatgcaactccagattga

SEQ ID NO: 144291 - DNA, 646 bp, Zea Mays
atgatttcgtcattcgattcgaatattcgtggcggcctgttatgatatttgcgtttctgattttgtgttgtgtttgtgaatgacagattggcaaggctggtggtgacaagtggaagtccctgtctgatgccgagaaggctccctacgtgtctaaggcagagaagctcaaggctgagtacaccaagaagatcgacgcttacaacaacaagcagtctggagaccccacggcgtctggtgattccgacaagtccaagtccgagggtgacgagtgatgtatgacggatgaaactctgtccaagtgtttgcagtcagggaaaaaaatcttcgtcgttgtcggcctaaccgggctttctcgaaggactttctagatgcagtagattagtgccgtcttctctgagtagtttccttgcaagtgtcgtcccgtccctggagtgaggcagtttagtttgtagtttcttcgcttcatcggcactcgaccgttgttggattgggatgtttagcctgcagtctgtacttaccccaagcatctatgatgcctgttttaaatctcagatcacaatagacgtttgttttaaatctcagaacactatgatggcatgaatgccgtctggtgtatccgtggaacgtagcgtgattgcgtggcgcc

SEQ ID NO: 144292 - DNA, 895 bp, Zea Mays
accgccccttactttaaaagccgcccccttgtggcctcctttcccctccactcgcatcagagcggcgccggcctacaaccgttttcgtgctcacacacccaaaccttagtcgcgatcaggccccaaggactcgagatgaagtcgagggcacggtccaccgccggcgactccaggctctcggtgaggaagaccaaggcagagaaggacccaaacaagcccaagaggcctccgagcgcgttcttcgtcttcatggaggagttcaggaaggactacaaggagaagcaccccaatgtgaagcaagtctccgtgattggcaaggctggtggtgacaagtggaagtccctgtctgatgccgagaaggctccctacgtgtctaaggcagagaagctcaaggctgagtacaccaagaagatcgacgcttacaacaacaagcaggtacatctggagaccccacggcgtctggtgattccgacaagtccaagtccgaggtgaacgacgaggacgaggagggtgacgagtgatgtatgacggatgaaactctgtccaagtgtttgcagtcagggaaaaaaatcttcgtcgttgtcggcctaaccgggctttctcgaaggactttctagatgcagtagattagtgccgtcttctctgagtagtttccttgcaagtgtcgtcccgtccctggagtgaggcagtttagtttgtagtttcttcgcttcatcggcactcgaccgttgttggattgggatgtttagcctgcagtctgtacttaccccaagcatctatgatgcctgttttaaatctcagatcacaatagacgtttgttttaaatctcagaacactatgatggcatgaatgccgtctggtgtatccgtggaacgtagcgtgattgcgtggcgcc

SEQ ID NO: 144293 - DNA, 890 bp, Zea Mays
accgccccttactttaaaagccgcccccttgtggcctcctttcccctccactcgcatcagagcggcgccggcctacaaccgttttcgtgctcacacacccaaaccttagtcgcgatcaggccccaaggactcgagatgaagtcgagggcacggtccaccgccggcgactccaggctctcggtgaggaagaccaaggcagagaaggacccaaacaagcccaagaggcctccgagcgcgttcttcgtcttcatggaggagttcaggaaggactacaaggagaagcaccccaatgtgaagcaagtctccgtgattggcaaggctggtggtgacaagtggaagtccctgtctgatgccgagaaggctccctacgtgtctaaggcagagaagctcaaggctgagtacaccaagaagatcgacgcttacaacaacaagcagtctggagaccccacggcgtctggtgattccgacaagtccaagtccgaggtgaacgacgaggacgaggagggtgacgagtgatgtatgacggatgaaactctgtccaagtgtttgcagtcagggaaaaaaatcttcgtcgttgtcggcctaaccgggctttctcgaaggactttctagatgcagtagattagtgccgtcttctctgagtagtttccttgcaagtgtcgtcccgtccctggagtgaggcagtttagtttgtagtttcttcgcttcatcggcactcgaccgttgttggattgggatgtttagcctgcagtctgtacttaccccaagcatctatgatgcctgttttaaatctcagatcacaatagacgtttgttttaaatctcagaacactatgatggcatgaatgccgtctggtgtatccgtggaacgtagcgtgattgcgtggcgcc

SEQ ID NO: 144294 - DNA, 869 bp, Zea Mays
accgccccttactttaaaagccgcccccttgtggcctcctttcccctccactcgcatcagagcggcgccggcctacaaccgttttcgtgctcacacacccaaaccttagtcgcgatcaggccccaaggactcgagatgaagtcgagggcacggtccaccgccggcgactccaggctctcggtgaggaagaccaaggcagagaaggacccaaacaagcccaagaggcctccgagcgcgttcttcgtcttcatggaggagttcaggaaggactacaaggagaagcaccccaatgtgaagcaagtctccgtgattggcaaggctggtggtgacaagtggaagtccctgtctgatgccgagaaggctccctacgtgtctaaggcagagaagctcaaggctgagtacaccaagaagatcgacgcttacaacaacaagcagtctggagaccccacggcgtctggtgattccgacaagtccaagtccgagggtgacgagtgatgtatgacggatgaaactctgtccaagtgtttgcagtcagggaaaaaaatcttcgtcgttgtcggcctaaccgggctttctcgaaggactttctagatgcagtagattagtgccgtcttctctgagtagtttccttgcaagtgtcgtcccgtccctggagtgaggcagtttagtttgtagtttcttcgcttcatcggcactcgaccgttgttggattgggatgtttagcctgcagtctgtacttaccccaagcatctatgatgcctgttttaaatctcagatcacaatagacgtttgttttaaatctcagaacactatgatggcatgaatgccgtctggtgtatccgtggaacgtagcgtgattgcgtggcgcc

SEQ ID NO: 144295 - DNA, 1039 bp, Zea Mays
atcctctgattttcttcagccggcgtttctcctctgctggccggcttcctcccagccgtggagttctaacggcgattggccgtccctgctcccatagccggcgcttggccttctgctcgccgcggatgcgcgctaactgcgaggtcttctccctcctcctgcgcgcgctcactgctctctggtaccccgccgtcggcttctgctccaattccagtccccaacgccagccgccgcccctgggttcttcagaaaaaatctgccgccaccgctgatggaaaaagatccagccgccctctgctctgattttcttgccgccgttctgttgatcttttgggcgcgcggtgcttatctcccagcacgccgtgcccagcctcccttctccttccacgcaaccatccacgcgtggttgtcctcacgaacaccgtttcacactatcaccctatcttcaccgtccgtagtgtcatcgtcgggatgtcttagctgcaacacccgcgcccttgaccgtatccaaagctctatattggattcgtcagcgtgctactcgcccactggctccttgacgttctcgattccgtcgtcattccgtgcgtcgtcaaaaaatcccaagagtcgggtgaagacggagccaacagcatggtgttcaccaaatgcccgacaaaaagctcgaaccagtcgtcaattatctcgacaacaaccacatccaagactccagcgttccaataattttgtctcatcgcccttcaaatccgagtcctcgtccgtaggatcgtcgttgaccttgcaacttcagctcgagttaattatggtaagttgatttattattcccatcaactaaataaatgataggattaaatagaagaattgattgcgatgattctcttgtttattactcgatgtagagattaagttgaattttagggttgtgcgataagtatattggtagatatatatatataatacacgggttaaccggtaaattagtttagaaagttaataaaagttcttctatcaaattttataagtattagatgtccaaaaa

SEQ ID NO: 144296 - DNA, 1166 bp, Zea Mays
catctatagcaaccggtccaacactttcacgctcagcttcagcaatggctgcctccaccatggcgatctcctccacggcgatggccggcacccccatcaaggtgggttccttcggcgagggccgcatcaccatgcgcaagaccgtgggcaagcccaaggtggcggcgtccggcagcccctggtacggccccgaccgcgtcaagtacctcggccccttctccggcgagcccccgagctacctcaccggcgagttccccggcgactacggctgggacaccgccgggctgtccgccgaccccgagacattcgccaagaaccgcgagctggaggtgatccactcccgctgggccatgctcggcgcgctcggctgcgtcttccccgagctgctctcccgcaacggcgtcaagttcggcgaggccgtctggttcaaggccggctcccagatcttcagcgagggcgggctggactacctcggcaaccccagcctgatccacgcgcagagcatcctcgccatctgggcctgccaggtcgtgctcatgggtgccgtcgagggctaccgcattgccggcgggccgctcggcgaggtcgtcgacccgctgtaccctggcggcagcttcgaccccctcggcctggccgacgaccccgaggccttcgccgagctcaaggtgaaggagctcaagaacggccgcctcgccatgttttccatgttcggcttcttcgtccaggccatcgtcaccggcaagggcccgctcgagaacctcgctgaccacatcgctgacccagtcaacaacaacgcatgggcctacgccaccaacttcgtccccggcaactaagctcaacggctatgctatgcaacttcattgtctttcggatcggagagggtgtacgtacgtggattgattgatgctgcgagatgcatgtgtgtcttttgtttcacgttgcattgcataggcaagtcgagatgatgagttggcgttgtacactaagatgaaccatgtttgtgcaatagtggtggtttttgtttcctgctggttaattgttgatatccattaatttgtttttcttctatactcctttttctctctagctctttatcttaagaaggcaagcataaatgtgcttggataaacagcagatatcaatgaaaatgaaagtagtcttatacc

SEQ ID NO: 144297 - DNA, 603 bp, Zea Mays
atggggacagaggcgcccaggcgattcaggttccaggttgagatgcgctgccgctgcattggctgtgtcaggaaggtggagaaggccatggtgtccattggaagtttcggtggagttgaaacttcggtgggggatgttaatagcgggattgtcacggtggttggaaaggtgaactcaacagagatttgccgctggctgaagaggaagacgaagaaaagtgtcaaaattgtgtacccggatgctccaattgaggaccataaacagaaaatgatattggttctcggaagcagttcacaaggtgggcaccctacgccctctgctccaccattacaagatgacatgccctgggctttggtaccatcaggagttcaaccagaccatgagagcctacatgtcatcgaggagaagatcaggggcctcgagaagatcagggatgagatgaagatcaaggggctgcaaaacgagctgattgcagccaagagcgagctcaaacagtcagtgagagttatcaatggcagtaagaaggttttgttggatagtgctttgaatcagctcaaagcatacatgaacctaaaggcacttggtcagtaaaattatgccagc

SEQ ID NO: 144298 - DNA, 3534 bp, Zea Mays
aggatccattagatgctcctcgggtggagcactgagccttttccggcggtgagttgagctgagcagaaccgtgctacctagctaatccacaggaggaagagaggagaacgggagccctttttatgacaagaagggaggcgccaggcgtgtgattaacagttctgaagggagagttacctgcatctgcatggaagagggaggagacccgcagcttccgagcatctccgcaccacgcaccacgtccgaaggcgcggggggcgtcgacttggatctccttgagcagctactgtccggcgacaacggctggctcgaggtggtctcacgctcgcccaactcggtagcgtttcctccactctcagccttcttctcggctgacgcgacagccaccacagtgacgacggcggcgccggccgcgaacgccagctggtggattcagacgggtggcgcgagcccctcctccgtggaggagcggttcagccaggccctgtcctacatccgggatacgcagagcgacggcgacgtcctcgtgcagctctgggtgccggtcaaccgcgatgacgggaaactggtgctgaccaccagcgagcaaccgttcacgctcgaccaccgctccgacagcctcctccggttcagggaggtgtccaccaagtaccagttctcggccgatgttaagtcgggggattcgccggggctgccagggagggtctttatcggcaggctccccgagtggtcgccggacatcaggtacttcaccagctacgagtatcccagggtaagggatgcacaatacctcgatgtccacggcaccatgggtctgccagtgttcgagaagggaagctacaactgcctgggcgtcatcgagctgatcatgacaaggcagaagataaacttcacctctgagctcaacaccatttgcagtgctctccaggcagttaatctcagaagtacagaagtttcaagcattccacgcataaagttcagcactgcttcctacaaagatgctttaccagagatactggaggtcctgagagcagcttgcttgacccacaagctgccattagctcagacatgggtcacatgtgctcaacaagggaaacgaggcagccgacattccgacgagaactaccggtactgcatctccaccattgatgaagcatgctttgtgaatgaagccgagatgcggggcttccatgaggcctgctccgagcaccaccttctgcgcggggagggggttgcagggaaggcctttacaacaaaccagccatgcttcttgccagacattggatcctcaactaaattggaatactccttgtctcaccatgctaagatcttcaagttaaaaggtgcagtggcgatccgcctgcggtgcacacgcactgggacagcagactttgtgctggaattctttctgccaacagattgcgaagcactggaggagcagaagtcagtgctggactccttgtcaggcaccatgcgaagtgtttgccagaccctacgtgtggtcacagatagagagatggaagacgaaacggtgctggaaatgaacgagctgaactcttttactcctcatgggaaggacaaagttgagttgtcctttggatgcaattcagcagatcgtagaggagaggcctcttggacaagtctggcaggaacatcacagcaagaatccgagttagctgcattgcggatgcatggaatgttctcacctggggggcagggtccatctctatctggtgttcaggcaactgctgaaggtagcaaggcaaaaaggcgtacaaaggccgagaagaccgttagtttgcagattcttcggcagtacttcgctggtagcctgaaagatgcagcaaggagccttggagtgtgccctacgaccctcaaaagaatttgcaggcagcatggtataacccgctggccatcgcgaaagatcaagaaggtagaccactctctaagaaagcttcaacagatcattgattcggttcatggagcagagacagctttccagctaaacaccctgtacaaggatatcacgaacacctcaatatcatctgacaacaatttgtcaggaagtgtcacggttcctccaaccaaccagagcaatctcaccgacgtcaacaagcaccaaccccacaagtcaagcagtaatgtgccatcaacttcacactcacactcttcgtgcagccacagttctgagtcaagtccctcatgtagcggtggtgcaacaaaacatgcacaacagggtataattgatcagatgaagtcagaaaatcctgtgaaagacagctctattcagactctgcaaacagaaaacacttcattatttgagcatttctcagttaatgagactccaattgatcttctacaggatgttactgaaaaggctaatggtggacatcattcttctcgaagcccgtcgtcccccaatcccaagcagaacacagatgcaaatatgagagtaaaggcaacatttggctcagaaaaagtgagattcagactgaacccagagtgcaattttcaagaactgaagcatgagatagcaaaacgtttgagtatagtagacacaaaccccttggttttgaagtacttggatgatgattcagaatgggtcttgatgacatgcgatgcagatctacaggagtgccttcatgtatacaaactagcaggaatccaaacaatcaaaatttcagttcatttagctgttagtccagctacaagggtgacaactggtcacactggtttgtcatgacaacagtatgaacctcaccactttgtgaggtttaatcagaattcaacctggatcacttggttttatggttttatacaggggaaaccaattccaggagtcccgagttggtagcctatgcaatgtactatgtgccaccaagtcccagttctgctgttagatcgattagtcttcgatctgttgctcaggttaggaactgatgatcaaacaaaagtacttgacaatgggaaagtcaattctaggaattaggataaaccgaagtaagcatgcattgcttgtaaacactcactgatgaacctaaatctctgaaaggcaatgcaattgattgaattaatagggtgatagggtgaagtatacctacaaatcagatttgctccaactccaagtatgttttggttcttggaatactgatgtgcaacaatccttgatgacttctttctgataattgatcagctacaatgtcccttaagatcccagcattccttcatcgcccgagtgaccaacatgctctgtctgttcaatggacattaaattctgcttctgaaattgcaactttctgcagcaagggttagatctaaaaaataggatgataggatatttagtttgttcaatttgtttgtcctttgccaaaaaaacattgtatgctatactacagtgtggtcctctttgaaagaacgcctgctactgtagacgttatggattgctttccttttaagaagcttccgtttataaaccgtttggtatgtcaattgtcaagtatcaatatagagattagattatgtcaatactctaat

SEQ ID NO: 144299 - DNA, 706 bp, Zea Mays
gtttctgttcggacttccgccgcgcttcgccctctcgctccagccgcttcacagcgccgccgctcgcctctccgactgccgcgagaatgccgttcaagaggttcgtggagatcgggcgcgtggcccttgtgaactacggcaaagactacggccgcctcgtcgtcatcgtcgatgtggtcgaccagaacagggcacttgtggacgcccctgatatggtcaggtgccagattaacttcaaacggctctcacttactgacatcaagattgacatcaaacgcgttcccaagaagtcaaccctgatcaaggctatggaggaagctgatgtgaagacgaagtgggaaaacagctcatggggcaagaagctgattgtccagaagaggagggctgcgctcagtgactttgacaggttcaaggtcatgctggcaaggatcaagaggggtggtgctatcaggcaagagctcgccaagctgaagaaggcgtccacggcttaagtcccttttggtggatggcatgttagtttttggtttcatgtttcatcagcattttgttttgagtgttgtcaaagccagaattagtaatatgtttcatgtgtacccttttcaaacttcatcaagaatgggtgtgctctggatattttgtcgggaatgatatgaaatacttaagttagcttgcgacaaatgttcatgcttcccatttgagttttgtt

SEQ ID NO: 144300 - DNA, 693 bp, Zea Mays
ttggcagtgccaggaggacaagggttgcttgccaaacttgttcccttaatgaaccaatgactaattctcttgtttagattccttttaaggcacaatgaatgttcgatatttaacaatatatatttgtggagccggtgcctcagtaattgatttggttaggcattcaagcactcatggccttgatgcattctatggaccaggcacttgtggacgcccctgatatggtcaggtgccagattaacttcaaacggctctcacttactgacatcaagattgacatcaaacgcgttcccaagaagtcaaccctgatcaaggctatggaggaagctgatgtgaagacgaagtgggaaaacagctcatggggcaagaagctgattgtccagaagaggagggctgcgctcagtgactttgacaggttcaaggtcatgctggcaaggatcaaggtcaggaacctccctgtcaaatgtctagttcctgttggcactgagtatattgcttgctcacacctttttcctttatgtaaacagaggggtggtgctatcaggcaagagctcgccaagctgaagaaggcgtccacggcttaagtcccttttggtggatggcatgttagtttttggtttcatgtttcatcagcattttgttttgagtgttgtcaaagccagaattagtaatatgtttcatgtgtaccctttt

SEQ ID NO: 144301 - DNA, 2873 bp, Zea Mays
atgaagtctgttgatcgcccgcccagtaatccaaaaagattaaccattgaatccagttaggaggttttttcaattgacatttccagacgtacaagatccagcagctcagctcaccaagatgatattccccaaaaacaggagcagaatgagccacagccagccccaatccatcgttttcgcagaaaggcgttagcttgtcgtttaaaaagaaaacctcttgctccatccacactgtcagacgacgatttcatggatgctccatcgttgaagcgctaattcagatctgcctcaccttctccttcagaacaaatcagtgcaaagaagttaaaagtactttctcctcaagttccttgcgtgaaaagaagtccaaagtctaatatcattacaaaaaaaactctcctaaacagaagactcctagaaaatcacaggtaacatgtatatatttatgtttattcatgtgttaattttggtgtccaatcaagtttgtattttcccccactttaaatttatgtatattattaacaacaaatatggtgtttactttttttatattgttgtagactagttatttacaagcatgtaataattatcccttgtttgtaaatattgtatcattagttctaactatatatatactttgtgtattaatgtatattcatttatgcttccagaaactgaatatccgctgcattccctatgatgttattgtatcatcttggataatgagcgatcggcagcgcgatgctgtcgctaggttgggattttcaagcatatttgatttgcgaactgatgccttagagagccgatcactcatcaggtggttgatggataaattggatcctcatgacatgaccatacgcccaggggctggcaaggaactgaaaataacaaaagatacggttcatctgattttgggcttgccatgtgctggaggaggcagtgagtttactgattggtatggcgaagtggatgctgctgcaaaactgagacgtgatctcaatgttggtaaagaagaatttgatgttgtcaagcttcaagacaagatagtgcttggcaacgatgacgagctatcaattagatatttttttctgattctattcaatcggcttctttttccttctgcttcttggggcattacaaacaatgaggtactcatgacttcaaacatgacccgaatgtctgatattgactggtgtcaactagtttacacggatttgtgtgatgctgccgcacgttggcataaaaggaacaaaacaaacatcacagcaacaatatatggatgctcactcattgttctgatttactaccttgatcacctacatcaccctgcatctcctgttaacaaatatggcgccccccgtaaaactggtgaaccatgcggatatgcagagtttcgtagccgttcagaaacgtgttacgtcattgctccagaacggcctgcttctgtcgttttcaacatatatgtgccacgtatcaataatttgattggcaacaagttgcaatgtttgccctcccagcagcgtccaatgtttcaatcattgtttgatgctcatgacaaagaggtggataaatactgtgattccctacagctgagccatcagatgattgtttcgaagcagattgaactctctgaaacatttggtgaaatgatcgatgaagttctgagagctgcaacgcagcgcgattcacagctagaagtatccacaccaactgttccaacacctgataaacaacaacatgatcaggaaagccatgttcctactgatcatatcaaagtatcagatgatgctcccacaacagacaagcctgctgctcctaagttaacaccagatataaatagtgaaggacaaaaatctgttacacatgatactcctgtatctggtgcacctctgttcgataaaaccccactgacagatgcaactactgacctggttgcaaaggatagttcctgtaaagctgcggtcactgaacatccccacgtgtcacgtgaagactgtgctcgcaacctgcttaagttcattttgtcaggaaaactagatccgagcatgtctatcattaattttggaggatttggagggtctgtccttgatgttgtccagtcgtttggtcccaacaaatgtcttgagaatactttcatgcagggatttatcgactgtattcgtcaggatgatgtattatacaatccagattctgtaatcaacactctaatattgaatgtcaacgttgggaccgttttgaatatcgaggagtttgaacaacacagttcaaatccacagcccttcacaacatcacttcttaaagaacatcttgaatcgaccctaccttcagatgatgttcttaaccagattaaattgatcctggttcctatgctacgccgaagccactggaccctttatgcaatcaattttgaacgtcgtcgaatagaaatcttagattcaaatccttatggtacattgcttggaggcactacatggaaacaaatccataatgatcaaatggtgataaatggaacgaagataccttggtccagattaataatgagaagacttagcattgccttacatgaagctcgacctgagtcaactgtaccaaagtttggcaactacaagattgtgctccttcccaattgtccaaccatgacaccagggtcaaatgattgtggtttttttgtcgcaaacttcctccgctactacgattttgatgatggcgacttatcagaattttatactccggatgaaccattggaccaacgtgcctttgttctgcattaccttacctttcatcgcaacaacatggttgccccccttcctgcagaactgctgcctttcaagtattctccaaggagacgccgctgtttgaaagccaagacttag

SEQ ID NO: 144302 - DNA, 2263 bp, Zea Mays
gacatcgtagcgtaggagcaaaaaaaaaaaaaaaaaaaaaaaaaaaacggcaaacgacgcgcgcgccgcctcttcgtaacaccactctgccgccccctcgctcgttcgatcgccctgtgagcttatccgacgccgtggtcacttgagccccgatggagtttgccgccggcgctgcggtggccccgcgcccgatgcccgccgggcccggccgaaaccgccgggtgggcggtggagcgatcggcatcggttgggcccgccgcgcgaccgcgccggggctctcgctggctcccgccgtcgcgagacgggcggcctccgcgtcgggaggaggccacgggcgcgtcgtcgttcgctcaaccggcggcggctgtctgtggttccgcggcgagggcgccgacggtgatcgatcatccctggcgcgcgcgtctccgtcggatggcgcggctcctgcgcgcagttcagttcgggaacagactataggaattaagaaggagctcttcaatctggccgttccagccatagttgggcaagcgatcgaccccgtggcgcagttactggaaaccgcatatgttggccgcttaggtcctgtggagctggcttcagcagccgtcggtatgtcagtattcaacattatatcaaagctcttcaaacatacccctcctaagtatcacaacatcatttgtggctgaagatgtgtcaaaacatgactcttcacagtatgcttcgggaaatatatctggcaaggttggagaaaggaagaggcttccttcaatttcttctgctttactcttggcagctgcaattggtgtcattgaagccttggctttgattttggggtctggaatactcctcaacattatgggtgtctcacatgcatcagctatgcacaatccagcaaggctatttctttctgtaagagcacttggtgctcctgctgttgttgtttcattggctatccaaggtgtgtttcgtggactcaaagatacaaaaacacctctactttatagtggtttgggtaacatctcagctgtggttctgcttccttttttcgtgtattccttgaaccttggattgactggagctgcacttgcaactattgcttcacaatatattggtatgtttctgcttctttggtctttaagcaagagagcagttctattaccaccaaaaatgaaagacctagagtttgttgggtacataaaatccggtggcatgctgttagggagaaccctttcagttctgataacaatgactctcgggactgcaatggctgctcggcaaggcacagtagcgatggccgctcatcaaatatgtctgcaagtttggctggctgtatcattactttcggatgcattggctgtttctgcccaggcactgattgcaagttcatttgccaaacttgactacgaaaaagtggaggaggtcacattctatgtattaaaggcaggagtgttcgttggtatcgctttagcacttcttctgtttgtctcttttggtagacttgcagaaatattctccaaagaccccatggttatacaaattgtgaggagtggtgttttgttcgttagtgctagccagcctatcaatgccctcgcttttatctttgacggactccattttggtgtctcagacttctcgtactcagcttcctccatgatggtagttggagcaatatcctctttgtttttgctgtgtgctccacgatttttcgggcttcttggtgtttgggctggcctggctcttttcatgagtttgcgcatgactgctggatttatgagattgggatggagagcagggccttggtggtttttgcacagaaaagaacccaaatacaggctgcaatgaacaaaatgtggatctatggagccgaataaccaaatggcgagattaggatggaggatacaagttatgaaggcacactacaatggcgaaacatactttcatgttgactcccgtgtatgttttaaccagttcggttattctaattccatgtgtggtttggaatgtattttgacttgttatggatttcaaccaactcaatatcagtcaatccacatagattaacggtgaaacgaacaagcccttaggtggttttagaacttggaatttgagagtaaagctacattggacaaattttcgcttgtatgtgtcacataggcgatgattgttcagtatctctatcctctctgtcaaactctagattgaatattgcagatttatttagacatatctgatgggttcaaactttacggttcaaacactcata

SEQ ID NO: 144303 - DNA, 1580 bp, Zea Mays
cgctgctgcacactgccccactctcctctacctccgcgccaatgcgcctccccaacatttaaacggccaaaccagcccaaaccccaaccccaaccccacagcagtaacaggggcacactagctaagctaaacctcgccacggcacagcaatggcgccgctccccgcttccctcatgccctgcctctggctcttcctctgcctcctcgccgcgccgtgccccgcggcgcgggcggcgcggttcgcgtgcaacgccacggcgccgcgagcgtccacgtgccaggcgctcgtctcctacgcgccgcccaacgggacggccacgcccacgctcgccgccgtgcgcgcgctcttccagctccgctcccaccgcgcgctgctggccgccaacggcctcccgctctccacgccgcccacggcgcccgctcccgtgccgctgcgggtccgcctgccctgcctctgctcggggggcgccggggccacgttccagcggcccacgtaccgggtccgcgccggggacacgctcgacgccgtcgcgcggggcgtcttcgcgggcctcgtcacctaccaggacatcgccgccgccaacaacgtctccgaccccaacagggtcgccgtcggccagcagctctggatccccgtgccctgcagctgcgacctcgtgggcggccaacccgtcgtgcacttcacctacgtcgtgccggccgggggctccgtgtccagcatcgcggaggagttcggcaccacggaggagacgattctcacgctgaacaagatgcccgacgccaagtcccttctcgccggccaggttcttgacgtgccactccgagcttgtagttctgccattagcagcacagccattgaccgcaaccttctcgttccaaatggaagctacatcctcaccgccaacaactgcgtcaagtgtggctgcagctctagcacctggcagttggactgccagtcaacacagggactgagctcgtcgttctgccctgccgccaagtgcggagacatgttcctcggcaacacatcctcctccacctcatcctgcgagagcacagcatgctcctacgccgggtacaccaacagcacatcgttcgccatcctcgccaatgtgaccaccaccaacgtgtgtaacgctgggatgactccgacggcgcagccggctcactcttcggcgcttcggttggagccggtgtggctgagatggacggagctggttgccttgtctctcttcacgctgtctttcttcgtctaggctatctgcggcaaaagactgaacgttgtcgccaagcgtctgtcgttagaatctggccctctgattcctagtttgatgttgtgagtaatatctgcagtgtttgcgcgactttgatctgtaactggttggatttgtaagggcaaactctagggtaacacttctgtgttagacggtagatcaggaaacatttgtacttcgtcaaacttttgcaaagataatttcttctgttatcaccatagcctttttcgtgttctagaatctggagtattgtttggctctagcattccaacgtatggattcaacatcattgcctgtaatttcagctcc

SEQ ID NO: 144304 - DNA, 2306 bp, Zea Mays
gttgggcccgtcccatgccccccactaaaatactccaagccgctgggccgccgtggcccacccaccgccgtcgtcaccctcccgccccgccggccgccgcagatgggccagccgcggcggcgcggctacccgcacggccgccaccaccggtgcccgcgcggcattgcgctgccggcggccggagcgggcctgctcttcctctccgtctcgctcctctccgtctcactcctctccgcgccgccgctcgcggacccgcgcccgggcctcggcacctcctcctcctctcgacggttcctccgccgccatccgacaaacggctctgacggcgaactggagggctccgagagcggcgacgcgttcagtgttccggcacgcggtggatggactgggcaggatgatctttggggatcgaagcttgctagcaacttccacggatgcagcaactctagtagtagatttcttgattctggtattaccacacaaccagatcgatacttgattgttgttacaagtggaggtctcaatcagcagagaacagggatagttgatgctgtagttgctgcacgtatattgaatgctacacttgttgttcccaaactggatcaaacatctttctggaaagattcaaggtatgcgatagtcaccagtcagcacttcccaattcaatcgataatcttttatcatttataggtgttcatatttaatttactcttgtattcaatgctttagcaatttttcagaaatctttgatatggactggttcatctcatttcttgcaaaggatgtcagaattatcaaagagcctccagaaaaaggaggtaaagcaatgaaaccttataaaatgcgtgtcccccgaaaatgtactccacggtgttacttgaaccgtgtcttaccagcacttctgaagaaacatgttattcgaatgactaaatatgattatagactctcaaataagttggacactgacctgcaaaaactacgttgcagagtcaattatcattctttgagatttactgacccaatacaagaattggctgaaaagctaatacaacgaatgcgagaaaagaacagatattttattgctcttcacctgagatttgaacctgacatgcttgccttttctgggtgctattatggtggtggagaaaaggagaggagagaattagctgcaattcgcagacgatggagaaccttgcatatacgtgacccggagaaaggaagacggcaaggcaggtgtccactaactcctgaggaggtagggttgatgctgagggcattaggctacagaagtgatgtgcacatttatgttgcttctggtgagatatatggaggggaagatacattagcatccctgaaagcgctctttcctaatttccatacaaaagaaacactatcaagccaagaggagcttgctcctttcctgaagttctcatctcgcatggctgcaatcgatttcattgtctgtgaggaaagtgatgcttttgtggctaacaacattgggaacatggccaaaattctggctgggcaaaggagatattttggacacaagagaacaatccggccaaatgctaaacagctctatcccttattcatgaagaggggaaatatgtcatgggatgcatttgcctcacaggtgcgaacaatccagaaaggatatatgggagaacccatggaaatcacaccaggaagaggcgaatttcatgcaaaccctgccgcctgtatatgtgaaaagaccagcagaaactcagcaatagtcaagtccatttctggaaataacctggaacctgtaactgacagtggaataaggaaaaccattggcattagtagaccaccatatcctgtttatactgatgaagaggcagatggatctgatacagaagaagatccggacagcagtgggagaggagaggtgattgacactgaacctgacgatgattctgcggtcagacaggaggaccctgagctagaggagatcctgtcagattagttcagttgtgcggctgtttcccccggttaagctatgctaatctgactgcatatacatgtgttgtatgtggcagcaattttatggtttgggcatcaccgaactagcttagatctgcagccgctggtgtacatagattttgtggtgtgcagctgtccaccctctttctcttagctgaatgagggcatgatcatgtttgtcacctgtgcaagccagatttgcttaccttttcttagtatcccgccatcgctcaaccctcaagcaaatgtgcaaataaaagagaataaaaaaacaagagaagttggttctccagtgccgttca

SEQ ID NO: 144305 - DNA, 2027 bp, Zea Mays
gttgggcccgtcccatgccccccactaaaatactccaagccgctgggccgccgtggcccacccaccgccgtcgtcaccctcccgccccgccggccgccgcagatgggccagccgcggcggcgcggctacccgcacggccgccaccaccggtgcccgcgcggcattgcgctgccggcggccggagcgggcctgctcttcctctccgtctcgctcctctccgtctcactcctctccgcgccgccgctcgcggacccgcgcccgggcctcggcacctcctcctcctctcgacggttcctccgccgccatccgacaaacggctctgacggcgaactggagggctccgagagcggcgacgcgttcagtgttccggttagatgggaactcataacttgtggtttatggcacgcggtggatggactgggcaggatgatctttggggatcgaagcttgctagcaacttccacggatgcagcaactctagtagtagatttcttgattctggtattaccacacaaccagatcgatacttgattgttgttacaagtggaggtctcaatcagcagagaacagggatagttgatgctgtagttgctgcacgtatattgaatgctacacttgttgttcccaaactggatcaaacatctttctggaaagattcaagcaatttttcagaaatctttgatatggactggttcatctcatttcttgcaaaggatgtcagaattatcaaagagcctccagaaaaaggaggtaaagcaatgaaaccttataaaatgcgtgtcccccgaaaatgtactccacggtgttacttgaaccgtgtcttaccagcacttctgaagaaacatgttattcgaatgactaaatatgattatagactctcaaataagttggacactgacctgcaaaaactacgttgcagagtcaattatcattctttgagatttactgacccaatacaagaattggctgaaaagctaatacaacgaatgcgagaaaagaacagatattttattgctcttcacctgagatttgaacctgacatgcttgccttttctgggtgctattatggtggtggagaaaaggagaggagagaattagctgcaattcgcagacgatggagaaccttgcatatacgtgacccggagaaaggaagacggcaaggcaggtgtccactaactcctgaggaggtagggttgatgctgagggcattaggctacagaagtgatgtgcacatttatgttgcttctggtgagatatatggaggggaagatacattagcatccctgaaagcgctctttcctaatttccatacaaaagaaacactatcaagccaagaggagcttgctcctttcctgaagttctcatctcgcatggctgcaatcgatttcattgtctgtgaggaaagtgatgcttttgtggctaacaacattgggaacatggccaaaattctggctgggcaaaggagatattttggacacaagagaacaatccggccaaatgctaaacagctctatcccttattcatgaagaggggaaatatgtcatgggatgcatttgcctcacaggtgcgaacaatccagaaaggatatatgggagaacccatggaaatcacaccaggaagaggcgaatttcatgcaaaccctgccgcctgtatatgtgaaaagaccagcagaaactcagcaatagtcaagtccatttctggaaataacctggaacctgtaactgacagtggaataaggaaaaccattggcattagtagaccaccatatcctgtttatactgatgaagaggcagatggatctgatacagaagaagatccggacagcagtgggagaggagaggtgattgacactgaacctgacgatgattctgcggtcagacaggaggaccctgagctagaggagatcctgtcagattagttcagttgtgcggctgtttcccccggttaagctatgctaatctgactgcatatacatgtgttgtatgtggcagcaattttatggtttgggcatcaccgaactagctta

SEQ ID NO: 144306 - DNA, 2065 bp, Zea Mays
gttgggcccgtcccatgccccccactaaaatactccaagccgctgggccgccgtggcccacccaccgccgtcgtcaccctcccgccccgccggccgccgcagatgggccagccgcggcggcgcggctacccgcacggccgccaccaccggtgcccgcgcggcattgcgctgccggcggccggagcgggcctgctcttcctctccgtctcgctcctctccgtctcactcctctccgcgccgccgctcgcggacccgcgcccgggcctcggcacctcctcctcctctcgacggttcctccgccgccatccgacaaacggctctgacggcgaactggagggctccgagagcggcgacgcgttcagtgttccggcacgcggtggatggactgggcaggatgatctttggggatcgaagcttgctagcaacttccacggatgcagcaactctagtagtagatttcttgattctggtattaccacacaaccagatcgatacttgattgttgttacaagtggaggtctcaatcagcagagaacagggatagttgatgctgtagttgctgcacgtatattgaatgctacacttgttgttcccaaactggatcaaacatctttctggaaagattcaaggtatgcgatagtcaccagtcagcacttcccaattcaatcgataatcttttatcatttataggtgttcatatttaatttactcttgtattcaatgctttagcaatttttcagaaatctttgatatggactggttcatctcatttcttgcaaaggatgtcagaattatcaaagagcctccagaaaaaggaggtaaagcaatgaaaccttataaaatgcgtgtcccccgaaaatgtactccacggtgttacttgaaccgtgtcttaccagcacttctgaagaaacatgttattcgaatgactaaatatgattatagactctcaaataagttggacactgacctgcaaaaactacgttgcagagtcaattatcattctttgagatttactgacccaatacaagaattggctgaaaagctaatacaacgaatgcgagaaaagaacagatattttattgctcttcacctgagatttgaacctgacatgcttgccttttctgggtgctattatggtggtggagaaaaggagaggagagaattagctgcaattcgcagacgatggagaaccttgcatgtacaagctgtgtgatgtgtaatcattactcgcttactgagatagaattaccttttgctaaaagttttcatattctagatacgtgacccggagaaaggaagacggcaaggcaggtgtccactaactcctgaggaggtagggttgatgctgagggcattaggctacagaagtgatgtgcacatttatgttgcttctggtgagatatatggaggggaagatacattagcatccctgaaagcgctctttcctaatttccatacaaaagaaacactatcaagccaagaggagcttgctcctttcctgaagttctcatctcgcatggctgcaatcgatttcattgtctgtgaggaaagtgatgcttttgtggctaacaacattgggaacatggccaaaattctggctgggcaaaggagatattttggacacaagagaacaatccggccaaatgctaaacagctctatcccttattcatgaagaggggaaatatgtcatgggatgcatttgcctcacaggtgcgaacaatccagaaaggatatatgggagaacccatggaaatcacaccaggaagaggcgaatttcatgcaaaccctgccgcctgtatatgtgaaaagaccagcagaaactcagcaatagtcaagtccatttctggaaataacctggaacctgtaactgacagtggaataaggaaaaccattggcattagtagaccaccatatcctgtttatactgatgaagaggcagatggatctgatacagaagaagatccggacagcagtgggagaggagaggtgattgacactgaacctgacgatgattctgcggtcagacaggaggaccctgagctagaggagatcctgtcagattag

SEQ ID NO: 144307 - DNA, 966 bp, Zea Mays
atggctgcccatctgcgatccatcagcttgcccacaaggccccactccctcgtcctcaaagccgagcaggagctgcagcgcctcaggtcctgctgcgctccggtgtcgcccccgccaccagtgcacgccctgcgcgccttgctccaggacctcagcgacctgcacgagtacgccgaggagatcgcccgcctgcccaacaactgggacgcgctccgcctgccccggcaccggcggctcgtggagggcgagctagaagggtcggtggcgctgctggacctgtgcggggcggcgagggacggcctcgccgacgccagagaccaggtccgggacctgcgcttgctcctccgcagacaccgcgcggcgagccacggcggaccacgccggggcggcggcgccgccgccgctgccgccagcgccagggcggaggcgtgcgctgctgggtcgctgaagaaggtggccagggccatcaggcgggagtcctgctacaggcgttctgccgttggtaacaccagagacgacgacctctctcgcagcggcgcgccgaggccgctggcgatgctggcggaggtcagggagctcaccgtgtgcgccctgcagtcgtccgtggaagctctgctgaggcaggtcgccaggccgagcgccggcaagtggtcgctcgtctcgagagccttggcgcacggcaggagcaggtcgtttgggtccggagaagctcgggaacacgctgctactcatgctgatgccgatggacgatcggtgttcggcgccatcaaggacgttgtaggtggcgacatgccgttggatgctgggaaccatctgcagtccctggaggaatgcatccaaggccttgaggacggattagagcgcctgtttaggaaccttatcagaagcagagtctgcctcctgaactgtgttagtttgtgataccatgttcattttcaggagggagtcatcttcctcctcatacat

SEQ ID NO: 144308 - DNA, 1512 bp, Zea Mays
aagaactcatgtttccgcggggccccggctccggccccagcccaaaagcgcgcctattattatttatttatttatttatttatttatttatatatacatccgccggccaatccatcggccacacagcgccacgccacacgcaacgcaagcagctgcttctctctttccgctccgcaggccgcagcgcccatcaagagcgagaagccctgtcgcgcgcggagacgatggaagggccggcggcggcggaggcggagaacggcggcgcgggcaaggggtccggcagcaggttcaggcgggtgtgcgtgttctgcgggagcagctccggcaagcgcagcagctaccgcgacgccgccgtcgagctcggcaaggagctggtgtcgaggaaggtggatttggtgtacggcggaggcagcctggggctcatgggggaggtctccgaggccgtgcacaggggcggcggccatgtcattggcatcataccgaccagtctcatgggaaaggagatcaccggggagacggtgggcgaggtgcgggccgtggcggggatgcaccagcgcaaggcggagatggcgcgcaactccgatgccttcatcgcgctcccgggtaatcctcctgcctgttgcatcgatcaccgcccctagctccggacactagctagcagccggcagcaccgttgagccatgcatgtacggtatatgggtttgttattaattgcaggcgggtacgggacgctggacgagctcctggaggtgatcgcgtgggcgcagctgggcatccacagcaagccggtgggcctgctgaacgtggacgggtactacgacttcctgctggcgttcatcgacaaggcggtggacgacgggttcatcaagccctcccagcgccacatcttcgtcagcgcccccgacgccagggaactcgtccagaagctggaggggtacgaggccgtgcaggacgaggacccggcgacgcccaagctgcggtgggagatcgagcaggtcggctacaacgcctcgctcctggccgagatcgcccgctgatcggccgcgcgacgatcgctgctgctgcgggagctctggtggctccagtccacgcatcgtctgccggccaggccactggcctccacctgctgctatctaccctacccctactaccccatcgatgatcgatgcgatgatcctgcgtatcagatcaacagaagcacgcattcatatgtgtgtgtttctcaagtgtgaccgcagaaacggggcaccggtgagcaagacgcacgcgaggacttgttttttttaggggtgtgcgttctgctcctagtcctagcagctagcagcggcttgatcgtcctgccgcatgtactctgctcctagccacgtactcgtactcatattcctgatcgacgatcacgtgtttgtttactacccagcagcagctagtactaatgtactaagttaatcgtcgtcccctggtaatgtaactgacctccagctccagctagctagctgcgacattattctgtgc

SEQ ID NO: 144309 - DNA, 1384 bp, Zea Mays
aagaactcatgtttccgcggggccccggctccggccccagcccaaaagcgcgcctattattatttatttatttatttatttatttatttatatatacatccgccggccaatccatcggccacacagcgccacgccacacgcaacgcaagcagctgcttctctctttccgctccgcaggccgcagcgcccatcaagagcgagaagccctgtcgcgcgcggagacgatggaagggccggcggcggcggaggcggagaacggcggcgcgggcaaggggtccggcagcaggttcaggcgggtgtgcgtgttctgcgggagcagctccggcaagcgcagcagctaccgcgacgccgccgtcgagctcggcaaggagctggtgtcgaggaaggtggatttggtgtacggcggaggcagcctggggctcatgggggaggtctccgaggccgtgcacaggggcggcggccatgtcattggcatcataccgaccagtctcatgggaaaggagatcaccggggagacggtgggcgaggtgcgggccgtggcggggatgcaccagcgcaaggcggagatggcgcgcaactccgatgccttcatcgcgctcccgggcgggtacgggacgctggacgagctcctggaggtgatcgcgtgggcgcagctgggcatccacagcaagccggtgggcctgctgaacgtggacgggtactacgacttcctgctggcgttcatcgacaaggcggtggacgacgggttcatcaagccctcccagcgccacatcttcgtcagcgcccccgacgccagggaactcgtccagaagctggaggggtacgaggccgtgcaggacgaggacccggcgacgcccaagctgcggtgggagatcgagcaggtcggctacaacgcctcgctcctggccgagatcgcccgctgatcggccgcgcgacgatcgctgctgctgcgggagctctggtggctccagtccacgcatcgtctgccggccaggccactggcctccacctgctgctatctaccctacccctactaccccatcgatgatcgatgcgatgatcctgcgtatcagatcaacagaagcacgcattcatatgtgtgtgtttctcaagtgtgaccgcagaaacggggcaccggtgagcaagacgcacgcgaggacttgttttttttaggggtgtgcgttctgctcctagtcctagcagctagcagcggcttgatcgtcctgccgcatgtactctgctcctagccacgtactcgtactcatattcctgatcgacgatcacgtgtttgtttactacccagcagcagctagtactaatgtactaagttaatcgtcgtcccctggtaatgtaactgacctccagctccagctagctagctgcg

SEQ ID NO: 144310 - DNA, 104 bp, Zea Mays
gcagcacactcactcgtcggcttagggacccccctgtctcgaaacgccgacagtattgattgtcatttacatgataaattgttttttatgttgatgttagtggg

SEQ ID NO: 144311 - DNA, 1050 bp, Zea Mays
atgccccttcctccagccgtgttctgcttctctccctgcgcccctattcatctcctgcgcgccttggttttggtcccaagctccatggccgccgcgctgcagctctctggtgctcggtcgccaagtctccctgctctatgcgttcttcttcctccctggctcctgctcgtccaacgacgccgtcggccggacctctctgcttctcctgcgcccgcgtcgtggctcttcactgcgcgtagtggtgcttcagttctgctctgtccattttcctgtgccgcgccactgcagctcgcctcggctcctcgcctcatccacggccgagcgccctctgcccagcctgtcgaagctcctctgccggctgcaagctcctgctcaagcttgctctcggcgctcgcccctgatttctgcgctcagctccaccgcgccgtgaagtccctgcgcccaagctatctgttggccgcgcgcaaactcctctgcttggcccgtcgtcgttctccagcgcactcgatggtttcgtcgtctcgtcttgatgtcagtccctacgtgacatctccgacgtgggttcacgccgacaaaagaatcccaagaagatatagagaagcaagcctttgatcaatgttcaagtggtcggcgaaaggccagaacaagaatcatcaccgtttatacggagttctacttaatatgaaaagattccaagaattatggatagaagagaaagtgaagcttcgtgctatactcgtcagctgctcgatcgaagacttcaatcgaagactatcgtcgttcccgccaacactgaatcaagttgataacggtgagccaaatcactatttttaatatggattttatgatcgtgaaataagacgcttagtttgcgtaggaagttaaaattagaaatacccgtgaggcgaggtgtgcttcgaggggtttagtggtcgaatatattcgaactagttctattttgtagaatatagtattttggtgacgcgtaggttaaattcaggattttatgcttttgtcgatagctctatcaatgctaatggtgttcaatgc

SEQ ID NO: 144312 - DNA, 681 bp, Zea Mays
gggggtgctgcatttctttgatcgggatgaacaggcattctcctcagaccgtaattgggaagcgcagttgtgaaattaggtaatcgccagacacatcctggtagttgggagaccccgcctgaagggaccgagtgaagagcagatgcccttgtgcatctgagaagccgcagatgatctcttagttcagatgctgttatcatgaacccaagattcatggaacgctcccaatcccatgcatgtcagcgcccaacacacagggaagaggccaggctaccaggtttatcagaagctgtttcaataaccgcagaattttttttcccatgccaatgcacactgtacagaggtgatgcgggacgaatcgagctggagccttgtgtccgctgccgagaagcccgagacgatgtcgctttgagcttcctctaaggtgttcggactgcggcttcgccgtgccaccgcgctggaagtacactcgtagggtttagcagagttcgatgagcttgtagggtagacgccctgaccccgttctgttgcagatcatctaaccaccgctccggatttgtttttttgttttattttgttttgtttatttaatatacatattaattcatttgtagcaccccccgtgtacagcagctgctggctaacttaaacctgctgtgccatattttattcattctattc

SEQ ID NO: 144313 - DNA, 3294 bp, Zea Mays
ccaacgcccacagccagtctatactctagagccccccaacacagcacacaacactcgctcgcggcgcagcgcttcgctcgttgccaccgcccgcctttccccgcgcccgacggaagagccccacgcccccaccgccgcgggagggggaggggcgcggaggagcatgcgcgcaggctgtcaccgcggccagagaaagagaaggaggacctgcgccgcgcgcaccgcgacgagccgctctccgctggcacccacgccaaaaggcgaagattctcggccgagcccccgtcccttccaccatcccccgctgtaggtagccgccacccagatctgctcccctccgcacccgcccgccgctctccccttagattcgcaccacccgccgccatgcgtttgccgccgccgccgctgtgactgggctctcctcctttgtgaggcaggaataaaaggcggttcttgcgggcggttgccatggggtgcggccagtccaagacggaggaggagtacgccgtgcagcactgccgggcgcgctccgagctcctggcgctggccatccgccagcgctacatgctcgccgacgcgcaccacgcctacgccgagtcgctgcgcgccgtcggcgccctgctgcacgacttcctccgcggcgtccagtcgctgccgccgccgccgcccgagcccgcgctccgcctcccgctgcagcggaagggcgacggcctccccgccgcgtcgccgccgccgcccgcaatcgcgtcctcctcctccgccgccaagcaggtccgcatcgcccccaacgacggccatatccagttctccgacgacgactccgattccgatgacggacacatcaagttccactccgacgaagagcccgacccggctcgccgccgcccggatgtcgtccactcagccggggcgcctggtcctccgccgccgcagatgggaccaccctattcctccgggtatgctccgccgccgtatggtcctggatacggctacgggtacgccaatgggcctgggccgggtcctggtcccgattatggcggtattggcatgagcagcggcggcggcggtggttacgggcaaagctatgggggcatgggtggtggtggcagcggcggcggtgccggctacaatgaccagagctatggtggcatgggcagtggcggcggcgctggcggctatgaccaaggctacggtggcatgggtggatatgggcagagcttctttaacatcaactacgcgcgcagccagccacctccaccgtcaatctcgcacgagcaacgcctgcaggccactaacgccagggtccactactattccggcaatgacgagctgcagccacccccgcgcggctatggtggtgggtactcctacccaccacagagctcgagctcatataatcagtatgcctatggtggttactatggaggtggttctgctcctgcaccaccagcagacatcccctcctcctcccgcgagccagccgcagcaccaccgcctccatctcctcccagggtgtccacctgggacttcctgaacccgtttgaaacttatgatagctactacgagcaaccaactgctacagcagctccatactctcccagcaggagttcaaaggatgtgcgcgaggaggaggggattccggacttggaggatgaagacatggaggtagtcaaggaagcttatggtgatgagaagcacccaatgaagggttacatgggaaacgggaaggcgacaaaggaagatggtaggagcagtacgagagatgaactgccccgcaagtccaagtcatctgaggccagcagtagtgggagcagcttggagcatgacgtgcatgtagtagagaagagtgttgtcggagagcaagttcaacactcagagccacagcagcatgttgccggtctgccacccacaggatcggacaagatatacatcgatgacactgaggtggtggtggagatcaggactcaatttgagcgtgcctcacaatcagctagtgaggtatccaagatgcttgaggtcggaaagatgccttactaccagaagagttcaggtttcaaagtctctgcaatgatggtctgtggtataccgacaatggaggaggagtttctgcgttttgaagaggacaaggcgatgggatccggcaacctctcctctacgctacagaagttgtacatgtgggagaagaagcttcttgaggaagttaagatcttaattgagagtgcacagtcaaaatctcatcaagtagttagtataggttatgattatgaatgtgcctgcaccaattcctactttggagtgcctattcatgtgtcaacagaggagaggatgcgggtactgtatgacagaaaacgtgaggagctgaaaatgttagatgagaaaggtgcagaagctcataagcttgaggccactgagctttacatcaggaaactatcaactaagattagcatagccatccaggttgtaaacactatttcagaaaagattagtaagttgagggatgaagagttgtggccacaaacatgtgagctcattcaagggttgatgaggatgtggagcgttatgctagaatgccatcagatacaattgcatgccatatcccaagctagatacatagactccatgatagacactgcaaagttcggtgatgatcatatggacttgatcaagcggttagagcttcagctattggattggattgcttgttttgctgcatgggttagcgctcaaaagaattatgtcaaaactttaaataagtggctgacaaatggtgtcatctatgtacccgaggaaaccgaggacggggcgcctccattttctcctggaaggttaggagggccaccgatattcgtcatatgcaataactgggctgccagtgtggacagggtatctgagaaagaagtggtcgaggcaatgcaggcctttgcgtccaacgtcctgaacctctgggagaggcacaggtcggagcaaaggcagggtctgatggcgaacaaaggcatggacagagatcttagggtgatggaaagagacgagcaatcgatgcgcaaggctctggaggcacagaacaagaagcttgtgctcatttcgaaccagggcagcgtgtccttgtctgcacaagcgttacatgagcgaggccctggcgctgaagccggtggtagtctgcagacaggtctgaggaatattttcgaagcgatggagaacttcacctctgcatctgcaaatacgtacagggagctccatcttcgcgccgaagaagagaaagcccgggttgcgcaggagagcggcagcgtttcctag

SEQ ID NO: 144314 - DNA, 336 bp, Zea Mays
gagtgccccctacaggcgccatgcaaggggagggggctgccaagggggcagcgttgcagttagcctaaaactcgctaaaagttattttacatatattttcacagttatattcgaaaaccgctaaaaacaggtccaaatgtgctttcggttttaccctgtaagaaagtcggtttttagaaaagactgcttccgggatcaaacactttggtttggcacaccctttgcagttcagtttgctagattatgcagtgttcagcttgctaattgccggattatgcaatattcatttggtagttcaacatttactgaattaaaatatgtcactgacaaacaaac

SEQ ID NO: 144315 - DNA, 826 bp, Zea Mays
tggccctgtcccttgcggccttgccggactgagctatatatactcagaatcaggtggcctcctaacctcatcacttgcagcttcacaaacaagctaagcaagcatttatccagaaagaagagaaggaaccaagccaacaaccaaccaaccatgatgagcggcaagaggattgctcatctggctaagaagtggcaaaggatggcggcacaacggaggcagcgcctcacctggggcggagcaggcgcggcagcaaagcaagccggcgagagctgcagctccgtggcgagcaagggccactgcgccgtgtacacggccgactgggcgcggttcgaggtgcccctggcgtgcctcagcactctggtcttcagggagctcctggaaatgtcgcaggaggagttcggcttctccggcggcgatggcagtggcaggatcacgctgccctgcgacacggcggtcatggagtacgccatgtgcttgctcaggaggagcgcctctgctgagctagagcaggcgttccttagcaccgtggcggcaacgtcgtgcctgtacgccagccgcgtggcgccgtgcgtaggagcctgccagcgggttgctgtttagtgctgttcagtgtagtgtaggtagtagataaatattattcagaaccttctgatcctgcaaatgatcaaggaaggtgttagtgttctgtacgtatgtatgatgctggatataattggcttatgagaattgtgaggactacttacattacgtggcaacaaagtttcttctgcagaattctgacttcaaatctgctgagactgagaggttgtcattcaaaaaacaaata

SEQ ID NO: 144316 - DNA, 619 bp, Zea Mays
acatcatcacttgcagcttcacaagcaaactaaaacacagcagctaaaggcacagctctccagcattcatccagaaagaagagaaggaaccaagccaacagccaaccatgatcagcgccaagagggtcgctcatctggctaagaaatggcagaggatggctgcacaagggaggcagcgcctcacctggggcggcgcaggcgcggcagcaaagcaagccggcgagagctgcagctcagtggcgagcaagggccactgcgccgtgtacacggccgacggggcgcggttcgaggtgcccctggcgtgcctcagcacccctgtcttcagggagctcctgcaaatgtcgcaggaggagttcggcttctccggcggcgatggcagtggcaggatcacgctgccctgcgacacggcggtcatggagtacgccatgtgcttgctcaggagaagcgcctctgctgagctagagcaggcgttccttagcaccgtggcggcaacgtcgtgctgccactacgccagccgtgtggcgctggcgacgtgcgtaggagccagcctgcgggttgctgtttagtgatgttcagtgtagtgtataggtagtagataaagtattattattcggagcct

SEQ ID NO: 144317 - DNA, 764 bp, Zea Mays
atcggcaagcgaagcactccactccactccactccacctgttagaaacaagctagctcaagttctctcaacttcttgccaggaaagcgcgcaggaggtcgacgggaacgaccatggtcagcgccaagagacttgtgcaaatggccaagaagtggcagaggatggccgccacggcaaggaggcggatcgcactggcgccgccggcaaaaggagccgccgagggatcgtcgccgccgtgcagcacctcgcgtgtagctgtagccggcaagggccactgcgtggtgtactcggcggacggcaggcggttcgaggtcccgctgccgtacctcgacaccgccgtcttcggcgtgctcctcggcatgtcgcgggaggagttcgggttcgccggtggcgacggcaggatcacggtgccctgtgacgccgccgtcatggagtacgtcatgtgtttgcttcggagagacgcgtcggaagaggtggtgagggcgttcctgagctccgtggtgagccggccttgcagccactgtggaaatggctcgctggtgcagtccaccacgggagttcgccagcaagctgctgtttctagcttctgagctgaggattaattagcacttagctagattgttttattattattattattattattattattattattattattattattattattattattattattattattatccttgagtgatatatgtaaatagtttggagtttggaaatgaaggttagatacaattgttcaaaaagaaa

SEQ ID NO: 144318 - DNA, 219 bp, Zea Mays
tccctcgagcgcccacctgcggggcccgcctgtccaatactccaatccacggagttcgtcccttccccccgagttgtggatgggcttgccgtcgtagactcggcggtcaccggtcatcgtggcgacggcggacctcgtcaagctggcgctcgatactcgatagttccggtttcttgccttcgtggtaagttcatcctagatgcgcccgttgaaggtacg

SEQ ID NO: 144319 - DNA, 595 bp, Zea Mays
aagccaggaacagaacttaggcgttggcgattggcatctccctcccctaagccatggccaccgggcagcccgtacgactcgtgttggatgcctccctcctcctcgacccctcctccaccagggaggcggcggtggtggctctgcgtcccggggtagaggagctgttgcggcggttgcgctactccaacctgactgtggcaatctgctatgcagagggcatgccaactaatgagtcaggctttcttaaaaaggtcgcaagctcacacttgtttggctctatagcacttcttgcgaaaagtgggaatctttctctaactgaattaatgttagaatggagccgaacaagtttttgtttttatgcgacttctagagttgacaaaggtttaagttctgagctccagaatcagaactagagagttctttctgtagctaatgaatgtagcatagaggttcctggtgttttaaatgttcaaaggcttcaacagttgcttctcaccttggctactctaataaaaagggaactatgtgactcatctgttctggtgattggatatataatgaaaaaatcctgtgaggaagacttcccaaggacaag

SEQ ID NO: 144320 - DNA, 8657 bp, Zea Mays
atggaagggcttcgtattggagcaccaattgtgcaggtttatcatgagaaatcgtttatcttacctgatgtttcaagggtgcttgcttgcctttatgagaaggatgtcaagtttgagactcacacagcctcatacaggagcctactcagattgcaggcatcatctcatgctccagttccattctatgatggccctacttttctagaagaatccagagaaatctgccgttatatagcagaaaagtatgaaaatcaaggatattcattcctccttggaaaggatgcccttgagagggcttcagttgaacaatggctccacaacgaggagcatgctttcaaccctccgagccgggccttgttctgtcatttggcctttcccttgggtgaagaagatgatgatattgatgttcatacaaggaagctagaagaggttctggaagtttatgagcaaaggctcagtgacagcgaattccttgttggaaacaagttcactcttgccgaccttgttcacctgccaaattcccactatatcaaagcatctaacaagtttctttacctttatgattcgaggaaaaatgtaaggaggtggtgggatgctatttctgaccggagttcttggaaggaagtgctgaggtatatgaagaacgtggaggagaagaacaaacaagaagaactcaagaagcagcagcagcagcaggaagaggctccttccaccgacccaattcgggtagactcgagaaagcagagcagaacagagcctcggacaatattggttcctcctgctgataatgagtcatcagcttccatagttcctcgaacaaagaagcctcttcctggtgatcacttagtgtctactcaacaaggaaaatcaagaaaaaatgtgcatcagtacccatcacaagattcagaactggcaacctcacattctgttcctcaagaaccaatgagcatggaattggttcaagaacgagaaaggacgactcgaagaccctacactgatcagagtcaagatgtcttcaaagaggcaaaggttgctaagtctacaccatctagtgcaaaacctatgtaccctcaacaacctgctcctacttcagggcatggagaagtggaagatacttgggacaaaggggtgaaaggtagagaaactgttcctgaccgacaacaaatgttgcaaaaatgggcaggtacagccagagagcaagtttctgatcgttggaaagcaagtcctccatcaagacaggctgcagctgaagatgttcgtggtgccactggtgatacaacacagtctgcagatgttcttgacacttccaagaaatctagaggtgcctatgaagaagctaaaggccctggctctgttaaggaggagaagacatcctctatttacaagaagaagcctctggtggcacaagacagtcaggagcaagctcaaactatcccagctggtgagaaaacagatagttctatacaaaagcatcaacaagcttcggatgccccaaatacttttgttgagaaattaaatgcttcagaaccagcaagagtaaaaactcacagtgacttcagtgctgaacagccatatagaaaagacaccactgatgaccagaaagtgataccacctctttcgactagagaactaacttcccaagtccaacctccctctaaaccatcgtatgatgagaagccaacaccaatgagtcagcaaaaatctgataagcaaagagtggaacctccaatacaaatagaagcagaaatatctggtgttcaacatgcttcaccatcatttccaagagcttccatggatgatcgtgccactatcggtgataagtttgccatgcagtcaattattgatgaaagagttggagaaccaacacaaatgcaaacatcaagtccagatgctcatcctgcttcattacctactaagagagaaactcctgaaggtcatgaaattggtgatttagggcttgccagtacacctggtggccaaatatcagaagcaaaaaaagtgggagatgacccagacacagtccatggagatgtttattatgtcaatttgtcaactcaagatgtgggcaaggatgccttcaaagaaccaacggtcactgactctttaccatctagtgcccaaccgattcagaaatctgctattactccatcaaggcaaacacaagttgaagaagctagggataaaagcatgcaaagtagagaaactattcctgaacaacacaaaatggtggaaaggaagacaggtacacctggagagcaattatcagaacgccagaaggagattcgtccatcaagacagtcagcagctgaggatgctccaataagtgatgcaatacagcctccagacatccttgacactcccaagaaatctagagccacctttgaagaatatataggtcctggatctacattgcccaaagcacaaattttggatgctcaagattctcaggtcaccaaaggagaatctacagtgccaactactgaccaaaggaaggactggaaatatgaaaaagatgatgaaaccatcgtgactgaagaaaagtcactatcaacagagcgatctagggagatgttccaggaaagtgcatctactgcacctaagacacatcttaccgattctgggggctctaatgcactggaaaaaacatcctctgtttatcataagggtcctctggttgcccaagacagccaggaggaagctcaagtcatcccagctgatgagaaagtagatggttctgcatcagagcatcatgaatcctctggtactccatacagttacaatgaaaaattaagtgcttcagcaccagccagaggagatattcatgatggtcacagtgcagaagagcaacataaaaattacactgccgatgatcagaaagtggctccatctctatcaaacaaagaaccagcatcccaagtgcaacctgcctctgaaccattacaaagagcagttcctgatggggatttgcctagcaaatcattcaccattgatcaatggcaacgcatggctgcttcattacatggtgtaattatggattctgctgatgatgaggcagccatatctcttaacaatgatcaaaagtcaagacccatgaatcaagaagcagctccaagttcacagagtgtcaatcagatggccaaacaatctggtgagcaaagggtcgaaccacctgtaccaattgttgtagaagcatctgatgttagacgtgctgcaccatcactcccagaagctgccagaactgatgttgccactatcagtgataaatttactgagcagtccaacattgatgaaagggtggggaaaccaaaacaaatgcaagcaccaattacatctgctcatcctgcttcaaaaggtaccttgagaagaactcctgatagtcatgaagctggtgagcttctcagcacatatgagggtcaaagattagaggctgcaaaagcttcacaagatcctgccacaatccacgaagatgtttatgatgccagtttgtcaactaatgatgtggctgttgataaaaagacagcaacagatcatgctattggtgatgaggttgtcacaagatctttacatgatcagcagacaccgcgacctgcatcaactcaagcacagccaactgctgaggctccacaagactctgattcattccaatatgtacgtactggtgacgtgggaaaaactgaattggcaaaaccaactgtaactgatcaagaagcaacagcgcctgcagctggcccaacatcagtcgatccccaacgtgctaacatcataccagctggagttgcccattctgaacagaaatccactccaccagataaaggatcagctcgtgttgcacaacctcctacccctgttgaaccaataaaggaagacggtaatgtttctgcagctaattatactaatgagctgcaaatgagttttcagcaacaggccagatcatctgcaccaaccacaataggaattccagcctcagatacccagagtgttatagggaaaatccaggtggtaactccggataaacatggcactgatgactcaggaaaaccatttgatctaaatcaaggacatgtttcacacgcatcacaagcaatccttggtcaagaagaactgacatctccacaaggcgcaagagtttttccaacgtcagatacccaacaaaattttgctgcatcagatgaaaaatctgataaggcctcaaaatcatttgactctgctgaaccaagggaagaagatacagatgctgccactgctgaccaaacgactgtaccaccgacagatgttactcgtcaggtcacaatctcgacaccagatgctagtgacagtgtatcaagggatcaggaatcctctcctgacgatagtcagaccagaaatttggggagcccacttattgctagtcaagaagaagcctctcgtgccggaggtgaaggatctactcctgaagtgcatagtaccattgtagatgagaagaagacacttccatctagccaagcacaatcttcaagcactgggcctgattcaatacaaattggtggtgatgctcgtcttagtgatgctggtgtgccagccacaagctctatagagaagcaagaggcagaacctcctgcagaaacacaagcaccaacttctaagggtctacaagactctggaagtatcgagtcaccaagacaagccttaactgatcaaaccgtggcacctgcgatgaactcagtggcaccatccgattctccagaaggtccaaattcttctcgatctgtacagaccccttatcaacaagccattacaaaaggagacactgttgttactgcagctgatcaagccgagaacatgcaaacaataacttatcaacaagccattacacctgttccatacacagctaaaccttcattcccaggtgctcaggatgcatcaaggcaggaaactattcctgatgaggggccaatggaaaattattctcctaaacctggagcacagacacagccacctgcagcaactctagatgtatcaccctatgcctcgagcaaggttaaatcaactgggcaaggagccaagccaccaacagggcaccaagcatcttctccagaaactcagcttggttcctcacaaccaggcgaagatgccccagcagtacaaaaaattgctgcatcagatgaaaaatctgccacggcctcaaaaccatttgactctgctgaaccaagggaagaagatactgatgctgccactgctgaccaaatgactgtaccaccgacaaatgttactcgtcaggtcacaagctcaacaccagatgttggtgacactttatcaagagataaggaatcatctcctgatgatgatcagatcagaaatttggggagcccacttattgctagccaagaagaagcctctcgtgctggaggtgaaggatctactcctaaggtgcatagtgccattgtagatgaagagagaacacttccatctaggcatgatgcacaaacttcaagcactgagactgattcaacacaaattgatggtgatgctcgtcttagtggtgttggtatgccagccacaagctctatggagaaacaagaggcagaacctcctacagaaacacaagagccaacttctaagggtctacaagactctagaaatattgagtcaccaagacaagcctcaacttataaaaccgtgacacctgcgatgaactcagcagcaccatccgatgctctagaaggtccaaattcttctcgatctgtacagacccctttatctactggaccaacaaaaggagacactgttgttagtgctgctgatcaagctaaggacatgcacacgataccttatcaacaagacattacacctagttcaaacacaggtaaacctccattccaaggtgctcaggatgcatcaaggcaggaaattattcctgatgatgggccagtgggaaattattctcctaaacctggagcacagacacagccgcctgcagcaattctagatgtatcaccatatgccttgagcaaggctaaatcaactgggcaaggagccaagacaccaacagggcaccaagcatcttctccgggaactcagcttggttcctcacaaacacaaggcaaggataccccagaagaacaaaatattgctgcatcagatgaaaattctgccaacacctcaaaatcatttgactctgctgaaccaaggggggaagatattgatgctgctactgctgatcaaacaactgtaccaccggcaaatgttactcgtcaggtcataagctcaacaccagatgctagtaaaactttagtaagagatttggaatcctctcgtgataatggccaaatcagaaatttgggaagcccacttattgctagccaagaagcagcctcccgtgctgggcatacttctgatgatggatctactcctgaagtgcatagtaccattgtagatgagaagaagacacttccatctagccaagaaaaatcttcaagcactgggcctaattcaacacaaattggtggtgatgctcgtgtgctagccacaagctctatagagaagcaagaggcagaacctcctgcaggaacacaagcaccagcttctaagggtctacaagactctggaaatatcaagtcaccaagacaagccttaactgatcaaatcgtgacacctgcgaagaactcagcggcaccatctgatgctctagaaggtccaaattcttctcgatccgtacagacccctttatctactggaccaacaaaaggagacactgttgttactgctgctgacgaagctaaggacatggaaacaataacttaccaacaagccattacacctgtttccgacacagctaaacctccattcccaggtgctcaggatgcttcaaggcatggaagtgttcctgatgatgagccagtgggaaattattctcctaaacagacacagccacctgcagaaattctagatgtatcaccgtattccttgagcaaggctaaatcaactggccaaggagccaagacaccaacagggcaccaagcatcttctccggaaactcagcttggttcctcacaaacacaaggcgaagctgccccagcagaacaaaaatttgctgcatcagatgaaaaatccgccaaggcctcaaaatcatttgactctgctgaaccaagggaagatacagatgctgccactactgaccaaacgattgtaccaccgacaaatgttactcaggtcacaagctcaacaccagatgctagtgatactttatcaagagttcaggaatcctctcctcacgatggtcagatcagaaatttggggaacccacttattgctagtcaagaagaagcctctcgagcgggaggtgaaggatctcttgaagtgcatagtaacattgtagatgagaagaagacacttccatctagccaagcacaatcttcaagcaccggatctgattcaacacagatgggtggtgatgctggtcttagtgatgctggtgtgccagccacaagctctatagagaagcaagaggcagaacctcctgcaagaacacaagcaccaacttcgaagggtctacaagacattggaaatattgagtcacaaggacaagccttaactgatcaaaccgtggcacctaagatgaactcagcagcagcatctgatgctccagaaggtccaaattcttctcgatccgtacaaactcctttttctactgagccagcagaaggagaaacaaattcaaccaatgaagaatccaagtcgcaacagaaagttggccagtttggtactcaatcatttaaagataacaacaaagaagctgatggaacagtaaggtctaatatatcgagatcaactgaggaactccaagaaccaccttcgaggcctaagggagaatcaagtgaagaaccagagaaccaacaactggctgaccaagctattgttaaaccactagagggtaatgagcagcaagctgaacagacaaaaccacatgagactgcaattgctgaggattcggaaaataccaatctgaagaacaacagaatatcacaagtggaaactttagattcatcaggaaagcaagcctcagtatttcagcagctaggaaagaacacaaaagatgccctcaactcaactgaggatgcaccaggtgatggaaaagcagttagtaaatccgagcacagctcgagatctgaagaatccaaggtgcagctacagtctgaagacaaggcacgagttcctggaactgatgcaccaagcttagaaactgggcatcctagcaacggaggccttcaagcaaatagctatcaggataacagtagccaatctcaggaagaagcttcaaacaaatctgtcgagcaatcttctggtattcggaacaaagacaatgactccagcagattggatgactcgaccggctccaccaagaccgagagttgaaaaactaagccctggtaattgataaacctttgtgctatggttcatcgaccaacacattatgtgagcaagtgttttgcgaattcatcgcttttcaatttttacccttttttctcatttgcttatccgttgtaagtctaataaggtcagctctgctgtcatcgttgggttatgccccctgtattcttgtgttgttcttgtccaagtacatttttacctttgaacaatgagtgagaatgcaatgatgtcgccattcctgtatattatca

SEQ ID NO: 144321 - DNA, 8681 bp, Zea Mays
atggaagggcttcgtattggagcaccaattgtgcaggtttatcatgagaaatcgtttatcttacctgatgtttcaagggtgcttgcttgcctttatgagaaggatgtcaagtttgagactcacacagcctcatacaggagcctactcagattgcaggcatcatctcatgctccagttccattctatgatggccctacttttctagaagaatccagagaaatctgccgttatatagcagaaaagtatgaaaatcaaggatattcattcctccttggaaaggatgcccttgagagggcttcagttgaacaatggctccacaacgaggagcatgctttcaaccctccgagccgggccttgttctgtcatttggcctttcccttgggtgaagaagatgatgatattgatgttcatacaaggaagctagaagaggttctggaagtttatgagcaaaggctcagtgacagcgaattccttgttggaaacaagttcactcttgccgaccttgttcacctgccaaattcccactatatcaaagcatctaacaagtttctttacctttatgattcgaggaaaaatgtaaggaggtggtgggatgctatttctgaccggagttcttggaaggaagtgctgaggtatatgaagaacgtggaggagaagaacaaacaagaagaactcaagaagcagcagcagcagcaggaagaggctccttccaccgacccaattcgggtagactcgagaaagcagagcagaacagagcctcggacaatattggttcctcctgctgataatgagtcatcagcttccatagttcctcgaacaaagaagcctcttcctggtgatcacttagtgtctactcaacaaggaaaatcaagaaaaaatgtgcatcagtacccatcacaagattcagaactggcaacctcacattctgttcctcaagaaccaatgagcatggaattggttcaagaacgagaaaggacgactcgaagaccctacactgatcagagtcaagatgtcttcaaagaggcaaaggttgctaagtctacaccatctagtgcaaaacctatgtaccctcaacaacctgctcctacttcagggcatggagaagtggaagatacttgggacaaaggggtgaaaggtagagaaactgttcctgaccgacaacaaatgttgcaaaaatgggcaggtacagccagagagcaagtttctgatcgttggaaagcaagtcctccatcaagacaggctgcagctgaagatgttcgtggtgccactggtgatacaacacagtctgcagatgttcttgacacttccaagaaatctagaggtgcctatgaagaagctaaaggccctggctctgttaaggaggagaagacatcctctatttacaagaagaagcctctggtggcacaagacagtcaggagcaagctcaaactatcccagctggtgagaaaacagatagttctatacaaaagcatcaacaagcttcggatgccccaaatacttttgttgagaaattaaatgcttcagaaccagcaagagtaaaaactcacagtgacttcagtgctgaacagccatatagaaaagacaccactgatgaccagaaagtgataccacctctttcgactagagaactaacttcccaagtccaacctccctctaaaccatcgtatgatgagaagccaacaccaatgagtcagcaaaaatctgataagcaaagagtggaacctccaatacaaatagaagcagaaatatctggtgttcaacatgcttcaccatcatttccaagagcttccatggatgatcgtgccactatcggtgataagtttgccatgcagtcaattattgatgaaagagttggagaaccaacacaaatgcaaacatcaagtccagatgctcatcctgcttcattacctactaagagagaaactcctgaaggtcatgaaattggtgatttagggcttgccagtacacctggtggccaaatatcagaagcaaaaaaagtgggagatgacccagacacagtccatggagatgtttattatgtcaatttgtcaactcaagatgtgggcaaggatgccttcaaagaaccaacggtcactgactctttaccatctagtgcccaaccgattcagaaatctgctattactccatcaaggcaaacacaagttgaagaagctagggataaaagcatgcaaagtagagaaactattcctgaacaacacaaaatggtggaaaggaagacaggtacacctggagagcaattatcagaacgccagaaggagattcgtccatcaagacagtcagcagctgaggatgctccaataagtgatgcaatacagcctccagacatccttgacactcccaagaaatctagagccacctttgaagaatatataggtcctggatctacattgcccaaagcacaaattttggatgctcaagattctcaggtcaccaaaggagaatctacagtgccaactactgaccaaaggaaggactggaaatatgaaaaagatgatgaaaccatcgtgactgaagaaaagtcactatcaacagagcgatctagggagatgttccaggaaagtgcatctactgcacctaagacacatcttaccgattctgggggctctaatgcactggaaaaaacatcctctgtttatcataagggtcctctggttgcccaagacagccaggaggaagctcaagtcatcccagctgatgagaaagtagatggttctgcatcagagcatcatgaatcctctggtactccatacagttacaatgaaaaattaagtgcttcagcaccagccagaggagatattcatgatggtcacagtgcagaagagcaacataaaaattacactgccgatgatcagaaagtggctccatctctatcaaacaaagaaccagcatcccaagtgcaacctgcctctgaaccattacaaagagcagttcctgatggggatttgcctagcaaatcattcaccattgatcaatggcaacgcatggctgcttcattacatggtgtaattatggattctgctgatgatgaggcagccatatctcttaacaatgatcaaaagtcaagacccatgaatcaagaagcagctccaagttcacagagtgtcaatcagatggccaaacaatctggtgagcaaagggtcgaaccacctgtaccaattgttgtagaagcatctgatgttagacgtgctgcaccatcactcccagaagctgccagaactgatgttgccactatcagtgataaatttactgagcagtccaacattgatgaaagggtggggaaaccaaaacaaatgcaagcaccaattacatctgctcatcctgcttcaaaaggtaccttgagaagaactcctgatagtcatgaagctggtgagcttctcagcacatatgagggtcaaagattagaggctgcaaaagcttcacaagatcctgccacaatccacgaagatgtttatgatgccagtttgtcaactaatgatgtggctgttgataaaaagacagcaacagatcatgctattggtgatgaggttgtcacaagatctttacatgatcagcagacaccgcgacctgcatcaactcaagcacagccaactgctgaggctccacaagactctgattcattccaatatgtacgtactggtgacgtgggaaaaactgaattggcaaaaccaactgtaactgatcaagaagcaacagcgcctgcagctggcccaacatcagtcgatccccaacgtgctaacatcataccagctggagttgcccattctgaacagaaatccactccaccagataaaggatcagctcgtgttgcacaacctcctacccctgttgaaccaataaaggaagacggtaatgtttctgcagctaattatactaatgagctgcaaatgagttttcagcaacaggccagatcatctgcaccaaccacaataggaattccagcctcagatacccagagtgttatagggaaaatccaggtggtaactccggataaacatggcactgatgactcaggaaaaccatttgatctaaatcaaggacatgtttcacacgcatcacaagcaatccttggtcaagaagaactgacatctccacaaggcgcaagagtttttccaacgtcagatacccaacaaaattttgctgcatcagatgaaaaatctgataaggcctcaaaatcatttgactctgctgaaccaagggaagaagatacagatgctgccactgctgaccaaacgactgtaccaccgacagatgttactcgtcaggtcacaatctcgacaccagatgctagtgacagtgtatcaagggatcaggaatcctctcctgacgatagtcagaccagaaatttggggagcccacttattgctagtcaagaagaagcctctcgtgccggaggtgaaggatctactcctgaagtgcatagtaccattgtagatgagaagaagacacttccatctagccaagcacaatcttcaagcactgggcctgattcaatacaaattggtggtgatgctcgtcttagtgatgctggtgtgccagccacaagctctatagagaagcaagaggcagaacctcctgcagaaacacaagcaccaacttctaagggtctacaagactctggaagtatcgagtcaccaagacaagccttaactgatcaaaccgtggcacctgcgatgaactcagtggcaccatccgattctccagaaggtccaaattcttctcgatctgtacagaccccttatcaacaagccattacaaaaggagacactgttgttactgcagctgatcaagccgagaacatgcaaacaataacttatcaacaagccattacacctgttccatacacagctaaaccttcattcccaggtgctcaggatgcatcaaggcaggaaactattcctgatgaggggccaatggaaaattattctcctaaacctggagcacagacacagccacctgcagcaactctagatgtatcaccctatgcctcgagcaaggttaaatcaactgggcaaggagccaagccaccaacagggcaccaagcatcttctccagaaactcagcttggttcctcacaaccaggcgaagatgccccagcagtacaaaaaattgctgcatcagatgaaaaatctgccacggcctcaaaaccatttgactctgctgaaccaagggaagaagatactgatgctgccactgctgaccaaatgactgtaccaccgacaaatgttactcgtcaggtcacaagctcaacaccagatgttggtgacactttatcaagagataaggaatcatctcctgatgatgatcagatcagaaatttggggagcccacttattgctagccaagaagaagcctctcgtgctggaggtgaaggatctactcctaaggtgcatagtgccattgtagatgaagagagaacacttccatctaggcatgatgcacaaacttcaagcactgagactgattcaacacaaattgatggtgatgctcgtcttagtggtgttggtatgccagccacaagctctatggagaaacaagaggcagaacctcctacagaaacacaagagccaacttctaagggtctacaagactctagaaatattgagtcaccaagacaagcctcaacttataaaaccgtgacacctgcgatgaactcagcagcaccatccgatgctctagaaggtccaaattcttctcgatctgtacagacccctttatctactggaccaacaaaaggagacactgttgttagtgctgctgatcaagctaaggacatgcacacgataccttatcaacaagacattacacctagttcaaacacaggtaaacctccattccaaggtgctcaggatgcatcaaggcaggaaattattcctgatgatgggccagtgggaaattattctcctaaacctggagcacagacacagccgcctgcagcaattctagatgtatcaccatatgccttgagcaaggctaaatcaactgggcaaggagccaagacaccaacagggcaccaagcatcttctccgggaactcagcttggttcctcacaaacacaaggcaaggataccccagaagaacaaaatattgctgcatcagatgaaaattctgccaacacctcaaaatcatttgactctgctgaaccaaggggggaagatattgatgctgctactgctgatcaaacaactgtaccaccggcaaatgttactcgtcaggtcataagctcaacaccagatgctagtaaaactttagtaagagatttggaatcctctcgtgataatggccaaatcagaaatttgggaagcccacttattgctagccaagaagcagcctcccgtgctgggcatacttctgatgatggatctactcctgaagtgcatagtaccattgtagatgagaagaagacacttccatctagccaagaaaaatcttcaagcactgggcctaattcaacacaaattggtggtgatgctcgtgtgctagccacaagctctatagagaagcaagaggcagaacctcctgcaggaacacaagcaccagcttctaagggtctacaagactctggaaatatcaagtcaccaagacaagccttaactgatcaaatcgtgacacctgcgaagaactcagcggcaccatctgatgctctagaaggtactgaaccaggtccaaattcttctcgatccgtacagacccctttatctactggaccaacaaaaggagacactgttgttactgctgctgacgaagctaaggacatggaaacaataacttaccaacaagccattacacctgtttccgacacagctaaacctccattcccaggtgctcaggatgcttcaaggcatggaagtgttcctgatgatgagccagtgggaaattattctcctaaacagacacagccacctgcagaaattctagatgtatcaccgtattccttgagcaaggctaaatcaactggccaaggagccaagacaccaacagggcaccaagcatcttctccggaaactcagcttggttcctcacaaacacaaggcgaagctgccccagcagaacaaaaatttgctgcatcagatgaaaaatccgccaaggcctcaaaatcatttgactctgctgaaccaagggaagatacagatgctgccactactgaccaaacgattgtaccaccgacaaatgttactcaggtcacaagctcaacaccagatgctagtgatactttatcaagagttcaggaatcctctcctcacgatggtcagatcagaaatttggggaacccacttattgctagtcaagaagaagcctctcgagcgggaggtgaaggatctcttgaagtgcatagtaacattgtagatgagaagaagacacttccatctagccaagcacaatcttcaagcaccggatctgattcaacacagatgggtggtgatgctggtcttagtgatgctggtgtgccagccacaagctctatagagaagcaagaggcagaacctcctgcaagaacacaagcaccaacttcgaagggtctacaagacattggaaatattgagtcacaaggacaagccttaactgatcaaaccgtggcacctaagatgaactcagcagcagcatctgatgctccagaaggtactgaactaggtccaaattcttctcgatccgtacaaactcctttttctactgagccagcagaaggagaaacaaattcaaccaatgaagaatccaagtcgcaacagaaagttggccagtttggtactcaatcatttaaagataacaacaaagaagctgatggaacagtaaggtctaatatatcgagatcaactgaggaactccaagaaccaccttcgaggcctaagggagaatcaagtgaagaaccagagaaccaacaactggctgaccaagctattgttaaaccactagagggtaatgagcagcaagctgaacagacaaaaccacatgagactgcaattgctgaggattcggaaaataccaatctgaagaacaacagaatatcacaagtggaaactttagattcatcaggaaagcaagcctcagtatttcagcagctaggaaagaacacaaaagatgccctcaactcaactgaggatgcaccaggtgatggaaaagcagttagtaaatccgagcacagctcgagatctgaagaatccaaggtgcagctacagtctgaagacaaggcacgagttcctggaactgatgcaccaagcttagaaactgggcatcctagcaacggaggccttcaagcaaatagctatcaggataacagtagccaatctcaggaagaagcttcaaacaaatctgtcgagcaatcttctggtattcggaacaaagacaatgactccagcagattggatgactcgaccggctccaccaagaccgagagttgaaaaactaagccctggtaattgataaacctttgtgctatggttcatcgaccaacacattatgtgagcaagtgttttgcgaattcatcgcttttcaatttttacccttttttctcatttgcttatccgttgtaagtctaataaggtcagctctgctgtcatcgttgggttatgccccctgtattcttgtgttgttcttgtccaagtacatttttacctttgaacaatgagtgagaatgcaatgatgtcgccattcctgtatattatca

SEQ ID NO: 144322 - DNA, 1060 bp, Zea Mays
ttcacaccatttcagcattgtaccctatgttcatgccaccatggaagggcttcgtattggagcaccgattatgcaggtttatcatgagaaatcttttatcttacctgatgtttcaagggtgcttgcttgcctttatgagaaggatgtcaagtttgagactcacacagcctcatacaggagcctactcggattgcaggcatcatctcatgctccagttccattctatgaaggccctacttttctagaagaatccagagaaatctgccgttatatagcagaaaagtatgaaaatcaaggatatccgttcctccttggaaaggatgcccttgagagggcttcaattgaacaatggctccacaacgaggagcatgctttcaaccctccgagccgggccttgttctttcatttggcctttcccctgggtgaaggagaagatgatgatattgatgttcatacaaggaagctagaagaggttctggaagtttatgagcaaaggctcagtgacagcgaattccttgttggaaacaagttcactcttgccgaccttgttcacctgccaaattcccactatatcaaagcatctaacaagtttctttacctttatgattcgaggaaaaatgtaaggaggtggtgggatgctatttctgaccggagttcttggaagaaagtgctgaggtatatgaagagcgtggaggagaagaacaaacaagaagaactcaagaagcagcagcagcagcaggaagaggctcctagaacctccaccgacccaactcgggtagactcgagaaagcagagcagaacagagcctcggacaatattggttcctcctgctgataacgagtcatcagcttcgatagttcctcgaacaaagaagcctcttcctggtgatcacttagtgtctactcaacaaattgatggtgttggtatgccagccacaaattgatggtgatggtcgtcttagtggtgtttgtcttgtcttttattgtttggttctttaacaagagttatatttttaccttctgaccaaagagttgtttaacaggatagtcattgtacgaca

SEQ ID NO: 144323 - DNA, 2000 bp, Zea Mays
ctctttcgctccgctttctcaatcactgggcctgggggagatcgagacctagagcggaggacgggtgggcggcgctgagggccttaggcgaatggcggtagaggaggccgcggagagctgcggcagccacgccgcggccgctgcgtccggcggcggcgcggcggagctcgctacgtcctcgtcatcggccgccgcggcggtgcaggcgcggaagcagcagcagcagcagcgccataagctcgaggtgtacacagaggttctccggcgcctccacgacgccggcctgcccgacgcgcgggcgcccgggttcgacgacgagctctggaaccacttcaaccgcctccccgcccgatacgccatggatgtgaacgtggagagggcggaggacgtgctcacgcacaagcggcttctggagcaggccaaggatccggctcagcgcccggctttcgcggtgcgggccgtgcaggtatctccaattcttgatgggaatcagactgatgctgattcgaatactgcaggggaggaagtcgcttcaagactgttgaacaggcagcagagcatacatcctcctcctgcctttggttcttctacaaatcttgaggcccttgctcttgaagctagcaagtctcatcaagatcacgatagcacctctgataattgtcgatccctgtacaggcccatgcatgaaatcaccttttcaaccattgacaagccaaaacttctcagtgagctgacatctctgcttggtgagcttggtctcaacattcaagaagcacatgcattttcaacaaatgatggctactcacttgatgtatttgttgttgttggttggcatgatgaggaaacagaggatttagtagaagcagtgcagaaggaaattggcaggattgaagagacacaagcatggtcttcatctcattcatggtctactccagttgaaaacatgcagattgctgagatttcagcagctggccgtgttgagataccaacagatggtgctagtgaatgggaaattgatgtaaaactgctcaagtttgggaataaagtagcatcaggatcatatggtgatctttaccggggtacatattgcagtcaagatgttgctattaaagtgctgaaacctgagagaataaatgcagacatgcagcgtgaatttgcccaggaagtatatatcatgaggaaggtacgtcacaagaatgttgtgcaatttattggtgcttccactaaacccccaaatctatatatagtgacagaatttatgtccggtggaagtgtgtatgattacctccataaacataaaggtgttttcaaacttcctactttagttggagttgctatggatgtgtcaaaaggcatgagctacttacaccagaataatattattcatcgtgatttgaaaactgcgaaccttctgatggatgaaaatgggactgttaaagttgctgattttggtgtcgcacgtgttaaagctcaatctggagtcatgactgcagaaactggtacttaccgttggatggccccagaggtcatagagcataaaccctatgatcagaaggctgatgtttttagttttggaattttgatgtgggagctactcacagggaagattccttatgagtatctgactccactacaagcagctgttggcgtggtgcagaagggattacggcctacaattccgaaacatacttatgcaatgctttctgagcttcttcagaaatgttggcagcaagaccccgctcaaagaccagacttttccgaaatattagaaactcttcagagaatagcagaggaagtcggagacgagcacgaggggaagcacaaggacagaacactgggtggtttcttttcagctctgagggggcggagccattgagacacggttgaagacttgaaatgtacatggcctcggtccatcctggaaggatctgaactacaaccagctcctgttccccgcacatagcgacagtacacagaaatactgtacagacatgctgcag

SEQ ID NO: 144324 - DNA, 127 bp, Zea Mays
tttttttttgtttggtttaatttttttgttagtcttaacttagtagcccctcttggatcaatcctggatccgccactaatcctcctcgcccaagaccagaatgacttcatagtcgaacccagctagg

SEQ ID NO: 144325 - DNA, 2086 bp, Zea Mays
tgcgattgcaaatagttttagatagatttccgattcggatccaactggttgccattctttggcaacctaagctatttggtttagttctcaaaccactatctgacatgtggacccagcacaacaagaaaaatctagtaacgcggcggctggctcttctcgcgctaccgctctcttgaaggaagtctccgtccccgcttctgattcactcccccacatcgccatatgtcgccggaggccggaccaatcatgcggcccgccgaccagctactcctcccgttcctcctcctggccgttgcctccgtcgctgccgccggcggctcgtgggagaatggatatgggagcatcctccgcctcccctcctcgtctccgcgccggttcccccgctccgcggccgtcgacctgatccacgcgctcaacctccaccccgccgacgcgtcccctcccctctccaccgccggcgtagagggcgccctcgcccccgcggggaccctcgtcgagaggcccatccgcatcgcgtccttcgcgaacggaggcgccgccacgtcggtggaggacctcggccaccacgcggggtattaccgcctcgccaacacccacgacgccaggatgttctacttcttcttcgagtcgaggggccacaaggacgaccccgtggtgatctggctcacgggcgggcccggctgcagcagcgagctcgcgctcttctacgagaacggccccttcaacatagcggacaacttgtcgctcgtctggaatgattttggttgggacaaggcatcaaatcttatctatgtcgaccagcccactggaactgggtttagttacagctcggattcgcgtgacactcgccacaacgaagctactattagcaatgatctatatgatttcctgcaggccttttttgctgagcacccaaagtatgctaaaaatgatttcttcataactggggaatcatatgctgggcattacatttcctgcctttgcaagtcgtgtgcaccagggaaacaagaacaatgagggcattcacattaacttgaagggttttgctattggcaacggactaacagatccagcaatacagtacaaggcataccctgattacgcattggatatgggattaattacaaaaacacaatttaacaggatcaataaaatagttccaacttgtgaattcgcggtcaagctttgtggtacttctggaactgtatcttgccttgctgcgtactttgtctgcaatacaatattcagtgccatcaggacaatcataggcaataaaaattattacgacatcaggaaaccatgcatcggaagcctatgctatgatttctctaatttggagaaattaaatcgaatctttttttccctacgacctacggttggtgatatagagtttgtttcatgcagcccaactgtctatgagggcatgctattagattggatgaggaaccttgaagttggaatccctgaactccttgagagcgacatcaaagtgttgatttatgctggagagtatgacctcatatgtaactggcttgggaactcaaggtgggtaaactctatggaatggtctggaaaggaagcttttgtgtcctcatccgagaagcccttcacagtcgacgggaaagaagctggcgttctaaagagccacggtcctttgagtttcttgaaggttcacgatgctggtcacatggtacctatggatcaaccgaaggctgctctggagatgctgaagaggtggacttctggaaacctttcggagccatcttcaagctcccagaggcttgattttacaatgtaacaaaacacacatgctgctcatgacatttcgagcatgtacctctggatgtttgtaggctcagaaaaggtcctggtcttaggctctgaaaacctcatctggcgaccatacgttatttaccttgtatgggcgctccgcttgctggtgagacacggtgttacgagttacgactcgatgaacatgtaataaagcttttcagagaattgctaggccaggcatagatctgaagtaccttttgtgatgacttgcgtcgatacgtatggaccgtacaattcatggtatgctactaag

SEQ ID NO: 144326 - DNA, 116 bp, Zea Mays
ttagacattctctctgtgagtctcctcacctttttgcatgttattagagccctgctattcaaaatccttttcatctcaaattttgtcactatctaaaactaaaaaaataaaataaa

SEQ ID NO: 144327 - DNA, 1969 bp, Zea Mays
gacatgagcatctgaagacacgcagtgtggcagtgtgctgtgcacaccacacgatgcacaagcgctgaagataaagcaagcaccagatcgtcccgacgacagtactagccactagctagctagcgtcgcgatggttgacctgcgcctccaggtcgtcgccaccgtcctgggcgtggccctggcggccgctgccgccggcagctccagcggcaagcagttcgagttccaggaggccaccgtggacgccatccaccagggattcaggaacggcagcctcacgtcgacggcgctcgcccggttctacctggagcagatcgcccgcctcaacccgctgctccgcgccgtcatcgaggtgaacccggacgcgctcgcgcaggcggcgcgcgccgacgcggagcgcgccgcctcgcgcgggcgctgcgccgtcgggctgcacggcatccccgtcctgctcaaggacaacatcgacacgcgcgaccggctcaacaccacggccggctcgctcgcgctgctcggctccgtcgtcaggcgcgacgccggcgtggtggcgcgcctccgccgcgccggcgccgtcatcctcggcaaggccaacccctccgagtggtctaacttccgccccgtcgcctccggctggagcgcccgcggcggccagacgctgaatccatatgttctctcggtaaccccatgcgggtcaagcgctgggcctggcgttgcggcggcagccaacatggcggcggtgacacttggatcggagaccgacggctccatcctctgcccgtcgtcgctcaactcggtggtcgggatcaaacccactgttgggttgacgagccgatccggtgtcatccccatcacgcctcttcaagacactattggaccaatgtgtcgcacagtttcggacgccgtccgtgtgttggacgtcattgtcggctacgacgagcttgacgctgaagccaccggagcagcgtccaagtacatcccacacgggggttacacgcagttcctgaggaccaacggactgaggggcaagaggatcggtgtccccgacgtattttttcaaggatacgacgatatgcaactggcggtctatgagaagcatctcgatacaatgaggcaacaaggcgccgtcgtgatcatggatcttgacatcgcaacaaatttcaccgatctgggtaaccaggagattctgctcatggctgcagagttcaagataagcatcaacgcttacttgtcgggcctactgtactctccagtccgctctctcgcacaagtcatagcgttcaacgaagcgcatcctgtagaggagaggctcaaagattttgggcagccggatctgatcgccgcggagaagaccaacggcatcggcacaagggagagagctgccatccggcggctgagggagatctccaccaatgggctggagaagctgatgaaggaacgccgcctggatgcgatcgtggcgcccaacagcgacgcctcctctgttctcgccgtcgggggctatccgggcatcgccgtgccggcggggtacgatgagcaaggagtccccttcgcgatctgcttcggtgggctccagggctacgagccgaggttgattgagatcgcttatgcgttcgagcaagctacaaaagtcagaagaccgcctactttcaagagataaagatagctaactagcatgatgacacgcagtagcagtaagggatccttcaaactttttttgtggtgttattatttgaggaatcccttgctatatgaatgactcatcgtgagaccatttcattttttttgttcgataaatccaaccatcaacattaattagcagtgtgttggtttgatgaacgaggtggttcatcatcttctgacttatcactttttttctttgtttgatttgttagaattaaatgagttgatccatgtcattttatttcttatatgctaataattaaaaataatattaaaaataaattcattt

SEQ ID NO: 144328 - DNA, 1281 bp, Zea Mays
atggaagcttgccccctttggggcgcctcgtgtgatgcatgcgagaccaaatggaaagcaacaaccggaagaaatgcaatgggtacgcgcgcgtacgtagacgagcgacgacacgagtttgctggcgatacgccaacgaccaacgcctcaaccaccggctcgcgcgggcgcctcgctcaccgcgagcagagagagcggcggcgggcgcgggcggtagtagggcagccacgcctagcgaccttttcatcaacaacgaaacaaagcacaaagcaacaaggacgacgacacagcacagcacacagcagacaggcgcgctcgctagcactcgggcgtgagcgagtggtccctgcggaagtcgttgcagtagtagtagaccatgtggccctgctgcgcccagcgcatggccgcgtactgccgcggcgtgagcccggcccccgcgggggacgccggcacgggcctgcacgcgggcggggcgctggcggagcagccggcgacgacgaagcggtcgaggcgcgcgacgaagggctggtagcggtagtcggcgcggtggcggccgtcgtcggtggcccagtcggaggcgtcccagatggagccgtagacccacatggggcggtccgggaaggtgagctcggtgcggcgctcgtagcggcggacgggcacgtcgtccacgaagaaggtgatggcgtcggggttccacaggatggcgtaggtgtggtaggccgccgtggggtcgaaccagaggtggaaccgcatctcccgccccacgatgcgcccgtcgccgctgccgcgcacgtacacgttcgtctgcagcgtgtagggctcccccgggatggtgcccaggaactccatgtcgatctcgtcgtggaaaccagggtgcgcctcgttgttggagagatagaaggcggtgttggtgccggcggtgtatccggcggggagcttgatgcgagtggagaagtagccgttcctgtacgcgtgcttcgacttgaaaccactccctcaggtcttgtcgagccagatggtgagggcggaatggtcgccggagagcgtctggtgctgcgggccccacttgttggtgtacgctcggttgaacggcaccggcctgaacctggagctcgggtagtaccccggggaaggctgcgcgtcgccggaggaggcggccatcgccgccagcagcagcagtgccggcacgacgacggcggcgcgccgcgagatgcagcggcagcagctgctgctaggacgagcaggaggagccgccgcagccattgcttgctagctagctag

SEQ ID NO: 144329 - DNA, 2192 bp, Zea Mays
cggtagggatgcaacaaagccagtggtaattttaccaccaagccttaccattttcgtgtacctccctgactgttgacgccatcagccatgatcgtgcacgaccacactccaaccaccaaggcaatcaaaatgtccttaatgtgggggcaaacggctcacatgccatatactaaacatccttgagacgccctatgtcagccgccgggctatgcattgttgttgttccgtggagttcacccacccaaatcaccaagggggacaacatacaagcccttctgttcttggcccttctcatcaccattctcgcccagttcatcgctcctccaggtcgtctgaaccaggcttggacgagcagcaacatcaagaacagcaatgagcgatggttcagggttcccgggcttccacagccacagctatgaccgaagctattcgcgcccgttgttccaggttgcctccttctccgacagtggagacgagcaggagaatcatgtgtcgtcaccacagatgtgcagccatagcacgagccgcacaatgccggcaaaaccagtagcgccgtcatgcctctcaccgtcggtgagcaggctgagcatgaagaaaacacagcaagttattattgttgagaagtcaatggaggaggaagagatggagctgatgaaggagaagtacacgaagttgctgcttggggaggacatgtcggggagcggcaaaggtgtctgcactgctgtggccatatccaattccatcaccaacctatatgcaacagtgtttgggacctgccacaggttggagccactgtcccctgagaagagatcaatgtggaacagggagatggattgcctcctctccatttgtgaatacattgttgaattctcacctactgtccaggccatgcctgatggaagcacacatgatgtgatggcaacctcaccaagatcagatatcctgatgaaccttcctgcactcgaaaaactagaaacaatgctcctcggtatattggatagctttcacaagccagagttctggtatgcagaccagaggaaccaatccttcaaagaaagcaagaaatcattccagcgaagtgaggataaatggtggttacctgagccatgtgtcccagactctgggctgtctgattgcatgcaccgtgaactgcagcagaaaagagaccaggcaagccagatccacaagatggccatggaaatcaacagcagtattctctctgaaatgcaagttccattatcatacttggagacacttccaaagagtgggagggtgggtgtaggagacaccatctaccggtatatgtcttcaggcgatcagttctctccagagcacctcctcaacttcctcagtttgagctcagaacatgatgcacttgagattgcagaccgtgttgaagctgctatgtacgtgtggcgaagaaaagcaagtgcaacacatgtggtgtccaaatgggagaatgttaccgagctgaatgctgatggagacaagaatctggtccttgccagtagggccagaagcttactcctgtgcttgaagcagaggttcccaggcctgtcacagactaccctggacacaagcaagattcagtacaacaaggacattggacatgcaatactggagagctactcgagggtgctggaaagtttggctcataatatagtctcatggatagatgatattctcattgccgatgaaaatgtgaaaaaaggacacaaaatcaggatgcagaagcaggtgttcagccagatttctccacaacgctgaacacagaaaactaacatacaaatacatatatattatgttgcatagaatttctgtggtttgcctcattaactttttctggagtggtgtatgcttgctcatttgtttgagatagggctgtgtgttagatataatgatgtatgttacatatgtaaatcataatggaaatggatgagagaaagggttgcaaccagaaacttacagtttgattctgttgctgtttcatggaacatattctccataatctatacaataagcattttactttaactttggaatggcataccctgggagagttataatatcaagaaatgattctgttctggtatagacatggaacactggtctatgtttttatgaatcaaaatcagttcttacaatctcggtcctccagattgctgtgaacaacaaaattagataatatgtag

SEQ ID NO: 144330 - DNA, 3318 bp, Zea Mays
tgagttatgatggagatgattctgtctgagttcacaaaacatgttatcagctcacttgtcaatttagcaagtaatgaaatagccaaagttttgtgcatcagaaacgagattagcaaactggcaagaaaacttgagagtatgagagctatcattacagatgcagaacaggcagttgtgcaaaacgaaactactagggattggctgaagaggtcacgagaaattatttatgaggctgaagacataaatgaccgatataatattgaaaaggagaagttccaaatatcacagccgcaggaatgcaatccttcatcaatctttaagtgctgcagagatgttggtattgactgcatagtcgcaagtgatatacatgaactgcatcagaaacttgacagcatcattgaagagggtaagagactgcatgtacggccggcgagtgaggatcaaataagattagatcaaacaagatcatatcttgacattccacttctagggcctgatattgttggcatggaaaacgactgtgaaaatctcattgaactactaataaagggagatgatattccccctcaaaaaaagcgagatgatattcctattcgtcctttccttgctattataggaacaattggaattggcaagactactcttgctagaaaggtataccacaagacagaaacgttttttcagattagggtatgggttcatgtctccaaagacttgcggcatatgacaatgtggtcaggtgagagattgagtaaaggagatactgcagaccagctggaagagctgcgccaaatgttacgagacaataaatatctgctggtcattgatgatgtctggggagagaatgtttgggaagggttgctaaaggaacaagcgcattatggcagccttggcagtagagtccttataacaacccggaatgagcatgttgcgaggaggacaggagcagttcatattcaccatatgaagggtttgaatgaggatgatggttggtggctacttcgtacaatggctttccttgatgagagcactggaaacatgcaagatattggtaggcgaattgtgcaaaagtgcaatggtcttccaatggcaataaggaggattggatgccatctaagggaagtggaacttaaagaagatgactgggagagaatctactccagtgatttctgtggcctttcttcgacgataagaaatgctatcaataagagctaccttgagttgccatataatctgaaaaggtgctttctttattgctcattgtatccagagggatctgtgattgatcggcagtgtatcacccagcagtggattgcggaggggtttattgtgacccagcaggacgcatctgttgaaaaggaagctaaagaatgctatgacaaattgttgggtaggggccttcttttgcaagaaaatcgaacttatggtgcagagagaacgaagatgcctcatctcttcagatcatttgcacttctccagtcacaagatgaatactttattggcaatcctcaagacataggtgatgctttgaggccgtaccgcttaactattacaactggaggtgcagaggcgatcagaaattgtattagaaagttgaagagcttgaggacaataatcctgtgtgggagttcactaaatgacaggaccctggattctatttttcagaagtacacacatctaagagttctagatcttggaggagatacacagattgaccgtgttgcaaggagtttgggatccatgatgcaccttagatatcttagctttgcaaacacccaagttagtgagattccatctgacattgagaaacttaggatgttgcagttcttaattctaaaaaattgcactcgtcttaatgctctcccagaatcccttggccgcctaacaaacttgagaacacttgacatctcaggatgtggactaaatcgagtgaaatttggattctccatgatgaaagagctcagatgtctgcagggttttcttgtaagctcaagaggttcagaaaatagaaatggttggtcatttcaagagctggggtccttgtataagctgacaagcctcaagattcttaggctagagaaaacatcaattgtggaagatgcagtacaatcagcactacaggcaaaacatgatctcaaagagcttgaactatgctgcagcactgatgatggaacggcagaaattagtagagcagcaaaaattaaagatgtgtttgaagcactcaagccaggaccttctattgtctctctcaagctagaaaactattatggtcatggattcccatcttggctagatccattccatctccgagatctagagcagttgaccattgatggctgtttgcattgccaatatctcccatctctgggtgagatgaagaatctaaaattcctagcaataaatggttccaatttgtcaactcacattggacatgaaattcgtgggacgctagatgatggggtggcatttccgaagctggagcagctggttatcagtaagatgagcaacctgaagtcatggcagggcctcaaagaaatagatatgccttcactcatgaatttcaggatcattggatgccccaagctggactcacttccttcctggctcaagcattgtacggcattgagaagtttgcatatagatcatgctgacaacctggaatcaattgagaacatacctgcacttaaagaacttgaagtttgtgagaacagcaagctgaaggtgatctcgaaccttagaagacttgaagatctgaaagtggtggcttgcttgcttttggatgttgtgcaggatgtcccctcattgtgcaccgtgcattcaaatgaaaagaattcaaccaagcttccgcagtggctacagccagaaaaacctttcatgctcaggagattggagattgttggaactgaggagctacttgataactgctcctctgcaacggccccatactggcatattatccaaaatgctgatcacgtatatgcaaatctgccagatggctccttctacttctcatatgccaaaagcagtagctacttccacagaagcgcaaggagccttgcacggtcccctttactgagcccagctagcttcagtgtgccgattcttccacaagatgaagtagtttcgactgatgaaatcagaaacatcagcgagccaattggtcaatcctcaagtcggtcatggatgaggatacttttcacagttctccttcttcttgttgctcgtatcttttcattgtcaagcgagtattgatcacggatgagttctgtgtttgggcaccctaaatgttgattactatgctattgccattctgaattc

SEQ ID NO: 144331 - DNA, 936 bp, Zea Mays
ctccgtcagtttgctggccagcaagcggccttgggattggattggagctctcatcagctcctatcttatcaccagagccagacagacagtcatcgtctccgatccgatccatctccgtcttcgtcctcctcgctcgacaacccaccaaggagcaagagaagaagatcgacgacgacgacggctgccctctgcgttcctcaagggctgtggaactaccggttccggccacgcttcccaccacacatgaacacaaggatctcttacgctgatgttgcaaacccagatgagcttgatgaggaattcgacacattcccaacctccaagagcccagatctcattcggatgaggtacgacaggttacggcatgttgctgggaggatacagacagttgttggggacattgccactcagggagagaggctacagtcattgctcagctggagggacccaagggcaacagctatgttcctaatattttgcttgattactgccattatactatatgtgacaccattccaagcgatcgcactctgccttgggttcttctcgatgaggcatcctcggtttcgccacaaggtgccatcagcaccagcaaacttcttcaggaggctacctgcaaagacggattctttgctgtaaagttccttggaagacagctgttaacaatgtctaatgtacctctttgttgtacctgtttctgtcactcatatatcgttgtataatagccttatactttcgtttcctgctttcagaaattaagaagacattgaaacttctgtatggcatgaaatgtatgtaaggtgcttgcttcaacaataatttcttcaattagtcaagtttgtcatggtgaaagactactgactttggtaaccagatatatacttacagttacgaagctgagacttcgaatatcatctcccacattagtttcaaagt

SEQ ID NO: 144332 - DNA, 3664 bp, Zea Mays
aacgttttgcagcgaccccttgttttgctctccgtcagtttgctggccagcaagcggccttgggattggattggagctctcatcagctcctatcttatcaccagagccagacagacagtcatcgtctccgatccgatccatctccgtcttcgtcctcctcgctcgacaacccaccaaggagcaagagaagaagatcgacgacgacgacggctgccctctgcgttcctcaagaataatactccgttgcgtcccgtcccttccgtgctccaagaaagatccggctgcgggccacacgatgagcaatcttaagcttggcgtcgaggttaccagcgctcacgatctcctcccgaaagagcagggcacggcgaaccctttcgtggaggtcgagttcgacggccagaagtcccgcacggccatcagggacagggacctcaaccctgtctggaacgagcagctctacttcaacgtgtctgacccgtcccgcctcccggagctgcacctcgaggcctacgtgtaccacgcgaaccgtgccgacaactccaagtcctgcctgggcaaggttcgcatatcgggcacgtccttcgtcagccagcctgatgccgaggccctgcactaccccctggagaagcgcacgatcttgtcgcgcgcgcgcggcgagcttgggctaagagtcttcctcacggacgatccatcagtgagcgtgtctgctgctaccccaggaggtcaccaccaccaggagttcgacatgctaagcacgcctaccactgctgcacaggagcagcaggcagcagcagcagccagctccgttccaaaccctttccaagagaccagagcaaacccagtgagacaggtgcagcacttgccaagggaacagcagcgtcctgcacagccatacccataccacgccgccgatggaggttcgtactacggagaccagcagcagagaagcttctccgcggtcgcgaacaaagccgcagccccagcgcctcaggttcaggtatcaaggatgtacgctccaggtccacagcagcagcccatagacttccagctgaaggagacaagcccgacgctgggtggtggccgtgttatcggcggccgggtgtaccccggcgagaaggccggggcgtacgaccttgtggagaagatgcagtacctcttcgtgcgcgtggtcaaggcccgcgacctgcccaacatggacatcaccggaagcctggatccttacgtggaggtgcgccatgggaactacaagatgaaaaccaagtacttcgagaagaaccagaggcccgagtgggacgaggtcttcgcgttccccaaggaggtcatgcagtcggcgacgctcgaggtcgtcgtcaaggacaaggacgtcatccgggacgactacgtcggccgagtgagcgttgacctgagcgaggtccccctgagggtgcccccggacagtccgctggcaccggagtggtaccgtctcgtgggcaaggacggcatgagggacagaggggagctgatgctcgcggtctggtacggcacccaggcagacgagtgcttcccgagcgccatccatgcggggtcaacgccggtggagtcccatctccacagccacatccgcgggaaggtctaccctgcgccgaggatgtggtacgtcagggtcaacgtgctagaggcgcacgacgtatacccgatggcggagaaccgcgtgcctgatgttctggtcaaggtgaggctgggccatcagctgctcaacacgaggcaggttcgctcgccgacgagaaacttcatgtggaacgacgagctcatgttcgtcgcggcagagcctttcgaggacgacctggtcgtgtcggtagaggaccgtgtggcacagaacaaagacgaggtgatcggtgaagctgtcataccactcgccaggcttccgaggcgggctgaccacaagccggtgccgccgcagtgggttgatctcaggaggccaggactgatcgacgatgtggaccagctgctcaagaagaaggaagacaagttctatgcgaaggtaagcctccgtgtctgcctcgaaggcggctaccatgtgctcgacgagtccacacagtactgcagtgatctccgtccgacgatgaagcagctgtggaagccacccatcggcatgcttgaggttggcattttaagcgccaacggccttaacccaacgaaacccagaaacgaccgtgggtcctgtgatgcgtactgtgttgccaagtatggttcaaaatgggtccggacgcgcacgatagttgacagcctgagccctcggttcaatgagcagtacacgtgggaagtcttcgatcacggaaccgtgctcaccattggtctgtttgacaactgtcacataagtggagacaacggctcctctgcaggccacatggataaacccatcgggaaagtcaggatccggctttcgacgcttgagacggggcgtgtgtacacgcactcgtatccgttgctcgtcctcggcccgtcaggagtcaagaagatgggcgagctccatctcgccatcaggttcacagccgcgtcccttatcaatgtgctcttcacatactctaggcccctcttgcccaagatgcattacgcgcagccgctgtcgatagttcagcaggagatgctgcgccaccaggctgtgcagcttgtcgcgcagcgcctggggcgcatggagccaccagttcgcaaggaggtcgttgagttcatgtcagatgctcgctcccacctgtggagcatgcggcggagcaaggctaacttcttccgtctcatgcaagtcttctcaggggtcatcgctgcgggcaagtggtttggggatgtttgccagtggaagaaccctgtcaccacagtgctggtccatgtgctctttgtcatgcttgtgttctatccagaccttatcctgccaacagtcttcctctacatgttcttgatagggctgtggaactaccggttccggccacgcttcccaccacacatgaacacaaggatctcttacgctgatgttgcaaacccagatgagcttgatgaggaattcgacacattcccaacctccaagagcccagatctcattcggatgaggtacgacaggttacggcatgttgctgggaggatacagacagttgttggggacattgccactcagggagagaggctacagtcattgctcagctggagggacccaagggcaacagctatgttcctaatattttgcttgattactgccattatactatatgtgacaccattccaagcgatcgcactctgccttgggttcttctcgatgaggcatcctcggtttcgccacaaggtgccatcagcaccagcaaacttcttcaggaggctacctgcaaagacggattctttgctgtaaagttccttggaagacagctgttaacaatgtctaatgtacctctttgttgtacctgtttctgtcactcatatatcgttgtataatagccttatactttcgtttcctgctttcagaaattaagaagacattgaaacttctgtatggcatgaaatgtatgtaaggtgcttgcttcaacaataatttcttcaattagtcaagtttgtcatggtgaaagactactgactttggtaaccagatatatacttacagttacgaagctgagacttcgaatatcatctcccacattagtttcaa

SEQ ID NO: 144333 - DNA, 551 bp, Zea Mays
aacgttttgcagcgaccccttgttttgctctccgtcagtttgctggccagcaagcggccttgggattggattggagctctcatcagctcctatcttatcaccagagccagacagacagtcatcgtctccgatccgatccatctccgtcttcgtcctcctcgctcgacaacccaccaaggagcaagagaagaagatcgacgacgacgacggctgccctctgcgttcctcaaggctgtacaactactaatgctactacaggctgaacactggataattcagccacaacaccaccacatgtcattcagttactttactctaagtcttctacttcacgtttagcaaaggcttttttttatgtatcttcttgttaattgaattgttaactttatttttcttttaaacatagatggattaaggatctttaacatatgttttttttgttattctctcgagacctaaatgttcatcgatcaaatttgtcactgtgtatgcaactatgtttttgtatgtcactgaaactacctataaaattatcaccatgtatcagtgta

SEQ ID NO: 144334 - DNA, 439 bp, Zea Mays
gccaggactgcgatgacattcaccatagcagcttctattgttggccagacagttggggtcaagggctaagtgcagttctaaggaatcaagtgacaaagggtattggtgattcttcaacaaatactgctatttaaccaatcaagaatggacattgcagcaatactgaaggcaaggcatgggaccctcttgcaacaaagataacatgctcaattgctaggggttctcctgcactaaccccaagtatgtgcttctaattctgttaagcgtgtgattcacacaaacatgtgaagagattatacctgaacaagtttatcttatagtgccatgtaattgccttgtgtgtcccacaaaactgagctgtcgatggacgaaaagtagaataagaggtgccactgtagcaatatggtaccacagtttgctgttttgaaaatttgtaagt

SEQ ID NO: 144335 - DNA, 537 bp, Zea Mays
atgcagagagctgcggagaggagagagaaagtgtggaaatggggagtgcagagaaagaagaagaagaagagctcaccattttcgtcaggttcagacaagccagggatcctctcggcgaccaggccctggttggccgccagaccacggcctgcaaacccaagcactgaggcgacagctgctgtggaagccaacacacgcctccccaccaccactgctacaccctcctcttcatgccccactgacagggagggcccgctgaagcacgtcacagccgcagccgccgccctgtccttggcgacggcagaaggtttggcgaggaacagggaggagctcggggagagcagcactgtcatctctacaggatggcgtttcccctgcttgcctctctggttgttcctggtgtgggacgatgggctgctggagacttctcttctgttcgtttgctggatccatgctgcggaggcagttttcgaccacaagacatgggtggacaggatgatcttcagagttcagacacgtctcgcctacattgtttga

SEQ ID NO: 144336 - DNA, 989 bp, Zea Mays
ggacattggctggattagtagcattgatcgtatgcagtatctacatggaaatcatcaaaatttttattttatcctgaatttacattgttatgtctaggttggatcaaggattaatggaaggttactcctgcccaacttgtcggagaccgctcgtattgtcatctgaagggcaaacaaggtctccgattgtggaggcagcaaatgttcagcgaatcgcagaacagcttactatggggatgaatcagcagagagtttctggtaatgaacatcctgttgaacagcagaacccttcagatgctgtttggaggggtgctggtctggatgctagctggattccaccgtggtcaagccctgtgatagataatcccagttcctctagtgcagtgaggtcagtaggtctttctggagttcagatgatgatgaggcagttggcttctgtgaccgacagttatgggcatgctgatggtacctggaacctatggcccgagcccatggcagggtcctctcttgttccatccacttcctcgatggtgcctggtagtgcatctgcttccggattgcggctccgtggtagtgcaggcacaggcaatggaagtctttcagaggtactcactatggtagatagggtgcgggaagttctacctcatattcctgacgagctaattatagaggatttgatgaggacaaacaacataaacgcgactgtgaataatcttctgctgatgcaatagtagatacgtcaatacaacatataagtatgacgtttactggctgtaaaagcttataagaaaagtatgtgtatagttaaaggcgagcctgggtgtaacaacactcttcgatcctgtaataaaatccttttctctctctttatttttgtccgcagggatttgtttgtatagtaaccatagctgtataattatcatactcggtatgctataggttagtgtatttagaaaagatcggaataaaatttgttttgggactaaata

SEQ ID NO: 144337 - DNA, 1959 bp, Zea Mays
cctttccaatggccatttggcctggaatctttattttggttaatactagctgtctgttacacctgttgtatggatcttaaatatcgctacattctgaaacactatatgtggacctttttgtcattcacaattaattatctctaaagtaaatgcaaaacattcaacagatcatcaagtcatagagattcatattataagccctatgaatacagctgtgcatggttgatcacatcctacacatagcaacacagataaaaaaacaatgcacataaaaatcccaaatggtggagcttgtcactcaaatattggatccctaggtttagctagggccctgaatgtataggttacagtcctaccagttcttttggcttttttggcttctctttggcagcttttgctgctttgtaatcctcactattcttctctttatctataagatgtgcagttctcctgcgtgttcgataaataaatcttcataagttgtaatgataaactgttaatttttaaaactgccatgaaagtttgtgtgcatactgtgcgaagctcagtacttccttagtccttcatgacttatctcacagcgatttctgttgtcagtctatcatggtgcatgggtttcagttatttgacatctggcaacgacatctaatggaaagtggtgcggactttcttgatttccagaaatcttataagcaagcagcaggatctttttctgaatggaggggcaagcttactagggactttggttttgctattgatttgataagcatgttgatgtcatttggtcattactcgatgatcttttggcttcgtggtatggcgtttcatctggttgatgcagttctcttatggaacttgcgtgctcttatagtttcctttttgaagaggattaaaacttacatcaaattacggaaggcacttagttcactcgacggagcacttccagatgctacttatgatgaaatttgtgcatatgatgatgagtgtgccatctgcaggggaccgatgggtcgagctaaaaagttgtcctgcaaccatctatttcatctagcttgtttacgatcatggttggatcaaggattaatggaaggttactcctgcccaacttgtcggagaccgctcgtattgtcatctgaagggcaaacaaggtctccgattgtggaggcagcaaatgttcagcgaatcgcagaacagcttactatggggatgaatcagcagagagtttctggtaatgaacatcctgttgaacagcagaacccttcagatgctgtttggaggggtgctggtctggatgctagctggattccaccgtggtcaagccctgtgatagataatcccagttcctctagtgcagtgaggtcagtaggtctttctggagttcagatgatgatgaggcagttggcttctgtgaccgacagttatgggcatgctgatggtacctggaacctatggcccgagcccatggcagggtcctctcttgttccatccacttcctcgatggtgcctggtagtgcatctgcttccggattgcggctccgtggtagtgcaggcacaggcaatggaagtctttcagaggtactcactatggtagatagggtgcgggaagttctacctcatattcctgacgagctaattatagaggatttgatgaggacaaacaacataaacgcgactgtgaataatcttctgctgatgcaatagtagatacgtcaatacaacatataagtatgacgtttactggctgtaaaagcttataagaaaagtatgtgtatagttaaaggcgagcctgggtgtaacaacactcttcgatcctgtaataaaatccttttctctctctttatttttgtccgcagggatttgtttgtatagtaaccatagctgtataattatcatactcggtatgctataggttagtgtatttagaaaagatcggaataaaatttgttttgggactaaata

SEQ ID NO: 144338 - DNA, 2191 bp, Zea Mays
tggatccacttccctccccacgtgttttttgattgttcctccccatgttcctcgcgttcccgtgaggccgtgacgcccccctcggcctcgcctcgccatcgctcgcggcatcgccgcctgccccctttcccccacgcgaataaagcgccggaagcgcgccccccaagcaaagtcctccggcgctcaggatcgggagccaccccctagggttagggctccgttttgcctcgttccggcgtcgaccgatgcgcggcgcatggcgacggtgaactgcctctacgtcgcggccgcctccacggcggtaagcaccgctgctctgcagtggtgggcgtcctcgctcctcgacggcgacgctggggccggcggggatggagactggcttggagccgtgctgcggtcaagggtcaccgtcgcgctcctggcgaatctggcggcccacgtgttcgtcgttgtcatcctcgcgctcaagactatattttttgttcagctaacttctgtagagaccagaaaagtgttggagcacatcattaactatgtacttcacaagggaacttttctcccgctggctgtgcctccaacttctcagcaaattatcctttggtcaacttggttggtcattctttgttcactgaagatgtttcaatcattggccagagaacgtctagagcagctcaatgcttctccctcagcgactccttcaaaatattttcgtgtgtactctgcattgcttctggttttatcagctgatctactttggatgtggctcagtgtagggttctgcagatcctgtaattccaagttgttttggctcctgttctttgagccacttagtattgcctttgatacgctgcagttatttgacatctggcaacgacatctaatggaaagtggtgcggactttcttgatttccagaaatcttataagcaagcagcaggatctttttctgaatggaggggcaagcttactagggactttggttttgctattgatttgataagcatgttgatgtcatttggtcattactcgatgatcttttggcttcgtggtatggcgtttcatctggttgatgcagttctcttatggaacttgcgtgctcttatagtttcctttttgaagaggattaaaacttacatcaaattacggaaggcacttagttcactcgacggagcacttccagatgctacttatgatgaaatttgtgcatatgatgatgagtgtgccatctgcaggggaccgatgggtcgagctaaaaagttgtcctgcaaccatctatttcatctagcttgtttacgatcatggttggatcaaggattaatggaaggttactcctgcccaacttgtcggagaccgctcgtattgtcatctgaagggcaaacaaggtctccgattgtggaggcagcaaatgttcagcgaatcgcagaacagcttactatggggatgaatcagcagagagtttctggtaatgaacatcctgttgaacagcagaacccttcagatgctgtttggaggggtgctggtctggatgctagctggattccaccgtggtcaagccctgtgatagataatcccagttcctctagtgcagtgaggtcagtaggtctttctggagttcagatgatgatgaggcagttggcttctgtgaccgacagttatgggcatgctgatggtacctggaacctatggcccgagcccatggcagggtcctctcttgttccatccacttcctcgatggtgcctggtagtgcatctgcttccggattgcggctccgtggtagtgcaggcacaggcaatggaagtctttcagaggtactcactatggtagatagggtgcgggaagttctacctcatattcctgacgagctaattatagaggatttgatgaggacaaacaacataaacgcgactgtgaataatcttctgctgatgcaatagtagatacgtcaatacaacatataagtatgacgtttactggctgtaaaagcttataagaaaagtatgtgtatagttaaaggcgagcctgggtgtaacaacactcttcgatcctgtaataaaatccttttctctctctttatttttgtccgcagggatttgtttgtatagtaaccatagctgtataattatcatactcggtatgctataggttagtgtatttagaaaagatcggaataaaatttgttttgggactaaata

SEQ ID NO: 144339 - DNA, 877 bp, Zea Mays
ggacattggctggattagtagcattgatcgtatgcagtatctacatggaaatcatcaaaatttttattttatcctgaatttacattgttatgtctaggttggatcaaggattaatggaaggttactcctgcccaacttgtcggagaccgctcgtattgtcatctgaagggcaaacaaggtctccgattgtggaggcagcaaatgttcagcgaatcgcagaacagcttactatggggatgaatcagcagagagtttctggtaatgaacatcctgttgaacagcagaacccttcagatgctgtttggaggggtgctggtctggatgctagctggattccaccgtggtcaagccctgtgatagataatcccagttcctctagtgcagtgaggtcagtaggtctttctggagttcagatgatgatgaggcagttggcttctgtgaccgacagttatgggcatgctgatggtacctggaacctatggcccgagcccatggcagggtcctctcttgttccatccacttcctcgatggtgcctggtagtgcatctgcttccggattgcggctccgtggtagtgcaggcacaggcaatggaagtctttcagaggtactcactatggtagatagggtgcgggaagttctacctcatattcctgacgagctaattatagaggtttgtgcctgtctcgcacagctctggtcgtagttgattcttgcgacttttacacacactgatgccttgtctgttcccatttctcgctgtaggatttgatgaggacaaacaacataaacgcgactgtgaataatcttctgctgatgcaatagtagatacgtcaatacaacatataagtatgacgtttactggctgtaaaagcttat

SEQ ID NO: 144340 - DNA, 103 bp, Zea Mays
cggatagcgaagatggttgcgcagactgttggtaactcagtatccgagtttctgtcgggcttcagcgatgggaagacagactcggcagcgagagtttccctcg

SEQ ID NO: 144341 - DNA, 207 bp, Zea Mays
tacatgtcttatgactacccatttataattttactcattggagctatttgtttataggaaatccatggcctccatggcgaaggtgtttctgttgagaatatctcttctcagctttcaccatgggcatctgcactctgagtttttgtccccttttataaggaagcatctactactacatcctgaatctgatgattcagctcaactttc

SEQ ID NO: 144342 - DNA, 93 bp, Zea Mays
cttcctctaaaactcagactccatctgggcacggtattcagctatttcccgctcagcctcctcttttgcttgcctaagcctcgctgacttggc

SEQ ID NO: 144343 - DNA, 1389 bp, Zea Mays
gcgtcggagttggcagcgatcaccaccgcccttgccgaagtccagcgccaactaggggccttcgcaacgcagatgtcctccatgtcctcgcgcattgcagcagtggagactccgcctgcatcaggcaaggaagaccccctccagtggctcaatcgatgcgaacaattctttgaaggtcagcgcacgctggaggatgagaaagtctggctcgcatcctatcacatgacaggaattgcccggacgtggtacacccagctacagcgcgacgaaccttccatgtcatgggaactcttcaagcagcattgccaactccgctttgggcccccattacgcagcaatcctctcggcgaactggcacgccttccattccgcacgacagtggatgactaccaggagaggttttgggacctgctagcccaaacagctccactgtcacaggagcagaaggtacatctgtttacggctggacttccggagcgtatcaagatcgacgtggaactcatggcaccacgggatatcaatcacgccttgagtttggcgcgcgcatatgaacggaggtcacaagtgctcgatcaccagccgacatcaaccaccaacaagaccatgcgtcaaccccaacgcccgtctgtaccagtaccggcacctcaaccagcgattcctgcagctcccagtacaggacagcagcgaacattcaagaagttgacgcctgccgagatggctgagcggcgtcgccagggactttgttataattgtgatgaacagtatgtccgtggacatcgctgccctaaattgttctatcttgaggtcacggactatgaggaagatgaatctatagaggccgattcagtgccaggggacccaacaccagtgatctccttacatgccctcacgggtatccattctgagagtaccttgcagctggaagtacatatcatggggaaagctcttacaaccctgttggacacaggatctactcacaacttcatcaaccaagacacggcacgcgctctgaaactggactaccagccaagcccagccctccaggcattttgggacctcgagaacctgtgcctagctttctggagaaggggacaacgaattgtgtggaaaggactgggatcagatcggaaggccattaatgtgtacccagcagtgagaacaattagcacagatatcacaaccaccaaaccgatgatggatcgtctgctcctgcaatttcagaaggtgtttgctacgcccagtgaccttcctccagcaagaaggtgtgatcacaggatccaccttttgccaggaacagcacccgttgcagttaggccatataggtacccacagcttcaaaaggatgaattggaggcacaatgcacagccatgttacaacaggggattatc

SEQ ID NO: 144344 - DNA, 277 bp, Zea Mays
gatgtcatatatttatgaacggatggagtatctcttaataagtaggtgcatgtgaaatacattttgcaatatcacggtttggaggctaccggattttgccgaattacagtgcaccaactcaaatcaaatgaaatatcttcatgcctgctttgacagtataaagacccgatggtgcccaatccgaacttcatggaagcgcccaaggtggcgaagaacctggaagacagtcaacgtaagcaacttccattgctaacaaaacgagtaggcaggaccagca

SEQ ID NO: 144345 - DNA, 1502 bp, Zea Mays
tcgatgttcagcttgattcgtataataaattgccatttttcattactgtgcttgtagagatgttgtgattgcagagacgtagcatgttttttctagacaccagcagctatcatacagaaactaattatattggttgatggatttaaatctacttgtgctacaggcattccgttttagtgcagacaaagagtttctgaggcaatcaagagttgttcgagtaggtctaattcagaactcaattgctgttcccactacttgtcactttgctgaccaaaagaaggcaatcatggacaaaataaaacctctaattgatgcagccggcgcttctggtgtcaatattatgtgcttacaagaagcctggacaatgccttttgccttctgcacacgcgagaaaagatggtgtgaatttgctgaaccagttgatggagaatctactcaattccttcaggaacttgcacagaagtataacatggtaatagtgagcccaatccttgaaagggatataaaccatggggagactatttggaatactgctgttgttattggaaacaacggcaacataattggcattcatcgaaagaatcacattccaagagttggtgatttcaatgagagcacatactacatggagggtaacactgggcatccagtgtttgaaacagcttatggcaaaataggagtgaacatttgttatggaagacatcatccccttaattggcttgcgtttggtctcaatggagctgaaatagtgttcaacccatctgcgactgttggtgaactgagtgaaccaatgtggcccattgaggcaaggaacgccgcaattgcaaacagctacttcgttggatcaattaatcgggttggcacagaagtgttccctaatcctttcacatccggtgatgggaaaccgcaacacgcagactttggccatttctatggatctagccatttctcagcacctgatgcctcctgcaccccatctctatcacgctaccgagatggcttgatcatctccgatatggacctcaacctatgccgccagatcaaagacaagtgggccttccgcatgactgctcgctatgagatgtatgcatccttgctctcagagtacttgaagccagatttcaaacctcaagtcattgttgatcccttgattaataagaaggcataaaaactgaggtatgctggatacttgggcttaaaaggaggtcatttgtgtattgacatgaacaggaaaaggtttaccatttagcagaataatgtctacgatgaagatgcaaaatggaggaagtttctttctttttttttcctttacatttccacatactgtaaaaatgtgtttggtgtagtttgagcttcttttactcaatattcgaaacagtaatgcttgttttgttgtataatttgctagagatttttcgatgaagaaattcaacaatctttaaaccaccgagaataacttagaaactccttcaaacataatgcttaattagttcaagatggtt

SEQ ID NO: 144346 - DNA, 527 bp, Zea Mays
ttcactactgcgatttacgcgcacgtcaccggcccacgttaatagcgcaagtataccaaactgacgagaaatattaaaacgaaaagcgagagcgacgacaactcaccaataacttaatatgtcttgaaggccatgagcacagctacgattttcaattctgccattacctcgagcacctcgcgagtgacactgtggacgagtcgaggacacaggatacgaaggcacggctggtggtgtcctgcagctaaagccagcgagctgcgaaggacgcagttcggcgcgcgcaaccaaggcgtacagaggaaccggggtgtcgggcgcgtgtgcgcggcaacgcacggccaacgagtaaagacggcgcgacggccatgatacaggcgagctggatgccggcaagctgacggcgctgggaaactcgcgagcaggatctggagcagccatggcgagctagagacgaacggtcggacatggagcagcacaacagcgcacgacgaggagtctagctcggcagcttctgggagccaagc

SEQ ID NO: 144347 - DNA, 109 bp, Zea Mays
gtatttcttgccttgttaacttagccgaagtaattaactattactcttttacatattggaatagtgcccttggccatttgcataacaaagaagaggctcctagccaatt

SEQ ID NO: 144348 - DNA, 3254 bp, Zea Mays
tcgtcttctcccccccgtcagagcgagactgcgagagacagcgcgaaggtagagagagtgtgtggaacagtggaagcagcagcaaacgcgaccatggcgggtggcgccggcgggcgggacccgctcgtcgcctccgagatccacggcttcctcacctgcgcagacttgaactttgacaagctgatgatggaggctgggacacgctggttccggccgaatgagatctatgcggtgctggcgaactatgcaaggttcaaggtccatgctcagcccatcgacaaaccaattagtggtactgttgttctatatgatcgtaaagttgtccggaacttccgtaaagatggccataactggaagaaaaagaaagatggcaagactgtccaagaagcccatgaaaaactaaagattggtaatgaagaaaaggttcatgtgtattatgctcgaggagaggatgatccaaatttctttcgcagatgctactggctacttgacaaagagttggagcgcattgtcctcgtgcattatcgtcaaacatctgaggaaagtgccttaccaccttcgcatgtagaagctgaagttgcagaagtgcctcggatcaatatgattcattacacctcctcaacagattcagcctctgctcatactgagctatcttcttctgctgctgctgcaccagaagatatcaactcaaatggtggtggggcggtttctagtgaaaccgacaatcaaggttctagcctggaatcattttgggtagatctattggagtcatctatgaaaaatgatactcctgttgatgcttctgcttgcggtggatctttggtatcaaatcagcagactaataatgggatgggagattctggaaataatatcttgtatattaatgccacaagtaatgctatcttttctccaccaactaatgtggtttcagaagcttatgctaatcctggccttagtcaagtatcagagagttactttggatctctgaaagatcaagcaaaccatgctccatctcttttaacatcagatctggattcacaatcaaagcaacatacaaattctttgatgaaaactccggtgtctgataacatgccaaatgatgtacctgctaggcagaacagtcttgggttatggaaatacttggatgatgatattagtttagatgataatccaagctcgggcatactccccactgaacaggtgactggcgaaataccctttcagatcactgagatatcctcagaatgggcttattgtactgaggacacaaaggtccttgtggttggatgtttccatgagaactacagacatctggctgggaccaatctcttctgtgtcattggtgaccagtgtgttgatgcaaatattgttcaaactggcgtttaccgtttcattgctagaccacatgctcctggacgagtcaatctttatttgactttggatgggaaaacaccaatcagtgaggttttgagttttcactatcgtatggtgcctgacagtcaaaacttggctgaggatgagccccaaaagtcaaagcttcagatgcagatgagactagctcgattgttgttcaccacaaacaagaaaaagatagcacccaagttacttgtagaaggaagcaaggtttccaatctcttatcagcatcgacagagaaggaatggatggatctgtcaaaatttgttactgattctaaaggcacttatgttccggccactgagggattgcttgaactagtactgcgtaatagattgcaagagtggcttgttgaaaaattaattgaaggccacaagtcgactggccgcgatgatctaggacaagggcctatccatctgtgttcttgcttgggctatacttgggccattcacttattttctttgtcaggattctccttggatttccgtgattcttctggttggacagctttgcattgggccgcatactgtggaagggaaaaaatggttgctgctcttttgtctgctggagcaaatccaagcttggttacagatcctactcatgatgtccctggtggacaaactgctggtgatctggctgctggacaaggttatcatggcttagctgcatatctttctgagaaagggctgactgctcattttgaggctatgtcactgtccaagggtaagcgatcaacatcaaggacagagtcactaaaacggaataccaaggaatttgaaaaccttagtgaacaagaattgtgcttacgagaatctttagcagcctaccgcaatgctgctgatgctgctagcaacatacaagccgcactcagggagcgaactcttaagcttcaaacaaaagcaattcagttggccaatcccgagaatgatgcatctgcaatagttgctgctatgaggattcagcacgcataccggaactacaacagaaagaaaatgatgagagctgctgcaagaatacagagtcatttccgaacatggcagattaggaggaacttcatgaacatgcgaagacaagctatcaaaatacaagctgcatacagaggtcaccaagtgagaaggcagtaccgcaaggtattatggtccgttggagtagtggaaaaagctatcttgcggtggaggaagaagagaaaaggcctgcgtggcattgcaactggaatgccagtagcaatggccacagacgcagaagcagcaagcactgcagaggaggactactaccaggttggtcggcaacaagccgaggacaggttcaatagatcagtggtacgtgtccaagctttgttccgttctcatcgggcgcagcaggagtaccggaggatgaaggttgctcatgaggaggccaaggtggagttcggtcgaaagtagttaagacgggcatagattcaagatctgaagtgacttgttgttccttgtagggggttggctagttcttctagttctttgtatatccgaaggaacaggcgtagcttgcggatgacgtacattctaggaacatctgacgctcgtagtcagtctgccaactgccgttaggcttcttctgtggtgtgtatttggctgggttttagttgggcgaaaacggcattgtgctttattaggtttgatttgtatggacggacgcgagtacgaataaggttgtaaatgctgataataatttcacctgactataaatccaggtggattgcaggcaccatttgttttttttctttatttgatgttttttccttggcagtaccgctacgtacaaccattatacgtcttgcttttgtgataattcactccagcac

SEQ ID NO: 144349 - DNA, 514 bp, Zea Mays
ggttcagaggctatggatgttgctgctgcccctgctgtgcaggcattggcaagatacacacgacgagaggcaacttgtctgtcattgactgacagagattctatgttctctggaaacttcaaattcacaaccctggtgccggcaactcccagccccagcccaaagaagcatgggcgatgaactgccgtggtacatcaatatttcatacgaagatttttaaacagcaggatcagtggatatatgtcattctctcagcaatacaaataacaggcttcttccattgattgtttattccggggtcctcacgattcgaacccttttgatggaaatacttcgttctagataggatttttttatttaactcaagtgtatttgctctagtagaccacccaccagaatggaccctttttgtctcttttcatggtatcatagtagttgatagaatttacgttgattaaagtttatcaaatttagctggatttataaaagaaatatcaacaatatttgtattttt

SEQ ID NO: 144350 - DNA, 522 bp, Zea Mays
ccccccaagcagccgccgagacgcgaagcgcgagcgggagaccatgtcacggtggcgcgcggccgcctccagcatctccgccgccgccgcgtcccgcaactccgcggcggaggcccgcgtcctctccagggcattggcgaaggccccctcgccacctccgcttcctccccaaaccctctcgagaaccttcgccaagtccgctgccgccactgccaccgccacgtcgcccggccctggcgccacctccccgcccgccgggacgtggtccgagatcagactgaattctatgttcttatccaagccctgttcattagcgttgccacctgactctcctcatagagcagtggatccacaatttaaaggcatcaggcgattccttctcacactgttgttgttctacagtaagcaaagcaagtccatcagaggagcaaatgttgtttatgatcgaatcacttctcaagttgatacacctgccatttatgatgtttttcagttggagaaaacatttaagacaacattttc

SEQ ID NO: 144351 - DNA, 1100 bp, Zea Mays
gtcatggatgttcatgggcacacggccaccacaccgcggcgcgtggccagcgcagcgaatccatccccatcctcatgattataaataaataataattttacacgcccccttctctctcgatttctcgcggagcggccctccacctttatcgccgccgccgccgttgctgtgttccgtctcttcgccgatggcttcggccaagagaatgatgtcaggacctcctgcttctggatatgaccggtcacctctattttacggaggaggtggtggcgccccacctccaattccgcttggaactggtagctatggtgctccatatccacaccttgggatgcgatatggctatggtccaccagtaggacctcctggttcatacggtcttttctcttcatatggtccacctgggccaatgagtggtatgggatatggcccaggacctgagctaggccgatatagctatgggtttagaggttctccaatgccggtttctagtccatggtctggtggagcattagctgaaaacaatgacaacattgcttcacgaaagcgccgtggaggccctgatggactttctgagggtgactggacctgtcccaaatgcgacaacattaacttttccttcagaagcacttgcaacatgaagaaatgtggagccccgaggccaactccgggaggtaacacgagctcatctcgcaaggacaacagcaataaggaagcccctgaaggaagctggacctgcccagagtgcaacaacctgaactacccattccgcacggtgtgtaacaggaaaggatgctcgtacagcaagccagccccggcgaacaactgaacccaaccttcgcgcatcgtcgagatattgttgtacccgtagattgtatcctagtcgtgtgcaatctttgaactgcacaaagatgtttgtgcctggagacgagagattcgattcgttacgcttaatttactattatacttttttattaaatgatgaaaactagggaagagcattatatctataaactcttagtagtctgctatacacagcaattgacatcaattgttgcagctctcgagacattaatccttgaaccacgcaacatgttctc

SEQ ID NO: 144352 - DNA, 1302 bp, Zea Mays
acccgagttttggttacccattgtcatggatgttcatgggcacacggccaccacaccgcggcgcgtggccagcgcagcgaatccatccccatcctcatgattataaataaataataattttacacgcccccttctctctcgatttctcgcggagcggccctccacctttatcgccgccgccgccgttgctgtgttccgtctcttcgccgatggcttcggccaagttcggtgctgcccagcaggtggagaaccgaggcgcgctgtccaaaaggtcacgtaacgacgtgtctgtaagggagggggactggaattgtcctcagtgtggtaatgtcaacttcagttttagaaatgtttgcaaccgtggagcctgtggtgcaccccgtccatcaccgagtccaagtccaagaatgatgtcaggacctcctgcttctggatatgaccggtcacctctattttacggaggaggtggtggcgccccacctccaattccgcttggaactggtagctatggtgctccatatccacaccttgggatgcgatatggctatggtccaccagtaggacctcctggttcatacggtcttttctcttcatatggtccacctgggccaatgagtggtatgggatatggcccaggacctgagctaggccgatatagctatgggtttagaggttctccaatgccggtttctagtccatggtctggtggagcattagctgaaaacaatgacaacattgcttcacgaaagcgccgtggaggccctgatggactttctgagggtgactggacctgtcccaaatgcgacaacattaacttttccttcagaagcacttgcaacatgaagaaatgtggagccccgaggccaactccgggaggtaacacgagctcatctcgcaaggacaacagcaataaggaagcccctgaaggaagctggacctgcccagagtgcaacaacctgaactacccattccgcacggtgtgtaacaggaaaggatgctcgtacagcaagccagccccggcgaacaactgaacccaaccttcgcgcatcgtcgagatattgttgtacccgtagattgtatcctagtcgtgtgcaatctttgaactgcacaaagatgtttgtgcctggagacgagagattcgattcgttacgcttaatttactattatacttttttattaaatgatgaaaactagggaagagcattatatctataaactcttagtagtctgctatacacagcaattgacatcaattgttgcagctctcgagacattaatccttgaaccacgcaacatgttctc

SEQ ID NO: 144353 - DNA, 947 bp, Zea Mays
acccgagttttggttacccattgtcatggatgttcatgggcacacggccaccacaccgcggcgcgtggccagcgcagcgaatccatccccatcctcatgattataaataaataataattttacacgcccccttctctctcgatttctcgcggagcggccctccacctttatcgccgccgccgccgttgctgtgttccgtctcttcgccgatggcttcggccaagttcggtgctgcccagcaggtggagaaccgaggcgcgctgtccaaaaggtcacgtaacgacgtgtctgtaagggagggggactggaattgtcctcagtgtggtaatgtcaacttcagttttagaaatgtttgcaaccgtggagcctgtggtgcaccccgtccatcaccgagtccaagtccaagaatgatgtcaggacctcctgcttctggacctgtcccaaatgcgacaacattaacttttccttcagaagcacttgcaacatgaagaaatgtggagccccgaggccaactccgggaggtaacacgagctcatctcgcaaggacaacagcaataaggaagcccctgaaggaagctggacctgcccagagtgcaacaacctgaactacccattccgcacggtgtgtaacaggaaaggatgctcgtacagcaagccagccccggcgaacaactgaacccaaccttcgcgcatcgtcgagatattgttgtacccgtagattgtatcctagtcgtgtgcaatctttgaactgcacaaagatgtttgtgcctggagacgagagattcgattcgttacgcttaatttactattatacttttttattaaatgatgaaaactagggaagagcattatatctataaactcttagtagtctgctatacacagcaattgacatcaattgttgcagctctcgagacattaatccttgaaccacgcaacatgttctc

SEQ ID NO: 144354 - DNA, 1058 bp, Zea Mays
acccgagttttggttacccattgtcatggatgttcatgggcacacggccaccacaccgcggcgcgtggccagcgcagcgaatccatccccatcctcatgattataaataaataataattttacacgcccccttctctctcgatttctcgcggagcggccctccacctttatcgccgccgccgccgttgctgtgttccgtctcttcgccgatggcttcggccaagttcggtgctgcccagcaggtggagaaccgaggcgcgctgtccaaaaggtcacgtaacgacggtgaggcacttccccactctgatctgttgttcgctcgcttgttagaccgggagttagggtttagtcaagttgcaaacgggagatcttctcgtgcaggatttgctcttttttgtttaggaattagcgattgatcaatcgcaaggccagctgaggcataattgagagacaggagcggctctaatagatgccattaggagaatgtgcgctaaagctgacataggttcaccagagtcttttgtaaggagttcgtctcctttgtaaggagacaatgagttcggggaaatcgactatgtttcactcttctactgaattgttgttgtttttttgttagctttaggcacttcatggtggcagtgggtcgtcgttaccattttagggcttgttcggttagctctcaatccatatggattgagtgggattgggtgggtttaaattccaactaagtcaaactctttcttaattttttccaatctcatccaatccataggtaacgggattaaccgaacaaggccttagtctatccgagtcctcatggataacaatttttagttctataaggggatatttcatactaccatgccttttatctaatttgattctgattagtaccttgttagttacactcgtggttaatcttatgcctgtctaaagtacttgctggagtttgagaggccgtcacgtgaaggcggaaggatgattttgtaaagctatgtgacacaataaaatagcttctttctttgtgcagagttcatggatgtataatgtattcattg

SEQ ID NO: 144355 - DNA, 408 bp, Zea Mays
atgcggtctcactttgtgttatttgttgcccgtgtgatcagcgatcattctctccttggtgttaatgcgcagctgaacgcttccaacttggttcatttgactctcgtagtacctcttcctcttcaggcactgcattgctgcctgcttgtttcccgactttgtgaactccttggcccgttccacctcttgagagatcttcttttgcaggaccacctctttcgccttgaagacatcgacaacctgcttgagctggtcggaggcggagcactcgtcgcggcagccgcggaggatccaggcgaacatggccgcggcgacagactcacacttgcagcgtcggcggcagcggctactgacaggagagcggcgcggagcaacggcaacggccggagaggagagagaagggggtaa

SEQ ID NO: 144356 - DNA, 1340 bp, Zea Mays
ggagtggaggtcaaatagcgaaaggacgcacgaaccccaggaggcaccgtctccaaagtccaaaccctaaccctagcgcccccaactcgtcgccgggagatggccatggacgcggagcggcggcaagcggagctgatcgcgcagttctcctctcaggcggtggctctttcgtccgcgcagcagctcgccgctctggtgctcgaggccacctcccacccggccctcttcgccttctccgagctcctcgccctcccggccctctccatgctcgctggcactcagtactcgtcttcactggacttgctccggctcttcgcctatggcaccttgaaggactataagaataattcgggatcccttccagcattgttgcctgatcaggtccgaaagctaaagcaactcagtgtgctaactctggcagagtcaactaagatactaccatatgatcagctcatgcaagagttggatgtttccaacgtaagagaactcgaagattttctaatcaatgagtgcatgtattcaggtatcgtcagaggcaaactggatcagctgagaagatgctttgaagtacaatttgcagctggaagagatcttacacctgatcagctaaacaacatgatagagatcttatctgactggttgggaacatcagatagcctgttgcatcaaattcaggagaaaatcaaatgggctgacacaatgagtgatgtgaacaagaagcaccagaaagaatttgaagacagagtggaagaggccaaaaaatcaattaagcaggcagacatcgacatacgagggcatgacgactacctctctgaatctgtaggaataatggattttgaagaggaccgtgtccgaccaaagaggaggcgacaaccactggcgtagtttcaattaagcccttacaaatctctcctacaatgggaactgctgataccttgattgagacattttgacgccagagcgaggaagcattgtacatttgtcatataatgcctccagtagtccagtgtagcgagtcagatattttgccttctggtcaaactgctcgcgtgtgtgtgttttggtagggaatgtacaggttcaaaccttgacgttatgttgtattttttggtagatgacccatggtagaaatagcgctgttatggttatggcactgggtttttctccaagtttcatttcgttctgtcatgttttgatgttttgtgtggtggggtgctcgcagggtcgtggccatgggcgctgcaggtgccctatttgccattgatgtgacgtgaatcttcgccgtttttaattttaagatgatatagatccgttccaatttttggctgtgattttatacc

SEQ ID NO: 144357 - DNA, 1337 bp, Zea Mays
ggagtggaggtcaaatagcgaaaggacgcacgaaccccaggaggcaccgtctccaaagtccaaaccctaaccctagcgcccccaactcgtcgccgggagatggccatggacgcggagcggcggcaagcggagctgatcgcgcagttctcctctcaggcggtggctctttcgtccgcgcagcagctcgccgctctggtgctcgaggccacctcccacccggccctcttcgccttctccgagctcctcgccctcccggccctctccatgctcgctggcactcagtactcgtcttcactggacttgctccggctcttcgcctatggcaccttgaaggactataagaataattcgggatcccttccagcattgttgcctgatcaggtccgaaagctaaagcaactcagtgtgctaactctggcagagtcaactaagatactaccatatgatcagctcatgcaagagttggatgtttccaacgtaagagaactcgaagattttctaatcaatgagtgcatgtattcaggtatcgtcagaggcaaactggatcagctgagaagatgctttgaagtacaatttgcagctggaagagatcttacacctgatcagctaaacaacatgatagagatcttatctgactggttgggaacatcagatagcctgttgcatcaaattcaggagaaaatcaaatgggctgacacaatgagtgatgtgaacaagaagcaccagaaagaatttgaagacagagtggaagaggccaaaaaatcaattaaggcagacatcgacatacgagggcatgacgactacctctctgaatctgtaggaataatggattttgaagaggaccgtgtccgaccaaagaggaggcgacaaccactggcgtagtttcaattaagcccttacaaatctctcctacaatgggaactgctgataccttgattgagacattttgacgccagagcgaggaagcattgtacatttgtcatataatgcctccagtagtccagtgtagcgagtcagatattttgccttctggtcaaactgctcgcgtgtgtgtgttttggtagggaatgtacaggttcaaaccttgacgttatgttgtattttttggtagatgacccatggtagaaatagcgctgttatggttatggcactgggtttttctccaagtttcatttcgttctgtcatgttttgatgttttgtgtggtggggtgctcgcagggtcgtggccatgggcgctgcaggtgccctatttgccattgatgtgacgtgaatcttcgccgtttttaattttaagatgatatagatccgttccaatttttggctgtgattttatacc

SEQ ID NO: 144358 - DNA, 1461 bp, Zea Mays
gccaaatatacttttaatcttgctgcttctaatagaccgaaggagtggaggtcaaatagcgaaaggacgcacgaaccccaggaggcaccgtctccaaagtccaaaccctaaccctagcgcccccaactcgtcgccgggagatggccatggacgcggagcggcggcaagcggagctgatcgcgcagttctcctctcaggcggtggctctttcgtccgcgcagcagctcgccgctctggtgctcgaggccacctcccacccggccctcttcgccttctccgagctcctcgccctcccggccctctccatgctcgctggcactcagtactcgtcttcactggacttgctccggctcttcgcctatggcaccttgaaggactataagaataattcgggatcccttccagcattgttgcctgatcaggtccgaaagctaaagcaactcagtgtgctaactctggcagagtcaactaagatactaccatatgatcagctcatgcaagagttggatgtttccaacgtaagagaactcgaagattttctaatcaatgagtgcatgtattcaggtatcgtcagaggcaaactggatcagctgagaagatgctttgaagtaagatgcttgcagcctgtatctgcagcttcattatctatctgtccaatgatatttttatatgcatactgcattcgttttaggtacaatttgcagctggaagagatcttacacctgatcagctaaacaacatgatagagatcttatctgactggttgggaacatcagatagcctgttgcatcaaattcaggagaaaatcaaatgggctgacacaatgagtgatgtgaacaagaagcaccagaaagaatttgaagacagagtggaagaggccaaaaaatcaattaaggcagacatcgacatacgagggcatgacgactacctctctgaatctgtaggaataatggattttgaagaggaccgtgtccgaccaaagaggaggcgacaaccactggcgtagtttcaattaagcccttacaaatctctcctacaatgggaactgctgataccttgattgagacattttgacgccagagcgaggaagcattgtacatttgtcatataatgcctccagtagtccagtgtagcgagtcagatattttgccttctggtcaaactgctcgcgtgtgtgtgttttggtagggaatgtacaggttcaaaccttgacgttatgttgtattttttggtagatgacccatggtagaaatagcgctgttatggttatggcactgggtttttctccaagtttcatttcgttctgtcatgttttgatgttttgtgtggtggggtgctcgcagggtcgtggccatgggcgctgcaggtgccctatttgccattgatgtgacgtgaatcttcgccgtttttaattttaagatgatatagatccgttccaatttttggctgtgattttatacc

SEQ ID NO: 144359 - DNA, 1422 bp, Zea Mays
gtgaacttatcgtgggttctaaatgccaaatatacttttaatcttgctgcttctaatagaccgaaggagtggaggtcaaatagcgaaaggacgcacgaaccccaggaggcaccgtctccaaagtccaaaccctaaccctagcgcccccaactcgtcgccgggagatggccatggacgcggagcggcggcaagcggagctgatcgcgcagttctcctctcaggcggtggctctttcgtccgcgcagcagctcgccgctctggtgctcgaggccacctcccacccggccctcttcgccttctccgagctcctcgccctcccggccctctccatgctcgctggcactcagtactcgtcttcactggacttgctccggctcttcgcctatggcaccttgaaggactataagaataattcgggatcccttccagcattgttgcctgatcaggtccgaaagctaaagcaactcagtgtgctaactctggcagagtcaactaagatactaccatatgatcagctcatgcaagagttggatgtttccaacgtaagagaactcgaagattttctaatcaatgagtgcatgtattcaggtatcgtcagaggcaaactggatcagctgagaagatgctttgaagtacaatttgcagctggaagagatcttacacctgatcagctaaacaacatgatagagatcttatctgactggttgggaacatcagatagcctgttgcatcaaattcaggagaaaatcaaatgggctgacacaatgagtgatgtgaacaagaagcaccagaaagaatttgaagacagagtggaagaggccaaaaaatcaattaagaagttgaacaatttaagcaggcagacatcgacatacgagggcatgacgactacctctctgaatctgtaggaataatggattttgaagaggaccgtgtccgaccaaagaggaggcgacaaccactggcgtagtttcaattaagcccttacaaatctctcctacaatgggaactgctgataccttgattgagacattttgacgccagagcgaggaagcattgtacatttgtcatataatgcctccagtagtccagtgtagcgagtcagatattttgccttctggtcaaactgctcgcgtgtgtgtgttttggtagggaatgtacaggttcaaaccttgacgttatgttgtattttttggtagatgacccatggtagaaatagcgctgttatggttatggcactgggtttttctccaagtttcatttcgttctgtcatgttttgatgttttgtgtggtggggtgctcgcagggtcgtggccatgggcgctgcaggtgccctatttgccattgatgtgacgtgaatcttcgccgtttttaattttaagatgatatagatccgttccaatttttggctgtgattttatacc

SEQ ID NO: 144360 - DNA, 1131 bp, Zea Mays
gtgaacttatcgtgggttctaaatgccaaatatacttttaatcttgctgcttctaatagaccgaaggagtggaggtcaaatagcgaaaggacgcacgaaccccaggaggcaccgtctccaaagtccaaaccctaaccctagcgcccccaactcgtcgccgggagatggccatggacgcggagcggcggcaagcggagctgatcgcgcagttctcctctcaggcggtggctctttcgtccgcgcagcagctcgccgctctggtgctcgaggccacctcccacccggccctcttcgccttctccgagctcctcgccctcccggccctctccatgctcgctggcactcagtactcgtcttcactggacttgctccggctcttcgcctatggcaccttgaaggactataagaataattcgggatcccttccagcattgttgcctgatcaggtccgaaagctaaagcaactcagtgtgctaactctggcagagtcaactaagatactaccatatgatcagctcatgcaagagttggatgtttccaacggtatcgtcagaggcaaactggatcagctgagaagatgctttgaagtaagatgcttgcagcctgtatctgcagcttcattatctatctgtccaatgatatttttatatgcatactgcattcgttttaggtacaatttgcagctggaagagatcttacacctgatcagctaaacaacatgatagagatcttatctgactggttgggaacatcagatagcctgttgcatcaaattcaggagaaaatcaaatgggctgacacaatgagtgatgtgaacaagaagcaccagaaagaatttgaagacagagtggaagaggccaaaaaatcaattaaggtgagctagattaaactgaagcatttgttaggaataaatttgcatctgcttgtgatgagttatgctctgttttcttcattttcctacttctgccttactgcctcatgtttagatatataattattttttgagtgttcatataatggcaactactgtattaaatagtgttgccgaaccatgtttcttacttgatggcagaagttgaacaatttaagcaggcagacatcgacatacgagggcatgacgactacctctct

SEQ ID NO: 144361 - DNA, 855 bp, Zea Mays
gtgaacttatcgtgggttctaaatgccaaatatacttttaatcttgctgcttctaatagaccgaaggagtggaggtcaaatagcgaaaggacgcacgaaccccaggaggcaccgtctccaaagtccaaaccctaaccctagcgcccccaactcgtcgccgggagatggccatggacgcggagcggcggcaagcggagctgatcgcgcagttctcctctcaggcggtggctctttcgtccgcgcagcagctcgccgctctggtgctcgaggccacctcccacccggccctcttcgccttctccgagctcctcgccctcccggccctctccatgctcgctggcactcagtactcgtcttcactggacttgctccggctcttcgcctatggcaccttgaaggactataagagtaagatcgtggcctgcgcctttgcaatccttacattgttgccctttgcaggtttgcgttcgttgctgttcttttctgtggtgtgctgttttgtctgtgtctttgagagataattggaatagtcctcatgccaacatgtggcttcgttaaaacttaaaatgttcatcgagctgctgaactctctaaaatgcccacgacgacagagggacctctctataatgcttataccttttaataacaggatattttatgttttttattctttacatagaccgaaatatcctttttatacaaaagctatcttacccctccttgtaggcctttttttgtaaacaaaacctaatagatacatattttatttattttgagcctctatgtgttatattgatgaattggtctttatcatatggttattatgtcggtgaagaatgatatgcatatatacac

SEQ ID NO: 144362 - DNA, 1534 bp, Zea Mays
agcatggcgctgccagttccccgctgctagcctcgtcgccgtcgccatggcaatggtcaccgccacgatctcttgctcttatccacagctccggtatcgcccctctcctcgatgccggcgccacggccccgcagcggccaccgtggccgccttggcgacgccgcggtcggagcaggacatcgtcatcgtcggcgcgggcgtcgcggggctggccacggcggtggcgctgcggcggctcggcgtgggcgccgccgtgctggagcagggcgacgccctgcgcgcgggcggcacgtccctgacgctgttcaagaacgggtggcgcgtgctggacgccatcggcgtcgccgacgagctccgccccaagtacctccgcatccaggggatgaggatgaggtcgccggggcgggatctgcgcgagttctccttcgacgaggaagctcccgggcaggaggtacgcgcggtggagaggagagcgcttctcgagacgcttgcttctaagctgccaccaggcgccatatcgttctcgtcgaagctgaaatcgatctcggagcaagggcgtgcaggcaccctgctcgaactggaagacgggaggcagattcttgccaagatcgtggtcggctgcgacggagtgaactcgccgatcgcgaggtggatgggtttctcggagccccggtacgtcgggcacatggcgttccggggcctcgcggagtacgccgacggccagccgttcgagcccaaggtgaactacatctacggccgaggcgtccgtgccggctttgtccccgtctccgcaaccaaagtctactggttcatctgcttcaacagacaagatccagggcctaagatcaccgaccccacggcgctcaagaccgaggcgctggagctcgtccgcggctggccatcggacctcctggcggtgatgcgcagcacgcccgagggcgccgtggtgaggacgccgctggtggaccggtggctctggcccgggctggccccggccgcgtcgaggggcggccgggtggtgctggccggcgacgcgtggcatcccatgacgcccaacctcgggcagggcgcctgctgcgcgctcgaggacgccatcgtactggcgcgccgcctcgccgacgccggcgcggacggggcccaggccgccgccgccatgcgcgcgtacgaggcggagcggtgggcgcgcgtgttcccgctcacggcgcgcgcggggctggtgggtgcgctcgtgcagtgggagaacgcggcggtgtgcgcggcccgcgacggcgtggtcatccccaggctcgtcaggctgggaccgttcctggagcacaccaacttcgagtgcgacctgctcgaaccggcgccgggagtcgccatgacaccggcacactagctttctccggcacaatgtaactagtagtatattgattaacctcttcttcgaaagatcgattaacctctgattgacatgtactccctctatctcatctcaaaatagtatttattttagggtgaatttatacaatatttgatatatatgaatttatat

SEQ ID NO: 144363 - DNA, 1512 bp, Zea Mays
aagtttgttcttgtatcatctgtgtgcagcatggcgctgccagttccccgctgctagcctcgtcgccgtcgccatggcaatggtcaccgccacgatctcttgctcttatccacagctccggtatcgcccctctcctcgatgccggcgccacggccccgcagcggccaccgtggccgccttggcgacgccgcggtcggagcaggacatcgtcatcgtcggcgcgggcgtcgcggggctggccacggcggtggcgctgcggcggctcggcgtgggcgccgccgtgctggagcagggcgacgccctgcgcgcgggcggcacgtccctgacgctgttcaagaacgggtggcgcgtgctggacgccatcggcgtcgccgacgagctccgccccaagtacctccgcatccaggggtgcgtccctcttcctcttgttgcgttccacttccagcaagatgccgttcgtggatcatccttgtgtgttctgagctgcaccgtgaggttccagctggccgccgcaggatgaggatgaggtcgccggggcgggatctgcgcgagttctccttcgacgaggaagctcccgggcaggaggtacgcgcggtggagaggagagcgcttctcgagacgcttgcttctaagctgccaccaggcgccatatcgttctcgtcgaagctgaaatcgatctcggagcaagggcgtgcaggcaccctgctcgaactggaagacgggaggcagattcttgccaagatcgtggtcggctgcgacggagtgaactcgccgatcgcgaggtggatgggtttctcggagccccggtacgtcgggcacatggcgttccggggcctcgcggagtacgccgacggccagccgttcgagcccaaggtgaactacatctacggccgaggcgtccgtgccggctttgtccccgtctccgcaaccaaagtctactggttcatctgcttcaacagacaagatccagggcctaagatcaccgaccccacggcgctcaagaccgaggcgctggagctcgtccgcggctggccatcggacctcctggcggtgatgcgcagcacgcccgagggcgccgtggtgaggacgccgctggtggaccggtggctctggcccgggctggccccggccgcgtcgaggggcggccgggtggtgctggccggcgacgcgtggcatcccatgacgcccaacctcgggcagggcgcctgctgcgcgctcgaggacgccatcgtactggcgcgccgcctcgccgacgccggcgcggacggggcccaggccgccgccgccatgcgcgcgtacgaggcggagcggtgggcgcgcgtgttcccgctcacggcgcgcgcggggctggtgggtgcgctcgtgcagtgggagaacgcggcggtgtgcgcggcccgcgacggcgtggtcatccccaggctcgtcaggctgggaccgttcctggagcacaccaacttcgagtgcgacctgctcgaaccggcgccgggagtcgccatgacaccggcacactag

SEQ ID NO: 144364 - DNA, 1683 bp, Zea Mays
aagtttgttcttgtatcatctgtgtgcagcatggcgctgccagttccccgctgctagcctcgtcgccgtcgccatggcaatggtcaccgccacgatctcttgctcttatccacagctccggtatcgcccctctcctcgatgccggcgccacggccccgcagcggccaccgtggccgccttggcgacgccgcggtcggagcaggacatcgtcatcgtcggcgcgggcgtcgcggggctggccacggcggtggcgctgcggcggctcggcgtgggcgccgccgtgctggagcagggcgacgccctgcgcgcgggcggcacgtccctgacgctgttcaagaacgggtggcgcgtgctggacgccatcggcgtcgccgacgagctccgccccaagtacctccgcatccaggggtgcgtccctcttcctcttgttgcgttccacttccagcaagatgccgttcgtggatcatccttgtgtgttctgagctgcaccgtgaggttccagctggccgccgcaggatgaggatgaggtcgccggggcgggatctgcgcgagttctccttcgacgaggaagctcccgggtactgcagtttccatccccctgatctgatcagcatcgtgaatggatatgcatggctgtggcttcaagcacgtagtgctactgctacaggcaggaggtacgcgcggtggagaggagagcgcttctcgagacgcttgcttctaagctgccaccaggcgccatatcgttctcgtcgaagctgaaatcgatctcggagcaagggcgtgcaggcaccctgctcgaactggaagacgggaggcagattcttgccaagatcgtggtcggctgcgacggagtgaactcgccgatcgcgaggtggatgggtttctcggagccccggtacgtcgggcacatggcgttccggggcctcgcggagtacgccgacggccagccgttcgagcccaaggtgaactacatctacggccgaggcgtccgtgccggctttgtccccgtctccgcaaccaaagtctactggttcatctgcttcaacagacaagatccaggtaacagatgtggcacggatgctcagaccaccaccagtccaccaccacacacaaaaaaacaaagcacgtaggtataatgttgttggcacttggcagggcctaagatcaccgaccccacggcgctcaagaccgaggcgctggagctcgtccgcggctggccatcggacctcctggcggtgatgcgcagcacgcccgagggcgccgtggtgaggacgccgctggtggaccggtggctctggcccgggctggccccggccgcgtcgaggggcggccgggtggtgctggccggcgacgcgtggcatcccatgacgcccaacctcgggcagggcgcctgctgcgcgctcgaggacgccatcgtactggcgcgccgcctcgccgacgccggcgcggacggggcccaggccgccgccgccatgcgcgcgtacgaggcggagcggtgggcgcgcgtgttcccgctcacggcgcgcgcggggctggtgggtgcgctcgtgcagtgggagaacgcggcggtgtgcgcggcccgcgacggcgtggtcatccccaggctcgtcaggctgggaccgttcctggagcacaccaacttcgagtgcgacctgctcgaaccggcgccgggagtcgccatga

SEQ ID NO: 144365 - DNA, 1237 bp, Zea Mays
ttaaaaactggctcaacaagtacagtgcactgtacttcggccgttcggcgccacctggacgaatatctcgagaatgatcctgttcccacttcccaccacagaaaagccagtccaagccaacataaaacaagcccgcccgtcattttcgtcacccctgacgctcgacgcctctcctcctctcctcccccacccgtccatcgcccctccctccggtctgcgctcccacagcctcacccctgcgcccccgccgattcgcgtcgccctttgttggaaggaacgatggagcagaccttcatcatgatcaagcccgacggcgtccagcggggcctggtataatataatcagctgcttggtttttttccccgtttattttccataggagagtctgatacaggagggtctctgttgatcccagctgcccggcggttttatgtttgttcgcgaggacaagttctggtttcgtttgggtttccgcgtcatgtttcacgcttggtgccagcttttaactcgcagtttcttgcgcagatcggggacatcatcagtcgcttcgagaagaaagggttctacctcaaggggatgaagttcatgaacgtggagaggtccttcgcgcagcagcactacgctgacctttccgacaagcctttcttccccgggttggtggagtacatcatttccggccccgtggtggcgatggtgtgggaggggaaggacgtcgtgttgactggccgcaggatcattggggccaccaggccttgggaggcagcccccggtaccattcgtggggactacgccgtggaagtcggcaggaatgtcatccatggaagcgactccgtggagaacgggaagaaggagatcgctctctggttccctgaaggtgtggcacagtggaagagcaaccttcatccctggatctacgaggcttgagcagttgagcttggatgccttgcctgcttccatggaaaccagagttttgtttgagtattatctgttggctctggctgaagagtcataatttagcgctctgtgtgttacaccagagttaagtctgcctgaacttatgtggcatttgtttgagtttctaccttcgtgccctgttttctaatgtaccgtggttgtgaaccggtcaatgtgatctgaaataaaacattgcgtgccaagtttgtgttacaagtttgatgcactgggaatgccaggcaactaatgtggtaataaacattttgccaatctttttttttcc

SEQ ID NO: 144366 - DNA, 1041 bp, Zea Mays
ttaaaaactggctcaacaagtacagtgcactgtacttcggccgttcggcgccacctggacgaatatctcgagaatgatcctgttcccacttcccaccacagaaaagccagtccaagccaacataaaacaagcccgcccgtcattttcgtcacccctgacgctcgacgcctctcctcctctcctcccccacccgtccatcgcccctccctccggtctgcgctcccacagcctcacccctgcgcccccgccgattcgcgtcgccctttgttggaaggaacgatggagcagaccttcatcatgatcaagcccgacggcgtccagcggggcctgatcggggacatcatcagtcgcttcgagaagaaagggttctacctcaaggggatgaagttcatgaacgtggagaggtccttcgcgcagcagcactacgctgacctttccgacaagcctttcttccccgggttggtggagtacatcatttccggccccgtggtggcgatggtgtgggaggggaaggacgtcgtgttgactggccgcaggatcattggggccaccaggccttgggaggcagcccccggtaccattcgtggggactacgccgtggaagtcggcaggaatgtcatccatggaagcgactccgtggagaacgggaagaaggagatcgctctctggttccctgaaggtgtggcacagtggaagagcaaccttcatccctggatctacgaggcttgagcagttgagcttggatgccttgcctgcttccatggaaaccagagttttgtttgagtattatctgttggctctggctgaagagtcataatttagcgctctgtgtgttacaccagagttaagtctgcctgaacttatgtggcatttgtttgagtttctaccttcgtgccctgttttctaatgtaccgtggttgtgaaccggtcaatgtgatctgaaataaaacattgcgtgccaagtttgtgttacaagtttgatgcactgggaatgccaggcaactaatgtggtaataaacattttgccaatctttttttttc

SEQ ID NO: 144367 - DNA, 740 bp, Zea Mays
ttaaaaactggctcaacaagtacagtgcactgtacttcggccgttcggcgccacctggacgaatatctcgagaatgatcctgttcccacttcccaccacagaaaagccagtccaagccaacataaaacaagcccgcccgtcattttcgtcacccctgacgctcgacgcctctcctcctctcctcccccacccgtccatcgcccctccctccggtctgcgctcccacagcctcacccctgcgcccccgccgattcgcgtcgccctttgttggaaggaacgatggagcagaccttcatcatgatcaagcccgacggcgtccagcggggcctgatcggggacatcatcagtcgcttcgagaagaaagggttctacctcaaggggatgaagttcatgaacgtggagaggtccttcgcgcagcagcactacgctgacctttccgacaagcctttcttccccgggttggtggagtacatcatttccggccccgtggtggcgatggtgtgggaggggaaggacgtcgtgttgactggccgcaggatcattggggccaccaggccttgggaggcagcccccggtaccattcgtggggactacgccgtggaagtcggcaggtgaacatccctttctttgtgctcgatcagttgtgctttgctgcgaatgttttagtttggacactttaatagccttgctctgctctgttgaactctggttcagtctaaatatacgtgtgcttatgaact

SEQ ID NO: 144368 - DNA, 974 bp, Zea Mays
ttaaaaactggctcaacaagtacagtgcactgtacttcggccgttcggcgccacctggacgaatatctcgagaatgatcctgttcccacttcccaccacagaaaagccagtccaagccaacataaaacaagcccgcccgtcattttcgtcacccctgacgctcgacgcctctcctcctctcctcccccacccgtccatcgcccctccctccggtctgcgctcccacagcctcacccctgcgcccccgccgattcgcgtcgccctttgttggaaggaacgatggagcagaccttcatcatgatcaagcccgacggcgtccagcggggcctggtataatataatcagctgcttggtttttttccccgtttattttccataggagagtctgatacaggagggtctctgttgatcccagctgcccggcggttttatgtttgttcgcgaggacaagttctggtttcgtttgggtttccgcgtcatgtttcacgcttggtgccagcttttaactcgcagtttcttgcgcagatcggggacatcatcagtcgcttcgagaagaaagggttctacctcaagggtaagtgcgtttcattttgttctcgaattgattgctggaacacgtactctgttaaattttccagttatacgcatgaacttctctgctgttgaggcaagatttgatgtgcagattctggtgatatcttagaattgtttaatctatgtatacgttcggttgcgtgtgattaccatctgaaaagggatgttggtcgtggaagcaggaatattgcgtggagattagatttgattgaaaaccattatctttctgtcactagcccatggttggtcccttttatagtctgggtggctgatggccatagtaatctggaattaagtgcagctgctgttgcgttgtaaagtctaatcgcgaagtggacaagaaccacagatcagcactgctgttagaaaagaaaagaaaa

SEQ ID NO: 144369 - DNA, 1086 bp, Zea Mays
atgggccttattggatttctcttctggaggagccctgcgagtcttacctttggcgttgcacctggccttgccatattggccctggctatacttagcctcaaggtctggaggagcgggaagtccagcttaccgttcatactggtgcaaacagatactgcaagtgatggccgatacccggctgattcctcgggctccacctctagcccttcaattacaaggaggtcatggccgactaacaggcagccccaaccggatggatcgaacaatgccatcaacagaaaaggcagccctccttcaatcgtggctaagaaaaatctgcctccttcacgccgcagcacagaccaattcaagaaatctgaggacatggttgttgttactacggctccaaacgcaacgccaatcaaaatggtggctgaggagaagctgctgaaagaaggcaatgttagggagaggcttgaagcgcggcgggtgctgtttcagaagactggtgacaaaggttacaagaaggtggctggtcccaagtcaggatccagtgttgttccatacaacggggaaggggatggtgactcggaagagacggctgagactgaggacgcgcccgaagaatttcagtcaactcacaaagatgaggacctgtcgaagatcaggatgcagctcgttcagattgagaatcagcaggccagtttgcttaatcttctccagggctactacttcagtccatgtggtaaagaagttaattccaatgatttcaggttgaaggaacttgttgaatatgggcctcaccctcccccaggaaagaccggtgcaaaatatattatcagggaagatggtcagatgcttgatcttcggtatgtgaagaaaagcagcgatcagcatctggagcttggttacaaggtggagaggcatctcaatgatggggattttgttcttttcaatcggcaaccaagtcttcagaaaatgtctatcatggttttcagcatggcagatctcctgccgttatttaaaaagaaaagaattcccaactatgtgcatcctatggtcatcaaactcagacttagtcactcaccagtcaccataattttttga

SEQ ID NO: 144370 - DNA, 995 bp, Zea Mays
gagtgcagatagcctaaaacccggcgccggctgcgagccgttggccgcatcccccggtgaggtgagcagaccacacctcccctccctctcgtgtcggagcctccgcctcggcttgtccccaccaacccgcagctcgctcccaccaaacccacacccgaacaatggcgtcggcgtccaaggaggaggtgatcgggaagctcaacgtccgcgtggtgcggggcaacaacctggtcatcgccgacccgctcacccacaccagcgacccctacgtcgtcctccagtacggcgctcagaaggtgaagactagtgtccagaagaagaaccccaatccagtgtgaaacgaagtactgcagctctcagtaacaaatcctacgaagccagtgcaccttgaagtttttgatgaagacaagttcacagcagacgacagcatgggtgttgctgagatcaacattactgacatctacgatgctgcgaagctggacctgaagcacgcctctgatgggacaaggatcaagacgatctaccctgtcggagtaaactaccttggcggcgagagccatgttcagtggaaggatggcaaggtggtccaggacttgattctgaagctgaggaaggtcgagagtggcctgattgtggtgcagctggagtgggttcatgttcctggcgtgaagctgtgaaggccctgtctgaatgagggctgatggagctgcagttgctgtgtccctggtttgattgtttggttgtaaacgatatcctgaacgtggtgatatgcggtgtatgagtgaggtttgagtgtgatgctttgtttggggtacttcctggtgacatgatgtgggtatgactgccaaaggttgtggcgcaccaataagaaacgccctgtcagcatgacagcatgttgtgagatgtaaactaagactttagaacctaaatatacaggtgattgggcgttaattgctttcacgttgttcctgcaaagtttttttgttagctcctat

SEQ ID NO: 144371 - DNA, 125 bp, Zea Mays
agcagttatacggtcgtctacaaaaattaagtttagaagaatcggtactaactttgtatgtactagggattataaaagcgagaaacaacaaacaacagttaataattaaaaaacgaaacaaaata

SEQ ID NO: 144372 - DNA, 2554 bp, Zea Mays
gggtgcaggtacgatagcagggacacagacttacaaaaagcaaacaattcctgtcaacaaaataatagcaagtgcatgcctgacgaacaactttataacgatagagttccagctgaggaaaaatcaaatgatatatccgctgaaggccttgttgatggttcaggaaatctacagtgtgatgagcagatgaaagcaaagggggatacatgtcagaaagattgtgaaaacttttgtgttcatagtcaacactattctgaagcatcaagctttgcaaggtatggtgagcatagtactatcgatgagaatcagtttgtggaagatatctccccaagcactacaagcacgttgcatgaactagaaactccatcgtccagaggagataatcttcgcgaagaagacaaccaaagcataaacggttcctgggaagagagagggttatggataagcagcctaggttggcctgcaccaattgatactatgagtccggatagctggcatcaggaaacaatgggtgatattgagaatcataataatccaattcaattcaatgaccgcccctggatagagtcccctaactcgtggagatcactatgtgttgtcacgcaatcagactgtcatgctctgtcacacaatgctgacatttgcaaccttcttgagagaaaaaaggtctcaaagtctcttgagagtgacttcagcaataaaatgaaccagctgttgctaacagctctgcaaaaacaaaggcaacaacggatgatggatgactttggaggatactatgatgaacgcatgtactggagacaaaatgatgaaattcgtgatgctgataaggaggcatctgctccatgttcattagcccctgtcgcacatcttggagctcatcagcaagagagttggcagcattcttcatttggaagtcaacatcaacaccacgataaccaaaatttacttgtaagtgggctgctgtttaatgtcagctgtggaaagttatattcttactatattttctctatcttaggaaatggaagtcagggtaaggggtgaaatgtcccagattcatcaggaaatatatcaactgcggaagttggtggaaagttgcattgcatcccaagtaaagatgcagcactccattaaagaagaggtgtgcagtgcacttcgtgaggcaggtgagttgtgctttttttaagtttgtcttttatgtatgcaacaaagaaaaaaactgtgctctattaaagcaactagtttccatataggaagtaggaactgctcctatctgtttgtaaaaagaaacaaaagatagaatatgataactattacactgagccagtcgcggtgtgaaatgttgcatttggctttcaaggccacactgctttttttcggagctgtcagggcaagtgagctcggttgcttttaaaagtccagttagctgagatctcaattgagaagggtatagctatgtttggggaggcaatactgggaaggagttgttctagtctttgaagcaagactatgtgctgcactcttgttgcttagatcttgggctggaccagcctaccgctgcatatcttcaatgctctgtatcgtacctttggtccactttgatgaattaactgattgtgtgatgagtcctgtgcactaccttatgaacttagtttggttatctttgctagtgccccaccgtctattgcaccatctttaccgtattttatttgtaatcattgatgcgcatcttcacgctttttttttctgatgccatttcttgaacaggcttgatgcgaagccaacccgacacagcagcagcaaaaaggggtaactgctgcatctgccatcgaatgcaagttgactctctactttacaggtaatgatttgcagggatagtcggatagatcatctactagtacttggagtaactttaatcaagaagtcatatcttattctcgttatgattagtaacatctttgtccacaaataacctccagacctaactaacaatcgtatgaagtgcacaaattggtgtgtggacttgcttctaaccgcattccttgtgatggatcaggtgtgggcatgtgtgcacctgttttgactgcgccgatcagctgaaatcgagcggcatgagctgcccaatctgtcaatctcctattgatgatgttgttctggcgcggttgaatttttgagcttagaatttaggaaaggccaagagaaaaagagccggcactcccagatttagacgtggagtttgcgaagccctggttttgaggcggcttcttacctttttgcttaaccaccactaaagaaatacgagctagttcttggagaaaatgtaaatatgtttttttggcgcaagagcggtgtgcttgtatcgcactaaaggaaaacagagttctaattaaaatgctggttgtattccccgtatgtaccacatcacttgttcacggagagaatgtaatggttctggttctatttgcgcgataggtttgaactcacagcattgatactcttcactcaggcctatttgaacaaattcaacgccaactaataatatgtttggtttgaggaa

SEQ ID NO: 144373 - DNA, 1678 bp, Zea Mays
gggtgcaggtacgatagcagggacacagacttacaaaaagcaaacaattcctgtcaacaaaataatagcaagtgcatgcctgacgaacaactttataacgatagagttccagctgaggaaaaatcaaatgatatatccgctgaaggccttgttgatggttcaggaaatctacagtgtgatgagcagatgaaagcaaagggggatacatgtcagaaagattgtgaaaacttttgtgttcatagtcaacactattctgaagcatcaagctttgcaaggtatggtgagcatagtactatcgatgagaatcagtttgtggaagatatctccccaagcactacaagcacgttgcatgaactagaaactccatcgtccagaggagataatcttcgcgaagaagacaaccaaagcataaacggttcctgggaagagagagggttatggataagcagcctaggttggcctgcaccaattgatactatgagtccggatagctggcatcaggaaacaatgggtgatattgagaatcataataatccaattcaattcaatgaccgcccctggatagagtcccctaactcgtggagatcactatgtgttgtcacgcaatcagactgtcatgctctgtcacacaatgctgacatttgcaaccttcttgagagaaaaaaggtctcaaagtctcttgagagtgacttcagcaataaaatgaaccagctgttgctaacagctctgcaaaaacaaaggcaacaacggatgatggatgactttggaggatactatgatgaacgcatgtactggagacaaaatgatgaaattcgtgatgctgataaggaggcatctgctccatgttcattagcccctgtcgcacatcttggagctcatcagcaagagagttggcagcattcttcatttggaagtcaacatcaacaccacgataaccaaaatttacttgaaatggaagtcagggtaaggggtgaaatgtcccagattcatcaggaaatatatcaactgcggaagttggtggaaagttgcattgcatcccaagtaaagatgcagcactccattaaagaagaggtgtgcagtgcacttcgtgaggcaggcttgatgcgaagccaacccgacacagcagcagcaaaaaggggtaactgctgcatctgccatcgaatgcaagttgactctctactttacaggtgtgggcatgtgtgcacctgttttgactgcgccgatcagctgaaatcgagcggcatgagctgcccaatctgtcaatctcctattgatgatgttgttctggcgcggttgaatttttgagcttagaatttaggaaaggccaagagaaaaagagccggcactcccagatttagacgtggagtttgcgaagccctggttttgaggcggcttcttacctttttgcttaaccaccactaaagaaatacgagctagttcttggagaaaatgtaaatatgtttttttggcgcaagagcggtgtgcttgtatcgcactaaaggaaaacagagttctaattaaaatgctggttgtattccccgtatgtaccacatcacttgttcacggagagaatgtaatggttctggttctatttgcgcgataggtttgaactcacagcattgatactcttcactcaggcctatttgaacaaattcaacgccaactaataatatgtttg

SEQ ID NO: 144374 - DNA, 1336 bp, Zea Mays
catcacgaggtagaagaagcctgaggactaccctcggccggcgatcgacagagcaagatgaggacgccgcggggtgtctcgtcgtcgttccttgccctctacgggttccttctcctcgtcgccgtctcggtggccgcgaccggctacgccgcttcgccgggggagagttccaacggttacggcgctgcagccggttcgaacggcggcggccaggagggaagctacacggtgccgccgtaccagaagtccgtggacggcctcgacgagcggtactacgagaggtcgtgcccgaaaatggaggagatcgtcgggacggccgtgatgaaggccgtgaaagccgacgagaccctcgccgccagcatcatccgcctcttcttccacgacttcgccgtcgggggcgtggacgggtcggtcctggtagacgtgcccgggcagagcgagaagtacgcggaggcgagcaggacgctgcgcgggttcgagctgatcgaggggatcaagaaggaggtggaggccaagtgccgcgccaccgtctcctgcgccgacatcctcaccgccgccgctcgcgacgccgccttctcggccggggcgccctactggtcgctcaagtacgggcgcagggacaggaaggactactccagcgccgaggcggccgaccgcgacgtccccatgggcggccagcgcgtcaccgagctcgtcgccttcttcgatacgaagggtctcaacatccaagacctcgtcgcgctttccggagctcacacgatcgggcgcgcgacgtgcggatccgtgaggccggggctgtgcaagcgccggaaggcacgcacgctggaccggcagtacggcgacttcctgcagcgcaagtgccgcgccggcggcgacgcggcggaggcgtacgtggagctggacggcgagacgcccacggcgttcgacaaccagtactacaagaacctgctgcacgggaaggggctgctggacacggaccaggcgctgctggcggactcccggacggccgggttcgtcaagtcgttcgcgtaccagaagccccaggagttcgcccaccagttcgccaagtccatgcgccgcctcggcgaggcgcaggtgctcaccgggaacgagggcgaggtccgccgcaagtgctcggccgtcaactactaatgaaccatcgtcatgcacgaccgatcgtactatttcaggcttgttgggggccatgcatgtccgacagtgtgggctgcgagctaaacgttttttttgggggaaccatgtgtattttgtgatactaccaatgtgtggtgaggttgttgagcaagagtttttcacggaagaggttagtgttgatttt

SEQ ID NO: 144375 - DNA, 1606 bp, Zea Mays
tttttgtttgggctttggccagcaaagctcctcggcacgggctgtgtagtgtagggcccaccgcgcaatgcccgagatctgcttcgctcgcccaaccgcgcccgccaccgcctcccatggcaccgccggcgaggagcccgacagcggggcctcggcggcgcgccctcgtcgtcctcgccctcgccctcctcctgcttctgcccctgctgctgctcctccacctcatctcctcgccttcgcctcgacacctccccgcgccccgcacgccctcccagtctcaggcctgcgactactccgccggcgagtgggtgcgcgaccccttcgcgggctcctcgctccgctacgaccatacctgcaaggagatcttcaagggatggaactgcatcgccaatggcaagggtaacgcccgcgacttgctcagctggcggtggacgcccgcggggcccgggtgcgagctcccccgcctcgacccgcgccggttcctggagcgccacagggacaccagtatcggatttgtgggtgattcgttgaaccgcaacatgtttgcctcattagtctgcatgctcaggggagtcaatggtgaggttcgcaaatggcgtcctgctggggcagaccgtggcttcaccttcctacgctataacctcactgtggcataccacagaacaaatctcttggtacgctacggtaggtggtcaaggaatccaaatggaggccctctagaatctcttggatataagcaaggttacagagttgatgtggatattcctgaccaaacatgggtagaggtggtgggcaccctcaaaatttgatccaatacggtcaccaatgctgttctttgagaaggggaggccaattgtacctcctttactgccaccggctggactggatctggctcttcaaaacatgatatccttcgcgaacaaagcaacaagaccaaacacagtgaaattcttccgcactcaatctcctagacatttcgaaggtggtgactggaatgaaggtggatcttgccaatgtaatcagcccttgtcgtcaaaagaggtggaagaaattttctctttggacaataacagcactaatgtagaagcacgcttggtaaaccaacacttggtgaaggctcttcaacagactagtttcagagttctggacatcactcgcatgagtgaattcagagctgatgcccacccttcaacaactggcgggaaaaaacacgatgattgcatgcattggtgtttgccaggaccaacggatacatggaacgatttgctagctttgagtctcgaggcacttgagagctagttgagagagctcaagagctcaccggagaaaatatccctaacttttttttcagggggaatatgagtatgaagcatgaatctactggtagaatagaattttgctgatagctggttttagggcttttgttgcagcttgtttcatataaaggccaggagcattttcccccacttgtttgaccctgtatgttttaatatcactgtagagttccactgacgaatgacgatatacgaatgctataatcggtcggatccattttcttgaccaacagatagatggagcgtcttttggcccagacaacattattgac

SEQ ID NO: 144376 - DNA, 1634 bp, Zea Mays
tttttgtttgggctttggccagcaaagctcctcggcacgggctgtgtagtgtagggcccaccgcgcaatgcccgagatctgcttcgctcgcccaaccgcgcccgccaccgcctcccatggcaccgccggcgaggagcccgacagcggggcctcggcggcgcgccctcgtcgtcctcgccctcgccctcctcctgcttctgcccctgctgctgctcctccacctcatctcctcgccttcgcctcgacacctccccgcgccccgcacgccctcccagtctcaggcctgcgactactccgccggcgagtgggtgcgcgaccccttcgcgggctcctcgctccgctacgaccatacctgcaaggagatcttcaagggatggaactgcatcgccaatggcaagggtaacgcccgcgacttgctcagctggcggtggacgcccgcggggcccgggtgcgagctcccccgcctcgacccgcgccggttcctggagcgccacagggacaccagtatcggatttgtgggtgattcgttgaaccgcaacatgtttgcctcattagtctgcatgctcaggggagtcaatggtgaggttcgcaaatggcgtcctgctggggcagaccgtggcttcaccttcctacgctataacctcactgtggcataccacagaacaaatctcttggtacgctacggtaggtggtcaaggaatccaaatggaggccctctagaatctcttggatataagcaaggttacagagttgatgtggatattcctgaccaaacatgggtagaggcatgtagcttccatgatgttcttattttcaacactgggcattggtggtgggcaccctcaaaatttgatccaatacggtcaccaatgctgttctttgagaaggggaggccaattgtacctcctttactgccaccggctggactggatctggctcttcaaaacatgatatccttcgcgaacaaagcaacaagaccaaacacagtgaaattcttccgcactcaatctcctagacatttcgaaggtggtgactggaatgaaggtggatcttgccaatgtaatcagcccttgtcgtcaaaagaggtggaagaaattttctctttggacaataacagcactaatgtagaagcacgcttggtaaaccaacacttggtgaaggctcttcaacagactagtttcagagttctggacatcactcgcatgagtgaattcagagctgatgcccacccttcaacaactggcgggaaaaaacacgatgattgcatgcattggtgtttgccaggaccaacggatacatggaacgatttgctagctttgagtctcgaggcacttgagagctagttgagagagctcaagagctcaccggagaaaatatccctaacttttttttcagggggaatatgagtatgaagcatgaatctactggtagaatagaattttgctgatagctggttttagggcttttgttgcagcttgtttcatataaaggccaggagcattttcccccacttgtttgaccctgtatgttttaatatcactgtagagttccactgacgaatgacgatatacgaatgctataatcggtcggatccattttcttgaccaacagatagatggagcgtcttttggccc

SEQ ID NO: 144377 - DNA, 3312 bp, Zea Mays
ttcttccggccatcgctgccgccgtgcagccagtcgtagaggctgccgttctccatgtactcgtacacgagcatgccgccgccgccgccgcactcgcgggacgtgacgaagccgagcagcttgaccaggtgccggtgccggacgcggcccagggtcttgacctcccgcgtgaagctcttgtcgtgcagcagcatgccgctgtccatgtccgcgatcctcttcacggccaccgtctcgccagtggacagctccgccctgtacaccgtgcccgacccgccggatccgatggcgaactggtcgctcaggttcgccgtggcctccatgatcgcctcccaccggaactcccgccgcgccgagcccttgatgacgagctgccggtttgcgctgcccgagctcgacgacgagaacgccgagcagttcatctcctctgaccccggggcctggcggcgcaccgccatcagcgcaagcacgatgatcacgagcacgatcaacagcgtgaccaccgcagtcaccaacgcgacggacgccgcgtggaacgccgaccggctgttcctgctgctgcaacctctcagagggctaccgcagagccctgcattgttggcgaacgcggcctggggccaccggccgaactcaatgcccagcctcccttcaagctggttgctggacaggtccagctgcaccaagctactcattccagcgagctgcgacggcaccgcgccgaccagagcgttgtgggacaggttcaggtcttccagcttggagagtgagccgagtgatgcagggatgtggccactgaaattgttgctgctcaagtccaacaggctctgcagctcttgcagcttgctgatatccggagggattggaccggacagataattctgtgacagattcagctcatagagactgctcagttttgcaaccgtcgttggaatctgacctgagagctggttgtgtgcgagattgagcacgttgagggacgccaagctgccgagttcaggcggcactgttccattgatctggttgttgtcgagcgacagcttcaggagattggagcagttgctgagctgcaccgggattgctccggtgaactcgttgttggagagtgtcagctcgccgagctgcggcagcgagcccagccagtccggaatcgcccctgacaggcggttgtggctgaggacgacgaggctgagattcgtgcactgcgcgagcgtcgctgggaagccgccagtgagcgcgttgcttgacacgtccagcagcgtcagcgcggtgatgccgccgagcgacggcgggatcggtccggagagcatgttgctccccaggcgcacgcgctggagccccgacgaccggccgaactgcgctgggatcgcgccgtcgaaggagttgttggtggcgtcgaacgacaacagcctcgccgtgccgcagagcggcaggaggctgccgctgagccggttgtgcgcgatgttgaccctcgtgatgttccggcactcgaacatgccgtccgggatggcgccggagagcgagttgttgtacagcatgaactgctccagcgaacggagcttcccaaacgtctcgggaatcgacccggacagagcattgtcggccaaatcaaggattttgagttgctggcactcaccgagctccggcgcgatcacgccggacagctcgttctgcctgaagtcgaggaagatcagttgcgacaggttccccatggacgccggtatgctcccgttgaaccggttcccgaagaaatcgatcatctgcaagctcgcgcagtccccgatggactccggtatctcgccggtgaactggttctcgtacaggtacagctcctccaggttcacaagacggccgatggcgtccggcaggcgaccggagagcttgttgtgatacaatgccagtgtctggagctcagtgaggttgaagagctctggcggcagctcgccggagaggctgttgttgttaaggaccagatccgtcaggttgccgagctcgccgagcgcggcggggataacgccggagaggctgttgttcgccaggccgagctgtgtcagcgctcggcaccgcgagagcccctccggtatctccccggtgaagttgttcatcgagagcataaggtgctcgatgctactggactccgcttcatcgccgccgcacaggtcgccggggacgctgccggtgagttggttgtcggatagcaccaagaaagtaagctgcggcaggcggccgagctcggcgggcagcgcaccagagagcatgttgccggacaggtcgatcgtgtgcacgcgcgagagcgcggcgagcgtgcgcgggacgcggccggtgaggcgattattcatgaggttgaggtactggagctcgccgagcgcgccgagctccggcggtatggcgcccaccagcgagttgttcccaaggttgagcttctggagccccgcgagcgtcccgagctccggcggtatcgcgcccgtgagctggttgccggcgagcgcgagcgcctggaggctcgccaagccggcgaggccgcgcggtatcgggccggacagcgcgttctgctgcaggttcagcgccgtgagcgcgtcgagccgcacgaggctcgcagggatcgggccggtgaggttgcaggaggctaggccgagcacggtgaggttgccgagcttgcctagcgcgtccgggatggcgcccgacaggcccgggttgtctcccaagcggagcacctggagcgccgagagcgcccccagcgacgccggaatctggcccgtgagctggttggagtagagcagcagtaactggaggttgggtagcccaccgagcgccgccgggacggggcccgtgagcgcgttcgacgacaggtcgatcgcttccagcgcgtcgagccgcgccagcgcgcgggacaccgtcccggccagcccggcgccggacaggttgaggcccacgaccctgagccccgacgcgtcgcacgccacgccggaccaggaacagaaccccgacgagccggcgccggagccagcactgtcgttccagcccgctaagaccccctggggatcgtcgacgaacgcgctcttcacctgcagcagcacgtcgccgtcgtccgctgccgccgccgccatgcgtgaaagaagaacagccgctactatcatcagcggcgccaagaacggccgcgtcattgccatcttctcggtgcccctcgactcaatgctcgccgctcgccacagcccagagcttgagctcgtagcgtcctcctaggtgtaagattgtggtgggtacatgaacagggcaggccggcaggggcaagtagggaggcgcacgtaggcggcg

SEQ ID NO: 144378 - DNA, 725 bp, Zea Mays
ggcacatgggcttctttcttgcttttcggcctctgccaccctctcaatagacccacgattggccgcggcccacacacactacagcaactaggtccaacaggtaggcaaggccctctccggtcacaagcctccacagaactctccccgactttgccgtccactcccccgccgcagccgcgccgttcgccgggacaggagggatagtagagcaccaggatgccggcgacgccgacgatcatcggtgccctcctggggctgggcacccagatgtactcaaacgctctccgcaagctcccctacatgcgccatccatgggagcatttgttggggatgggtctcggtgcagtgtttgtgaaccagctggtaaagtttgatgagaagctcaaggaggacctcgacaagatgcttgagcgcgccaggctagccaacgagcagcgctacattgacgatgatgaatagatgcccagatttatttgccagcgacctgtattttttttgcaacatgttgtcagtacacatggccaggactgatgatcccccatcgtcttagttctctcagctttccgcatttcaactgtgatcttgtaataagatgtcggatctcatggattaccaatgtaatacaccaattatgggttcttgatctgatggttggctttctctgataaaattactcaattaaaatgattgtgtttttgcaatgtcaacttttctcgtacactcta

SEQ ID NO: 144379 - DNA, 1731 bp, Zea Mays
acactacagcaactaggtccaacaggtaggcaaggccctctccggtcacaagcctccacagaactctccccgactttgccgtccactcccccgccgcagccgcgccgttcgccgggacaggagggatagtagagcaccaggatgccggcgacgccgacgatcatcggtgccctcctggggctgggcacccagatgtactcaaacgctctccgcaagctcccctacatgcgccatccatgggagcatttgttggggatgggtctcggtgcagtgtttgtgaaccagctggtaaagtttgatgagaagctcaaggaggacctcgacaagatgcttgagcgcgccaggctagccaacgagcagcgctacattggtactgtgctaacttgccctggcatgttatgtctgcaaattcattttgctattgttgccggtagttctcgctaataatctgctatattgcgtcagccattaaccatgactaggagagttacaagatgtatcattttgttccaattttaacatataagttgtcataccaccagtccaccagtagggctggaaacgagccgagcatcggctcggtaactcgacgagctgaaggaggctcaagccggctcggcttggctcacgagttgcacccagataaatattgttgcattatactatataattaattaacaggatgtaaatgtggaatatagaatcgtcattcaacattacgagtaacctaaattatgaattgtcatatatcctaaggaatgagctatctatctaaagaattatccattatccattatccatcattaatctgcagtttgattaatttagcacacctagcgtagctctggctcgcgagccggaacgagtccactcgctgcaccaacgagcccaaaaaaccgtgccactccaagctcgagtaggctcgcgagctttgagcttattttctagccctagttggcagtgttcgaagaatggaatgtgtttagttgtattctaaaacccttttatccttaatgcaattttcgaggaaaacacacacatttgattctggtcgaaacagtgggactggagagattgaggagcaccttcacctaccttgtcaggcttatagagacttctcataggcgcagacctatatgttaatcaatgggtcaaagttttctatgctatagtttgcattgacctagatcacaaacggatccagttctgatttgagggacgttgctataggctatatgctagagagattagagaccttttcggctttccagcttcttagactaggatacacatcctgtgctatggagctgcaaatctactaagacgtcctcacggcagggatataccatcgtcagcacatgtgacttcgttgttcatgccaccctttagagatgggtcctgctgagctccagtagtgcctttgagtacgctaatttgatctgcaaatttatatttcaatctgccttcctgacagcacagacgatgatgaatagatgcccagatttatttgccagcgacctgtattttttttgcaacatgttgtcagtacacatggccaggactgatgatcccccatcgtcttagttctctcagctttccgcatttcaactgtgatcttgtaataagatgtcggatctcatggattaccaatgtaatacaccaattatgggttcttgatctgatggttggctttctctgataaaattactcaattaaaatgattgtgttttt

SEQ ID NO: 144380 - DNA, 432 bp, Zea Mays
attcaactctgtggtgaatacaaagaagggaaatacaagaacaaaaccactccctctttctaaaagacttcgcctagaagcacagagggtcctgaaggagcgtgttcaggacattgcagataagaaaggcatcaagctgagattttgtaatctcagagaatgtgaaagccacatctggtcgttggatagtccgtgtgagaagactagagctgaaattggatggccacaaggggttccatttgtccatccacatgacctcccaaacaaggcaaagcttgggtttttcgaagcttacgaacctggatggacggcctcccaacaagaaatggagttaagttttactgaaccttgatgagtgcattctcattttaactttctatttggtaaaggactaaaggtataatagtgcttagtttcagaattgttttttgt

SEQ ID NO: 144381 - DNA, 1482 bp, Zea Mays
actagttcagcacttcagccttcactccactccaccacagtccacgcagcccaccgaaatggggaagctgctccctcgccacccttcccccctcctcctcctcgccgcggcgatctgcatctccagcagcagcctcgcggccgtccggggcgcgccggtgtaccgcgcggactacctggtggacgggaaccagctggtggacatgcagtaccacatgggccccgtcgtgtccgggacgccgaccaacctctacctcatctggtacgggcggtgggaggccgcggcgcaggccgtgctccgggacttcctcgcctcgctctcggccccggccccgttcccggccgtctccgactggtgggcgcgcacgccgcggatgtacgcggaccagacgggcgccaacgtgacgggcgccttcgccgtcgccggggagcactccgacgccgggtactcccacggcgcgtcgctccggcgcatcgacgtgcagtccgtgatccggtcggcggtgtacgcgtacccggacccgctgccgctggacccctacagcggggcgtacctggtgctgacgtcccccgacgtgcaggtggacgagttctgccgcgccgtctgcggcttccactacttcaccttcgcgtccgtggtcggggtcacggtgccctacgcctgggtcgggaacagcgccacgcagtgcccgggcaagtgcgcgtacccgttcgccgccgccgccgagtacggcgccgggggagcccagccccaggcggtgctgcggccgcccaacggcgacgctggggtggacgggatggtgatcgtgctggggcacgagctggcggagatgtccacgaacccgctggtgaacgcgtggtacgccggggacacgcccacggcgccgaccgagatcgcggacctgtgcctgggcgtgtacggtgatggcggcggcgcgggcggcctggtcgggaacgtgtcccgcgcgcccgatggcagcgcctacaacgtcaacggcgtcaacggccggcggttcctcgtgcagtggctctggaaccccgtccgcggcgcctgctacggccccaactccagcaactgacccgagtcgtcgctaggggcgagggcggttggaggacgcctcatgccattctgctggattgaatggcattgcagaaatccatggcggtttcaatggatggagacagcgttcgtccacttccctgtccgttcaggaatggtccacaggagacgggacgaggatcagatgatgaagccgacccagtaatttgaagctgcactgcatgagacacatcgtgtggatcctgcctgatctatctgcagttcggtaggaaacaacgagaaaatgccattttgttgttcgttttttttaccttgatttccgggactcgaattttgtttcagctcccgagccagcatctcttgcttgctgaaacaaagtggtcgcctgatcgattgctttcccctttttgactctgcatgctt

SEQ ID NO: 144382 - DNA, 2648 bp, Zea Mays
gcgcgcgcgcctgatcggccggaaattgttcgtacgaacaagtgcggacgcgggcagatctggctcctcgtcggcagcccggcgtcaacgaaccaatccgggcaggcagtcagttgtcagcatcagccacgaccagcaaacctccgtccccggggtccagcgtcgccctcctcccacgcgctgcggcgctggagaataatttgggcaaaaggcaaacgcattgtcggctgtaaagggtagaacgtctccactctcccgtacgccgatacccactgacgccaccgcccgaagcctccccgagaaacaggagccggcgcggggatgtcgtccatctcgcggaatctccggcgatccctcgccccggaccgcctgcgccgcctctcccagcacccgcgagagtatgtgacgtcggagtgccaccgccccgtcgtcctccacaagcgcggccccgacatcctccacgacccctggttcaaccggggcacggcgttctcgatgaccgagagggaccgcctcggcctccgcggcctgctcccgcccaacgtcgtctcctcgcagcagcagatcgacagattcatgcttgatctgaaacggctgcagagatatgcaagagatggcccgtctgatacttatccattggcaaaatggcgcatccttaacagattgcatgacagaaatgaaacgatgtactacaaggtactaatagataacattgaggagtatgcacctatcgtttacacaccaaccgttggacttgtttgccaaaactacagtggtctgtttcgacgccctaggggaatgtactttagtgcagaagatcgtggggagatgatgtccatggtgtacaattggccagctgatcaggttgacatgatagtggtgactgatggaagcaggatattgggtcttggtgatcttggggtgcatggtattggcattgctattggaaaattggatttatatgttgctgctgctggaataaatcctcaaagggttcttcctgttatgattgatgtcggaacgaacaacgagaagctccttaaggatcctctttatcttgggctacaagagcaccgtcttgagggagatgaatatgtttcagttattgatgaattcatggaagctgtttttactcgctggcctaatgttattgtacagtttgaagatttccaaagtaaatgggcctttaggttgttgcagcgttacagaaagacttatcgcatgtttaatgatgatgttcagggaactgctggtgtcgcaatagcaggccttttaggagctgtacgggcacaagggaggccaatgatagattttccaaagcaaaggattgttgttgctggcgctggcagtgctggtattggagtggtgaatgctgcaagcagaaccatggcaagaatgttgggaaacaatgacgttgcttttgagagtgcgaggagtcaattctggatagtggatgcccatggcctaataacagaagaccgagaagatatcgatccagatgcacggccttttgctagaagaaagagtgagcttggtcaccagggcctaagtgagggggcaagcttagttgaagtggttaaaaaggtgaagcctgatgtcatacttggattatctgctgttggtggtttgttctcgaaggaggttctagaggcactaaaagattcgtcctcgtcaaggccagcaatttttgcaatgtccaatccaactaagaatgctgagtgtacacctggggaagcattttcaattctaggtgaaaaggtcatctttgctagtgggagcccatttcatgatgtggatcttggtgatgggaagattggccattccaatcaagggaacaacatgtacctctttcctggaatagggcttggaacccttctgtctggtgctcgggttatctctgatggaatgctgcaggctgcagctgaacgtttggcttcatacatgaaagaggaggaggttctcgaagggataatttatcctccaatttccagaatacgtgacatcactaaggaggtggcagcagcagttgtgagggaggcagtagcagaggatctagctgagggataccgtgacatggatgcacgtgagcttgcacgactcagtgaggaagaaactaatgaatatgtcaagacgaacatgtggagtcctgtctatccaacaataatatacaagaaggactagatagctctatttgctattttgcatatgttcaatgatcatgtatgatatactttaggctgcgttctggaaggcactccagaagtgtaggcacgttagttataagaaaacagccttcattgttcattgaccttacttttaattgaatttagtacacgagacaccttaggccacagttcctgacgtactccatggtgctgaaacatttcccatctcaaatatcatcaactgtaccactactggaactgtagtccaatccctctcagatgttaaaatcctgtgtgtaactttgaacacagaccaaataacaaagccagaaatttgccagaggaaatctgttctggcaacttgtttgcctgaaatcgtttgatggttatctctcttatcttacaatgtatttgtgtcatctgaaatgtcagttctgagtttttatttgttgttgttgaggtttttttttttttttttttttg

SEQ ID NO: 144383 - DNA, 2559 bp, Zea Mays
gtcagttgtcagcatcagccacgaccagcaaacctccgtccccggggtccagcgtcgccctcctcccacgcgctgcggcgctggagaataatttgggcaaaaggcaaacgcattgtcggctgtaaagggtagaacgtctccactctcccgtacgccgatacccactgacgccaccgcccgaagcctccccgagaaacaggagccggcgcggggatgtcgtccatctcgcggaatctccggcgatccctcgccccggaccgcctgcgccgcctctcccagcacccgcgagagtatgtgacgtcggagtgccaccgccccgtcgtcctccacaagcgcggccccgacatcctccacgacccctggttcaaccggggcacggcgttctcgatgaccgagagggaccgcctcggcctccgcggcctgctcccgcccaacgtcgtctcctcgcagcagcagatcgacagattcatgcttgatctgaaacggctgcagagatatgcaagagatggcccgtctgatacttatccattggcaaaatggcgcatccttaacagattgcatgacagaaatgaaacgatgtactacaaggtactaatagataacattgaggagtatgcacctatcgtttacacaccaaccgttggacttgtttgccaaaactacagtggtctgtttcgacgccctaggggaatgtactttagtgcagaagatcgtggggagatgatgtccatggtgtacaattggccagctgatcaggttgacatgatagtggtgactgatggaagcaggatattgggtcttggtgatcttggggtgcatggtattggcattgctattggaaaattggatttatatgttgctgctgctggaataaatcctcaaagggttcttcctgttatgattgatgtcggaacgaacaacgagaagctccttaaggatcctctttatcttgggctacaagagcaccgtcttgagggagatgaatatgtttcagttattgatgaattcatggaagctgtttttactcgctggcctaatgttattgtacagtttgaagatttccaaagtaaatgggcctttaggttgttgcagcgttacagaaagacttatcgcatgtttaatgatgatgttcaggccttttaggagctgtacgggcacaagggaggccaatgatagattttccaaagcaaaggattgttgttgctggcgctggcaggtccggaacgctgtcttttttgcacttagtttaaaattagaataacatgctaagtggttcacagcaaatcttgtttatttttctgatgacttagcagttagcatattcacttcagtaagaatcttggaaatatgatcacactgctgtgcaaaagaaatattgcctctatgttattctattctttacagtgctggtattggagtggtgaatgctgcaagcagaaccatggcaagaatgttgggaaacaatgacgttgcttttgagagtgcgaggagtcaattctggatagtggatgcccatggcctaataacagaagaccgagaagatatcgatccagatgcacggccttttgctagaagaaagagtgagcttggtcaccagggcctaagtgagggggcaagcttagttgaagtggttaaaaaggtgaagcctgatgtcatacttggattatctgctgttggtggtttgttctcgaaggaggttctagaggcactaaaagattcgtcctcgtcaaggccagcaatttttgcaatgtccaatccaactaagaatgctgagtgtacacctggggaagcattttcaattctaggtgaaaaggtcatctttgctagtgggagcccatttcatgatgtggatcttggtgatgggaagattggccattccaatcaagggaacaacatgtacctctttcctggaatagggcttggaacccttctgtctggtgctcgggttatctctgatggaatgctgcaggctgcagctgaacgtttggcttcatacatgaaagaggaggaggttctcgaagggataatttatcctccaatttccagaatacgtgacatcactaaggaggtggcagcagcagttgtgagggaggcagtagcagaggatctagctgagggataccgtgacatggatgcacgtgagcttgcacgactcagtgaggaagaaactaatgaatatgtcaagacgaacatgtggagtcctgtctatccaacaataatatacaagaaggactagatagctctatttgctattttgcatatgttcaatgatcatgtatgatatactttaggctgcgttctggaaggcactccagaagtgtaggcacgttagttataagaaaacagccttcattgttcattgaccttacttttaattgaatttagtacacgagacaccttaggccacagttcctgacgtactccatggtgctgaaacatttcccatctcaaatatcatcaactgtaccactactggaactgtagtccaatccctctcagatgttaaaatcctgtgtgtaactttgaacacagaccaaataacaaagccagaaatttgcc

SEQ ID NO: 144384 - DNA, 1499 bp, Zea Mays
gtaaagggtagaacgtctccactctcccgtacgccgatacccactgacgccaccgcccgaagcctccccgagaaacaggagccggcgcggggatgtcgtccatctcgcggaatctccggcgatccctcgccccggaccgcctgcgccgcctctcccagcacccgcgagagtatgtgacgtcggagtgccaccgccccgtcgtcctccacaagcgcggccccgacatcctccacgacccctggttcaaccggggcacggcgttctcgatgaccgagagggaccgcctcggcctccgcggcctgctcccgcccaacgtcgtctcctcgcagcagcagatcgacagattcatgcttgatctgaaacggctgcagagatatgcaagagatggcccgtctgatacttatccattggcaaaatggcgcatccttaacagattgcatgacagaaatgaaacgatgtactacaaggtactaatagataacattgaggagtatgcacctatcgtttacacaccaaccgttggacttgtttgccaaaactacagtggtctgtttcgacgccctaggggaatgtactttagtgcagaagatcgtggggagatgatgtccatggtgtacaattggccagctgatcaggttgacatgatagtggtgactgatggaagcaggatattgggtcttggtgatcttggggtgcatggtattggcattgctattggaaaattggatttatatgttgctgctgctggaataaatcctcaaagggttcttcctgttatgattgatgtcggaacgaacaacgagaagctccttaaggatcctctttatcttgggctacaagagcaccgtcttgagggagatgaatatgtttcagttattgatgaattcatggaagctgtttttactcgctggcctaatgttattgtacagtttgaagatttccaaagtaaatgggcctttaggttgttgcagcgttacagaaagacttatcgcatgtttaatgatgatgttcagggaactgctggtgtcgcaatagcaggccttttaggagctgtacgggcacaagggaggccaatgatagattttccaaagcaaaggattgttgttgctggcgctggcagtgctggtattggagtggtgaatgctgcaagcagaaccatggcaagaatgttgggaaacaatgacgttgcttttgagagtgcgaggagtcaattctggatagtggatgcccatggcctaataacagaagaccgagaagatatcgatccagatgcacggccttttgctagaagaaagagtgagcttggtcaccagggcctaagtgagggggcaagcttagttgaagtggtactgtctaatcttgtacatggtgcttttataagcatgatacattgtgaggttactatttttttttaaagatgaacagccacattttgtgaaggaatatgtatttccaaaataagtttctaatatggactcggttcattactgcactcttta

SEQ ID NO: 144385 - DNA, 978 bp, Zea Mays
tgtgtctcatgtttgcagcaagaaaggatttctatattgttgcatatatactttcaaaagaatttggttgtctaaatcctaggcttactttaaataatcaccatggtctgttgttgcaacaacagcccgtatcagttacatagatatagatatacgctaaaaaggttgcaaggaaaagtgacattcctcgacgttacattccactgcggcttagcatcgaatctctctcgtgcatggggaaatcatagtttgattgctttcttttgcaggcgttcgccgctctgagaggtggagaagggggaggagcagcatcgactgcagcttaacatggaacagcttccgcgccgccgcgcgtgggccaaatcactagcaatctcagctggaggaggcaaggacagcagtgtgtagcactgtagcgtacggcgggacgtagtgtatctgcatgcgtggacgcgccatcgcttcttgcgaaccagttaaccaaaaggaaatacttgccttttagatctcaatctccacgcactgaagcaacaagatctctaaaaaacaagaggatctcgagtagaggactttggatacgatcgacgaacggatctggaaccaggtgtcgaccgaatcgaaaaggacggcgaaagagaaagaaaaaaattttgtatctcaccaaagagacgcagccgatgagcaagccaagagaagtcgaagtcttcagacggaagcggagttttccttgacggcgacgaaatcaaagagacgcaaagaggatgaaagtgagacgaagcaactgggagaggaagcgagatgcggcggatggggaggtgtgcgatggaaatatctggaaacagttgtcgtgtctgtgttttttcccaccccactcggcggggaccattttgaaccggcttcaataatatagaaatgtggattttggtatggataaccagacaactttgaggactattaagataatatggagttagacaa

SEQ ID NO: 144386 - DNA, 1388 bp, Zea Mays
ccacccatcccctcaaaattcgcagcgtgtctcttcctccatcgcagcgtgtctcgtgctccccccaggctcctcttcctcgctttccctccaccccgggcgcaaaccctaaccctaccgtcgctcgccccgcggcgtctgccaatggcgcgccccgtgtgagtgtgcgcgagagaggggtagaccttgaggccgctacccggggaggagagcgagagatgtataaacaggggggagcggggggaggggctgggctggaccggaagcggatcaacgacgcgctggataagcatctcgagaaggcggtcgcgtcgccgtccacgtcgagggggtcggcgggcggcgggcgcgaccaccaccgcctcgtcgtgccgtcctccgtgtcgtccatccccaagggccgctgctccgaaggggagtctgattctgatagtgaagcatcggatgttagcggctctgatggagaagacacctcatggatttcatggtattgcaacttaagagggaatgagttcttctgtgaagtcgacgatgattatattcaagacgacttcaacctttgtggtctcagcagccaagttccttattatgattatgctctcgatctcattttagatatcgagtcatctcatggtgatatgttcactgaggaacaaaatgagctcgtagaatcagctgcagagatgctttatggtctgatacatgcacgatacattctgaccagtaaaggactggctgcaatgctggagaagtataagaactatgactttgggcggtgcccgcgtgtttactgctgtggtcaaccatgcctgccagttggacaatcagacatccatcgatctagtaccgtgaagatatactgccccaagtgtgaagacatctactacccacggtccaagtaccaagacatcgacggcgcatactttgggacaacgttccctcatctgttcctgatgacatacgagcacctcaagccacagaagctctcgcagcgctatgttcctcgtgtctttggcttcaagctccacaagccatgaacctcatgtatttgtcttttaaactcctcaagacgtggcactgggggcatgcgggagttttgcaatccttgaagacttgcatataagagcgccattggcaggtcagtggattggtaaaattctatcatgctgcagcgtgcttgtaccttagctggctggcacctatccaacatttgaatgtagctctaaggatatcaatgttgtaacctaactgctattgttctttgattagtaaaccaggagccccccctacaatgtagaatatggcaattatttatggctttgcagaaaataacaacccttcatctgcttggttctccaaaaagctatttatctaaaaaaatatcaaaa

SEQ ID NO: 144387 - DNA, 1592 bp, Zea Mays
gtttcctttcctttttgcattcccacccacccatcccctcaaaattcgcagcgtgtctcttcctccatcgcagcgtgtctcgtgctccccccaggctcctcttcctcgctttccctccaccccgggcgcaaaccctaaccctaccgtcgctcgccccgcggcgtctgccaatggcgcgccccgtgtgagtgtgcgcgagagaggggtagaccttgaggccgctacccggggaggagagcgagagatgtataaacaggggggagcggggggaggggctgggctggaccggaagcggatcaacgacgcgctggataagcatctcgagaaggcggtcgcgtcgccgtccacgtcgagggggtcggcgggcggcgggcgcgaccaccaccgcctcgtcgtgccgtcctccgtgtcgtccatccccaagggccgctgctccgaaggggagtctgattctgatagtgaagcatcggatgttagcggctctgatggagaagacacctcatggatttcatggtattgcaacttaagagggaatgagttcttctgtgaagtcgacgatgattatattcaagacgacttcaacctttgtggtctcagcagccaagttccttattatgattatgctctcgatctcattttagatatcgagtcatctcatggtgatatgttcactgaggaacaaaatgagctcgtagaatcagctgcagagatgctttatggtctgatacatgcacgatacattctgaccagtaaaggactggctgcaatgctggagaagtataagaactatgactttgggcggtgcccgcgtgtttactgctgtggtcaaccatgcctgccagttggacaatcagacatccatcgatctagtaccgtgaagatatactgccccaagtgtgaagacatctactacccacggtccaagtaccaaggcaacatcgacggcgcatactttgggacaacgttccctcatctgttcctgatgacatacgagcacctcaagccacagaagctctcgcagcgctatgttcctcgtgtctttggcttcaagctccacaagccatgaacctcatgtatttgtcttttaaactcctcaagacgtggcactgggggcatgcgggagttttgcaatccttgaagacttgcatataagagcgccattggcaggtcagtggattggtaaaattctatcatgctgcagcgtgcttgtaccttagctggctggcacctatccaacatttgaatgtagctctaaggatatcaatgttgtaacctaactgctattgttctttgattagtaaaccaggagccccccctacaatgtagaatatggcaattatttatggctttgcagaaaataacaacccttcatctgcttggttctcgtaagatggccctttaattttgtagtttgcgaacttctattttgaaatgtgatttgcgaagggtgcgtcatcttcattgcctttggatttttgtagtttgcgaacttctgtttagatgctagccaaggcttttttggttggtaccgttgtggttaaagtacaatactctctttgttctatattataagatgttttagtttttttttt

SEQ ID NO: 144388 - DNA, 1758 bp, Zea Mays
gtttcctttcctttttgcattcccacccacccatcccctcaaaattcgcagcgtgtctcttcctccatcgcagcgtgtctcgtgctccccccaggctcctcttcctcgctttccctccaccccgggcgcaaaccctaaccctaccgtcgctcgccccgcggcgtctgccaatggcgcgccccgtgtgagtgtgcgcgagagaggggtagaccttgaggccgctacccggggaggagagcgagagatgtataaacaggggggagcggggggaggggctgggctggaccggaagcggatcaacgacgcgctggataagcatctcgagaaggcggtcgcgtcgccgtccacgtcgagggggtcggcgggcggcgggcgcgaccaccaccgcctcgtcgtgccgtcctccgtgtcgtccatccccaagggccgctgctccgaaggggagtctgattctgatagtgaagcatcggatgttagcggctctgatggagaagacacctcatggatttcatggtattgcaacttaagagggaatgagttcttctgtgaagtcgacgatgattatattcaagacgacttcaacctttgtggtctcagcagccaagttccttattatgattatgctctcgatctcattttagatatcgagtcatctcatggtgatatgttcactgaggaacaaaatgagctcgtagaatcagctgcagagatgctttatggtctgatacatgcacgatacattctgaccagtaaaggactggctgcaatgctggagaagtataagaactatgactttgggcggtgcccgcgtgtttactgctgtggtcaaccatgcctgccagttggacaatcagacatccatcgatctagtaccgtgaagatatactgccccaagtgtgaagacatctactacccacggtccaagtaccaaggcagtatcctaaccatactcttatcagactgtcttaatgcgtatatgtttcaaacttcgacctcttggtgagaactcaaaccaagggtattttttgtaccaagtctgacacagaatgggctgcccatgttctcagatgtgttagcacccactcacccacagctctcgtcggttgaaacaaaacattaaggactagcttgggaacctcatttttccaagtgattttcatttttccatggaaaatgaactatttttttgggaaaatgaaaaccccttgggaaattgaggttcccaaactagccctaaacatgaaatctgtctagtgcgcccatcaatcaccatgtgttttcaacccccatagattaatattgtttagtacctgaggtgcacaagctctcttctgtgttattgtggttctgtagttgcagaatgtttgccattttgttatatcctgctattttcttaaccttgttcagacatcgacggcgcatactttgggacaacgttccctcatctgttcctgatgacatacgagcacctcaagccacagaagctctcgcagcgctatgttcctcgtgtctttggcttcaagctccacaagccatgaacctcatgtatttgtcttttaaactcctcaagacgtggcactgggggcatgcgggagttttgcaatccttgaagacttgcatataagagcgccattggcaggtcagtggattggtaaaattctatcatgctgcagcgtgcttgtaccttagctggctggcacctatccaacatttgaatgtagctctaaggatatcaatgttgtaacctaactgctattg

SEQ ID NO: 144389 - DNA, 655 bp, Zea Mays
gaagttaacttttgtttacatattatattcgatcccaataaattctgaagaccacttcttgactacgcaggtatcccgtgcaagctggggataccatttggatggcaccgtttgttcctcagtggtatgctgcccttggtaagaccaggacgagatacttgctgtacaaagatgtcaataggaatccattgatatgatcaagaaaccagaacaaggagggaataaatcaaatgtcgagctgtgccaggtataaagaatttcaatgggagatgatcacaggaatgagaaaaggagatcttattgtatgctgaaaaatcttgaaaccaaaaataacgtgggaagttgaatgtgtacttgtgatgtccataactgtcaatctttggtgactagtgcgactggaattgtgatgtaacgtattctggacagcagatgccaagttggatatgctgtgacatttgtgaatggctaatcccatgaatttaggtgatgtttggtttagaaatgataatgcatatgtaaacggtatgagatccaggggcaatgattacaggacaaacagttttccattttgttcggttccaccgtagatagtgttcaggtacgtgtaccgctcaccgttcgggcttgttcggttagagttagattgaaggaggtt

SEQ ID NO: 144390 - DNA, 1488 bp, Zea Mays
atgccatccaagtcaccatgtggcccaccaccaaaccactgtccacgagtgtgctcatctcgtggcctcagcttcatttataaaaatcacaagcatttttaaaaaagaaatacagaaaaagaacgaacgatgccatccaagtcaccatgtggcccaccaccaaaccactgtccacgagaccacgagtgtcctcacactgccaccagtaccgccaccaaccttgtccttgtgcgttccttgtagccatctccgactccgcgcctccgctgcctcccgaaagcattgccagttcctccgcacaacatgacgcgcatccaccgcctccgccccctcttcctcttcgttctcttggcgtcgctgcaatgcggtgcggcgacggcggcggctggatacggaggtggcgccgaggggttctgctcggcggagccgtccagcaagtgctccggggatcagccgctctactggaaggtcacccatcccaccctcgcgcccgcgcacctccaagatttacctggcttcacacgtagtgttttcaaaagggatcatgctttaataacaccagagagtcatgtattcagtcctttgcctgattggatcaatacagtaggagcatatttgatcagtccagctattggtgcacacttcattatgtatctagcaaacatgcaagatggttcaaaatcagccctaccaccgaaagatgttgaaaggtggattcttatggatatcttcctgcaaacacaaagcattctatgatctcagatgaaccaaccactcttgtaatatttgagaggaggtacaatgccattgaggattcccatcctgatctaattgtgggttcaacagataagcaaccccttctcgaaaccccgggagaggtatttcaactaaggaagctgctaccgacttctctgtcctatgactttaatatccatataatggactttcaaccaggcgaatatctcaatgtaaaggaggttcattataatcaacatggacttcttcttttagaggggcaaggaatataccgactgggagagagttggtatcccgtgcaagctggggataccatttggatggcaccgtttgttcctcagtggtatgctgcccttggtaagaccaggacgagatacttgctgtacaaagatgtcaataggaatccattgatatgatcaagaaaccagaacaaggagggaataaatcaaatgtcgagctgtgccaggtataaagaatttcaatgggagatgatcacaggaatgagaaaaggagatcttattgtatgctgaaaaatcttgaaaccaaaaataacgtgggaagttgaatgtgtacttgtgatgtccataactgtcaatctttggtgactagtgcgactggaattgtgatgtaacgtattctggacagcagatgccaagttggatatgctgtgacatttgtgaatggctaatcccatgaatttaggtgatgtttggtttagaaatgataatgcat

SEQ ID NO: 144391 - DNA, 1550 bp, Zea Mays
atgccatccaagtcaccatgtggcccaccaccaaaccactgtccacgagtgtgctcatctcgtggcctcagcttcatttataaaaatcacaagcatttttaaaaaagaaatacagaaaaagaacgaacgatgccatccaagtcaccatgtggcccaccaccaaaccactgtccacgagaccacgagtgtcctcacactgccaccagtaccgccaccaaccttgtccttgtgcgttccttgtagccatctccgactccgcgcctccgctgcctcccgaaagcattgccagttcctccgcacaacatgacgcgcatccaccgcctccgccccctcttcctcttcgttctcttggcgtcgctgcaatgcggtgcggcgacggcggcggctggatacggaggtggcgccgaggggttctgctcggcggagccgtccagcaagtgctccggggatcagccgctctactggaaggtcacccatcccaccctcgcgcccgcgcacctccaagatttacctggcttcacacgtagtgttttcaaaagggatcatgctttaataacaccagagagtcatgtattcagtcctttgcctgattggatcaatacagtaggagcatatttgatcagtccagctattggtgcacacttcattatgtatctagcaaacatgcaagatggttcaaaatcagccctaccaccgaaagatgttgaaaggtttgtttttgtactacaagggagcatttcattgactgtggggactggaactatccattctctgctggtggattcttatggatatcttcctgcaaacacaaagcattctatgatctcagatgaaccaaccactcttgtaatatttgagaggaggtacaatgccattgaggattcccatcctgatctaattgtgggttcaacagataagcaaccccttctcgaaaccccgggagaggtatttcaactaaggaagctgctaccgacttctctgtcctatgactttaatatccatataatggactttcaaccaggcgaatatctcaatgtaaaggaggttcattataatcaacatggacttcttcttttagaggggcaaggaatataccgactgggagagagttggtatcccgtgcaagctggggataccatttggatggcaccgtttgttcctcagtggtatgctgcccttggtaagaccaggacgagatacttgctgtacaaagatgtcaataggaatccattgatatgatcaagaaaccagaacaaggagggaataaatcaaatgtcgagctgtgccaggtataaagaatttcaatgggagatgatcacaggaatgagaaaaggagatcttattgtatgctgaaaaatcttgaaaccaaaaataacgtgggaagttgaatgtgtacttgtgatgtccataactgtcaatctttggtgactagtgcgactggaattgtgatgtaacgtattctggacagcagatgccaagttggatatgctgtgacatttgtgaatggctaatcccatgaatttaggtgatgtttggtttagaaatgataa

SEQ ID NO: 144392 - DNA, 671 bp, Zea Mays
atatttatacctgtaaattatgattcatagatgatgaacaatcacttaaacaatataagtctggtgccaaatgctatttcagatgatacctaaatgttacagcacatagttttgatacatgcagggtatccttagaaaagcaagtaaattatgtaatagttgaaagataattctcaatatcatatgtcagatgttctttctggttcacttctctatctggttcacaattcattccagagtggtgcaacaaattctgaattggttgaaggagttctctcctagcactatcctggagacggatgttggagaaatatgactgctggatctgcaataggataatgtcttttagtcgatcccttttgtgcttgtttggtgaacttgtgtccccaatctgttgaactctgtaaacatttgctttccataaaagcagagatattctccttaaaaactcagtccagaatggtgatatatgaatgatccctgagagtttataaggtacaaccgtacaagtccaggtgctagagacttctcaatttgctggaaaatgctgtagtattttgtgttgacttgctgtttgatatatgctcagtacctcactgtaaaatgtggttctcttgtttgcctcttaacaaaatcctgagaaatgacatgagaacaaattgagaattagt

SEQ ID NO: 144393 - DNA, 2215 bp, Zea Mays
atggacgtcggtggcggcgccaccggcacacgctgccgagaccccaccgctgacccctcgtcccagttcttcgttgacgctggccatccatacgcagtcgctgcagccactgcgctcacctcccaccgcaccaagtccaagtggtcccacctctcttcggtccccgtcccctcccccttcctggcctccgccgccgccggcgtgctcctcctcctccgccaccgaccgcacaccgcgctccgcttccatgccttcgccatccgccgcctccttccctcccgctcccctccccctctcgtcttctctgccgccgcagcccacgtcgcggcggcctcccgccttcggggccctgccctctccatccttgcctctgcctcccgccactgctcaccggcccagatcttcaatgccctcgctgccacctaccgctgctttgcctccgccccattcatcttcgacctcctcctcctcgcctaccttcgctcccgccgcgacgtcctcgctgcggcctccgtcgcccgccgcatcctcgctgccggcgcacggccgctcccctccactgcggcagctcttcttcgttcactcccttccgccaccgcggccctcgacatgtatcatcaaatctacacgcatccaagtccacggagcaatcacctcctcctgccgactgttcacaccttcaattccctcctccttgctttccaccgcgaaggcaagtgtgatgaattcaagattgtgctccaggaaatggacaaatattcctgcaagcacaacgtgtgcacctacagcatcaggatgtctgggtactgcaatggcgggcatgtggataaggcgcgaacactatgggatgagatgattcaggaagggatccagcctgatataactgcgtacaacacaatgattagtgggtattgccattctggggaggtaggggtggcagaggagatgtttaaaaatatgttgatgggtgggattgattcaagtgccacgacgttcgaatggttggtcagagggcattgtatggcacgggatgtcgaggcagcaatgcttgtgcgtgcagacatgaaaaggaaggggtttgggttggcgccagaggttgttgaggaattgctggatggattatgtcaaaatgggagggttgaggatggcttgagtgttttgcgagaggagatgaagagggaagaatttgtgccaacccggaggagttacgaggtgttgattatggggttttgtgatggagggaaggtggaggtggcaatcagactccaagcagagatggctggaaaaggattcactgctggcagcgaggtgtactatgcatttattagtgcttatgagaagtctgaaaattatgagatggtcgagaagttgaggaaggaaatgtcggcgatgggcacttagagcatgtctagcagctcaccaataattcatccctaataaaatggtattggtggtcaccaatagtgctttttttggaatattggggagactctatagtagattaccaataatctttcccaatacatgggacccacatgtcagaatagaggatgtgggaggaagaagatgacgacagttgttgtggtcccaacacctatagagggagatgcaactccccttttatttgaggggagatgggagatttgttttggtgaccaccaaaaaaagggagagctattggggagctgttggagcaatggaattgcctcatctcccccaatatgacagttttatggggatgagggatggtattggagagctactggatgctctatcggatctgatatttggcttggatattgcacagtgatgcatggatatcaacctcacctaattgcagttgagaactatgagtggtgcaacaaattctgaattggttgaaggagttctctcctagcactatcctggagacggatgttggagaaatatgactgctggatctgcaataggataatgtcttttagtcgatcccttttgtgcttgtttggtgaacttgtgtccccaatctgttgaactctgtaaacatttgctttccataaaagcagagatattctccttaaaaactcagtccagaatggtgatatatgaatgatccctgagagtttataaggtacaaccgtacaagtccaggtgctagagacttctcaatttgctggaaaatgctgtagtattttgtgttgacttgctgtttgatatatgctcagtacctcactgt

SEQ ID NO: 144394 - DNA, 141 bp, Zea Mays
gtggatcctctttcccaccaagtcaaggtttgtgaattcgggagtgctagaatcttgatcttccacaagagaatgtctccagaagcaatggataggcttctagaaaaagataaagtgccaaacccatgctatagagtatag

SEQ ID NO: 144395 - DNA, 684 bp, Zea Mays
acaaacaaacacagatatgatgaggttaatagaagtgttggagcaagtactgaagcttcaagtgaagccaataatgtgcctagaaccgagaaggcataggaagcagattcagaagacctagacctatcaaaggaggaccttttgaagctgcttcttgagaaagatggatcattgaagtctaaagataaagagtttaaagatatgaaggataaagtcctacaacaagcgtggccttgccacaacaagcgtgagtcagagaacaccaaaaagtatgccatacagaggcggaggaacggtgtggacgtgccgcggcggctgctgtcatgtgcatcggtgaggcgcggcgaggacggtatcttcggccgtcacctagggacgacgacgatgggtggagccaagtggaaggaggaggagatggtgaagacgttgcggcagtcggtgtggctcacggaggacttccccctgagcgtcgacaaattcctgtcgttgctggacatcctggcctgccgtgtgtgcgccgtgcgctggctccgcgtgctgctcaccaccaagttcccaccggggactttcccagtaaagtttattccagaacagtaccggcacttaggacacagatttaagggaatttacttaactggcactcacctcacctgcattgatactgtcttgtttgatgattcatag

SEQ ID NO: 144396 - DNA, 1917 bp, Zea Mays
ttcttgcttgcggtatatagacgatgcaccacgttcgtgtctttcatcaacagctctgctagctgcctagcttcttgtagcactagcaagttgtactcctctcctaccaagtactagcagagtagctttgtagcaaccatgggaagcgcttgggccaacgtccgcgagatctgccgcgcacagcgtgccgacggccccgcagccgtgctcgccatcggcacggccaacccggcgaactgcgtgccccaggacgagttccccgacttctacttccgcgccaccaagagcgaccacctcactggcctcaaggaaaagttcaagagagtttgccagaagctgggcgtgcagaagcgctacctgcaccacaccgaggagctgctgagcgcgcacccggagttcctggaccgctcctcgccgtccctcgacgcgcggctggacatcgtcaagaccgccgtcccggagctcgccgcgcaggcctgcaggaaggccatcgccgagtggggccgcccggccgccgacgtcacgcacctcgtcgtcgccaccaactccggcgcgcacatcccgggcgtcgacttccagctggtctcgctcctgggcctccgcccgaccgtgcgccgcaccatgctctacctcaacggctgctccgcgggcgccgccgcgctgcgcctcgccagggacctggccgagaacaaccgcggcgcgcgcgtgctcgtcgcctgcgccgagatcaccgtcctgctctttgacgggcccgaggagggctgtttccagacgctcgtcaaccagggcctgttcggcgacggcgcgggagccgtcgtcgtcggcgccgacccggcggccccggccgagcgcccgctgttcgagatcgtgtccgccgcgcagaccgtcataccggactccgagggcgtcatcaccatgcacctcaccaagggtggctacggcggcaacatctccaccaggcaggtccccgtactcatcggcgaccacatcgagcgctgtctcacggacgcttttgcgccgctcggcgtcggcgccggatggaacgacctgttctgggacgtgcacccgggctcgtcggcgatcctggaccaggtcgacgccgtgctcaagctcaagcctgagaagctggcggcgagcagacgtgtcctcagcgagtacgggaacatgttcggcgtcacggtgatcttcgtgctcgacgagctgcgccgccggatgacgaatggggaagaggagggggcgcctgcagagtggggggtcatggtggcgtttggacccgggctcaccgtcgagacgatggtgctccaccgatcaggcaccccagccgagacgaaactaggtgaggcatgaaaaggtggacgtgaccaatttgtgttggaacttggatcaggattgcatcattgcatgcatgttacttggtcaacatattccgactatgtcactattcttgacttcagcctataataaattcaactacataaacaactgttaaactttatctagttacaaatacagtaccggcagtgagagaaactgttgagcaatattgctacaactccaaccaaccaggtgacaaatatgtgtgacagttctccaactgtgtttgatttgaaactatgtcaatgttgatgtcaaagaccatttacatgtcgaattacgacgatattatgtgaatgtcgaactatgaaaatactatgtgtaacggatgttggaactatttgttgatgttaaagacttgttgtaatgtgtttgtgaatgtgagttcatgtttgagaatgtgaattaatgtttgtgaatgtaattgaatgtgaatgcgaatgcgtggctcagtggttgtatatgaaatctatgtatatatgaaagctgtgttttcggtaatattaaaaatggacaaaaaatagcgtttttttgcccctgctg

SEQ ID NO: 144397 - DNA, 1694 bp, Zea Mays
ttcttgcttgcggtatatagacgatgcaccacgttcgtgtctttcatcaacagctctgctagctgcctagcttcttgtagcactagcaagttgtactcctctcctaccaagtactagcagagtagctttgtagcaaccatgggaagcgcttgggccaacgtccgcgagatctgccgcgcacagcgtgccgacggccccgcagccgtgctcgccatcggcacggccaacccggcgaactgcgtgccccaggacgagttccccgacttctacttccgcgccaccaagagcgaccacctcactggcctcaaggaaaagttcaagagagtttgccagaagctgggcgtgcagaagcgctacctgcaccacaccgaggagctgctgagcgcgcacccggagttcctggaccgctcctcgccgtccctcgacgcgcggctggacatcgtcaagaccgccgtcccggagctcgccgcgcaggcctgcaggaaggccatcgccaccaactccggcgcgcacatcccgggcgtcgacttccagctggtctcgctcctgggcctccgcccgaccgtgcgccgcaccatgctctacctcaacggctgctccgcgggcgccgccgcgctgcgcctcgccagggacctggccgagaacaaccgcggcgcgcgcgtgctcgtcgcctgcgccgagatcaccgtcctgctctttgacgggcccgaggagggctgtttccagacgctcgtcaaccagggcctgttcggcgacggcgcgggagccgtcgtcgtcggcgccgacccggcggccccggccgagcgcccgctgttcgagatcgtgtccgccgcgcagaccgtcataccggactccgagggcgtcatcaccatgcacctcaccaagggtggctacggcggcaacatctccaccaggcaggtccccgtactcatcggcgaccacatcgagcgctgtctcacggacgcttttgcgccgctcggcgtcggcgccggatggaacgacctgttctgggacgtgcacccgggctcgtcggcgatcctggaccaggtcgacgccgtgctcaagctcaagcctgagaagctggcggcgagcagacgtgtcctcagcgagtacgggaacatgttcggcgtcacggtgatcttcgtgctcgacgagctgcgccgccggatgacgaatggggaagaggagggggcgcctgcagagtggggggtcatggtggcgtttggacccgggctcaccgtcgagacgatggtgctccaccgatcaggcaccccagccgagacgaaactaggtgaggcatgaaaaggtggacgtgaccaatttgtgttggaacttggatcaggattgcatcattgcatgcatgttacttggtcaacatattccgactatgtcactattcttgacttcagcctataataaattcaactacataaacaactgttaaactttatctagttacaaatacagtaccggcagtgagagaaactgttgagcaatattgctacaactccaaccaaccaggtgacaaatatgtgtgacagttctccaactgtgtttgatttgaaactatgtcaatgttgatgtcaaagaccatttacatgtcgaattacgacgatattatgtgaatgtcgaactatgaaaatactatgtgtaacggatgttggaactatttgttgatgttaaagacttgttgt

SEQ ID NO: 144398 - DNA, 107 bp, Zea Mays
cttgttttgaatcattttactgcacctgtttcattccctctttaactaaatgcacaatagaacagctctatttaacctcgttcctcaatgaaatggacttaatctcc

SEQ ID NO: 144399 - DNA, 5619 bp, Zea Mays
gcaccgggtgattctcctgcttccatccctgctggtcggtccaagtcgcagcgctggagtgaagacggtggttactcctctgacgtaccccagaggcctttcaaactgcaagcttcgtacaaggacgttctggtatcttctacaagctctgtcctcccttcttctggccgggaggatggcgatggctgggtgcaagttcttggccgtcgtgctcgtcgacggagctcctcccattctaagccccttcctatttcgatgcccattgatctgaggggaaagtgctttaattgcctctcgccatctcatcgagtagccgtttgtcatcatcaagtgcggtgtttctgttgccggctgcctgggcaccatgctcacgtgtgcccgcgccggaggacagagacgcttcatcatcatcgtacccaagtgtggcgtccggtctcccaggggacatcttccgtgaagatcattgggtgcagaatggaggattctgcgcgtcttgtcgatggaatttctggtggcagaggaagaaggcgtactcgtcgtggtccgaggaagagttctcggaggggcagtggtcatgatgatcctcccacctcttcctcatcgccgcctgtccctgatcctgccactgcctccgtccgtcaggtgtgtttcatcaagcgctccaggagcatctctcaggctgaagaagagcttcggcgtgctttacttgtctcggttattgctttagagggctctttctgcgcgacggatgtcttggatgcgctcatctcaagtttcaaccttgaggctgatgcgctcgacttacgcatggtggcgtcaaacaacttcattgttcaattttcaagtgttgagctagcggatcgtgtgcttgctgggggtggagccttacctcagcttatggaattagagcttcatggaattcctgctcatctttggaggattgaaacagtggagagtcttctatttggtctttgtatgattcatgagatccttccaagttcatttgaggacaacaacagggctattttcaagcttcgtgcatggtgccctgtaccgacattgttgccttcaattgttgatctgcatgttgaggaaccacctgtggcttttgaggtggattcgtcgtatccccgatcactggtatatcctatctccgttttggcttcatgtttggatgatcggatggtacgtgagacaatcctttctcatccaccattgctggatcagtctgatgatgatcgagatattgttcagcggaagagacggttcggtttccatgatttgactgttcgtgcttcggttaagtctcgccttggtccgcgagtttctattagtgctgataaaggcggcccagttgatagcctcgctctcccaattgttttggacgctgagctgatggcgcctgggatgggacccttgatatctgcttcattaatgtttggctcttcgggtcctggcagtttgtctgctgctttggcgcccccccatgcatgctttaatgagggtatctcggttgagacgtcagttaatgacctctggtactctgttaagggcggcccagttgattgcctcgctctcccgattgcttcggaagctgagctgacggcgcctggggttagaccctttatccctgattcattgatgaatggctcctcgggttctgtcagaagggcggctgctttggcgtccccccttgcttgctttaatacggacgttttgggtggggcggcggcagttaatgccctggcccgtatgtttaatcaggcagtgatattattgacttcggatattagttggatgacgcctagggtggagagatttcgtttctctgctaccttgtgggaggtttctagttctggctccctggtttctgctttggtgcctgctgttttggcgccatctagtgcagattcaaaagtggatgactcgttggtgctgtcagagattggtgaagctcatgactctttgacttctgctcttatggtgtctgaacctgctcagaatggtggattggctcttctggacacagtcggttctcagatctcagtggattctgatgatttgtcttttgagcagaatgataaccttcacagctctttggactttatgtggcctcctcctaccctggtccagcagccttgcaaggtcttgcaagtgtattctcgaagaaaactccccaagcaaagtcgtatagcttcagtggaggaggtggctatgacattcattaacaagatcgtaaagcccctcacaaatgtgttaccggttccttcatctccaaagcttaaagccagaaagactatcccgcccaacttcgtgccaagaagatcaagacgtgttgccaaacttcctccccttagggtgaactcagcggctcacactatttgtttgaagctggggttgaaaaatggagatgctcctgtttctgcggatgatctagatcgctgtgctagagaatttgataagcctctttctgtcagtcagataaaggctttagctaccttgttccgatgggagatccctgatgaggagttcctcgtttgtccagctgatgggctgctgcaagcctcgtaatgtggattaccccacatggtcgtattctatctcacaatgaataattttgctatactggtttggaatgtgaggggtttgaatgaccctcatcgcagggatactctcagatcattaataaactgtgtgatgcctactattgtatgtattcaagaaaccaagctgaattctatctctcactgggatgttgcttcctgtcttggctcagagtttggggattttgttttcttaccttctagtggtactagaggaggtattttgatagcctggcgtagagggctcatttctgctatagactccaaaattcatgaccattcagtgtcagtctgttttatgaaagaaaacagcaccgcttggtggttctcgggtgtctacggaccccatagagatgaggagaaattggcttttttagaggagctttctctggtcagaaccagttgtcctggcccctgggtgatcgcaggggacttcaatatgatcagatgcgctgatgacaagagtaattcaaatatcaatagaactcttatggacagtttaaatatttggattaataatcactccctcaaggagttgcctctcactggaagaagattcacctggtcaaatcaaagagatgttcctactttagtcaagctggacagagtattctacacttctgattgggaggacttatttcctgattgttctctactgagttctgcctctaatatgtctgatcactgtcctctgatcctaaggcttaatgagacctttaagggaaagaagcgttttcattttgagagtttttggaccaagatgcaaggttttcaggaggtggtggctggttcctggaatgcttctattttggctgcttgtcccatgcagagattatcccttaaatttaagagacttgcaaaggacctgcaatcctggagccaaaaatctgtgggtaatgtttctactcaacttgctttggccaagatgactctacatcttctggaaattgcccaagacagcagatccttgtggatggctgaagagtggttgcggaaaaaactaaaattattatgtctgcatctttcttctttggaaagaaccattgctagattaaggtctagagtgaagtttatcaaatctggagatgccaatacggctttctttcatgcgcacgccaggttcaggaaaaagaagaactttattcataaactgatggtcgacgagaatcttgttacttctcaagaggctaaacagcaggctatgtttcagttctataaggatctgattggtaaagcgtctgagcgaaattttagtcttaaccttgctaattttcacaaaggcaatttggagctctcacattttgataatcccatttctttggaggaaatcaattctgctgttttaagtcttcctaatgataaagcccctggacctgacggatacacagggcgtttttataaatgttgttgggacataatcaaatgggaccttctggctgcagtcttatttctccaacaaggatctcctggaaggcttgatttgttgaattcagcatatattactctcattccaaagcatgttgaggctattcttccgggtgattttagaccaatcagcctagttcacagttttgcgaaacttctcactaaaattctagctaacaggttagctcctgagctggataaaatggttagcacaaatcaaagtgccttcattcggggaagatgtattcatgataactttattatggttagtcaaactgccaagatgttgcaccagaaaaaaatccctgcaattttcttgaagctggacattaaaaaggcctttgactcagtgcattgggcatttctgctggaaattcttcgacacttaggttttgggcagggttggtgcaatctgattttgaacctgctatggacatcttccactcaagttcttgtcaatggagtgcctggacagcctataaatctcaagcgtgggttgagacaaggtgatcctttatctccccttttattcatcctagtcatggatgttcttaatagcctattcatcagggcagatgagtgtggtttattacacccccttgctggcagaaacattagccaaagggtttcaatgtttgcagatgatgttgctgtgtttgtaaaaccagtttctggggacttagtggtagtcagagaaattttgaggtgttttggtgttgcctcaggtcttcatactaacttgcaaaaaagtttctcctacccaattcagtgcaatactgagaggactacgctggctgttcagaccttgggttgtgcctcaaaaaattttcccacaacctatcttggtctccctctaagcagcaaaaaacttagtgctggggatctcgctcactggatagataaaattgctgccaagcttccaggatggaaggctgagcttttaaatcttgcgggaagaatcactcttatcaaatctgtcctctctgccatcccagtttacttatttattgctcttaatgctcctaaatgggttatcaaagccattgataaaattcaacggaacttcttgtggaaaggaagaaaggaggctagaggaggtaattgccttgtagcttgggataaaatctctcggcctcttgatttagggggccttggaattcctaatctccaaaagatgaactgggccctacaattgcgatggctttggctacaaaaaactgctccttcgaagccttggagtggcctggatcttaatatatcttcccaggcccgagctttctttcagatagcagtgactaccaccattggtaatggtatttcaactttattttggaaagataagtggattcatgggtattctattgtggatatagctccccttattgctgctgcagttccgatgaagtttaaaaaagtgaggactgtgcagcaggccctcacctctcatttttgggttcaagatatccagaagaatctctctctagctgagattgagcaatatctacaattatgggaggtaattgaatcttttcagcttcaaaattcaaatgatcagcatgtgtggatatttagcaacgatggtctgtacacc

SEQ ID NO: 144400 - DNA, 1419 bp, Zea Mays
ctaggtgtccaaaacagagtaaagtttcaagactcttttgtttagaatcgtgcaaaggatcatctagcagtgcatttatcatggaggagatgaaaagaagatttaatgatgcatggggataattgagaaaacctactactgaagaaaaatgctttagctgagtctgaatgagtagcacatcttatggattttttgtttttcatagatctgtaattcacatgagggctacaaggatttggctatcatttttatgctttaattttcttgtttttaattacctacagtgagtgcattgcgaacgttgaagggttcacttggtcttcctcttcgatttggctggaatggtgacccctgtgttcctcagcagcatccatggagtggagttgattgccagtttgacagcaccaaagggaactggatcattgatggattaggtcttgacaaccaaggtttaaaaggggtcatacctagtgacatatctaagttgcaacatctacaaaacataaacttgagtggcaatagcataaaggggaacattccaatctccctgggtaccatctctgtggtgcaagtactggatctgtcatacaatgagcttaatggatctattccagagagcctcggcgagctgacatcattacagatactgaacctgaatggcaatcgtctttctggtcgtgttccagccagtttgggaggaaggcctctgcacagagctagatttaacttcacggacaatgccggactatgtggaatacctgggttacgtgagtgtggccctcatctatccgtggctgcaaagatcggcatggctttcggcgtgcttttagctattctattcctagttgtattcgctgcgtgctggtggaagagacgccagaacattctccgtgctaaaagattagctgcagcaagggaagctccttatgcaaaatcaaggacccagttcacccgcgatgtgcaaatggccaagcatcaacggacacatgaaaatgctcggagcagcaacagtgaaggctcgccacatttgctttcctagctcggtgagaatactgcgacagtgacttggcttccatctattcttcagttcctcctttgtatgctcctctgcagtcttgaaagacgaagctgctgtacatactagctaggtcacgaatggtgtatatacttgtattttttttggtgatctagaactcagtccaggagagggatcagtctatcagatgagagaaattacccatttcatcctacttactgttctgattactgctgttgatttccccttcactgttcaagtatgcttattgtcagttttgtactgtggtctgaagctctgcaaaactgcattttgccaggagctggagccccaggctgggctgtgttgagatatagagtgaattctacaccttttcctattag

SEQ ID NO: 144401 - DNA, 2816 bp, Zea Mays
aaaatcagggtaggagtgggacattcattctcacagccgtgcagtcctttctttttcaaatcttcaggggtggctcgtcagtcgtcatcactcatcaagatccaagaacaacgtgagctgctccactgtactagtctagccctccaccccctttgaggccgcgaccagaataaataaatagaaaccatgcgaccacatcgactcctgccttcattactaccgtcataaaagcagccaccttagcaccgtctaatcgccattgctctactccaattatgctctcaaatccagacagttcttcgatttttttcagccttttctccttcttctaacggaacaggaaggagcgagcaagacgccgttgagaaaacacggggtggtattctgcagtaaaaaaaaaaaaaaacactcgaggcgaaagtgtccaaagccagaggagagaaagagaagacttgtacttggagggcagctgggcaggtgaaaggaagaggaaagagggcgagtgcgacgggaggcgcaatgcggtggagatctcccgccgtgctgcggctgcagctgtggctgctcgccgtctccgcgtcgttggctgccctcggtgttctcgcggctgatcttagcaaagaaccatttactatccgtataagctgtggaagctttgacgatgtccggacggagcctacgaacacattgtggtacagagactttggttatactggaggcaggttcgctaatgccacccggccaagctttatcgttcctcctcttaaaacgcttcgatatttcccgctatctgatggccctgaaaattgctacaacatcaacaatgttcccaatggccactatcaagttagacttttctttgcgttactggacaaccctaatcttgacagtgagccgattttcgatgtttctgttgagggtactctgttcagctctttgcttctgggctggagcagcgacgatgagaagacatttgcagaagctttggtttttgtccaggactcaagcttatcagtttgcttccatagtacagggcatggtgatccatcgattctttctattgaagttctacaaatagatgacgatgcctataactttggtccaccacgggaaaaggggacagtgcttagagcagtcaaaaggctgaaatgtggctcaggaaagcctgcttttgatgaagatctaaatgggattcactggggtggggacagattctggttaggattgcaaactttatcatccagttctgatgatcaatcaatatcatccgagaatgttatagcagagacattgcttgcaccaaatttttaccctcaaggcatataccaatcagctatcgtgggcactgataggcaaccgagtttgtctttcgaaatggatgttaccccaaacaagaactattcagtatggcttcactttgcagagattgataatggggtaactgcagaagaacaaagagtatttgatgtactcatcaatggagacactgcttttaaagatattgatataattcgcatgacaggagagcgttttactgcacttgtcctgaataaaactgttgctgtcagtggaataacactaaaaatcatcttgcaacctgtgaaaggaacccgtgccattattaatgccattgaggtgtttgagataatcccagctgaaaagaagactttgcctcaggaagtgagtgcattgcgaacgttgaagggttcacttggtcttcctcttcgatttggctggaatggtgacccctgtgttcctcagcagcatccatggagtggagttgattgccagtttgacagcaccaaagggaactggatcattgatggattaggtcttgacaaccaaggtttaaaaggggtcatacctagtgacatatctaagttgcaacatctacaaaacataaacttgagtggcaatagcataaaggggaacattccaatctccctgggtaccatctctgtggtgcaagtactggatctgtcatacaatgagcttaatggatctattccagagagcctcggcgagctgacatcattacagatactgaacctgaatggcaatcgtctttctggtcgtgttccagccagtttgggaggaaggcctctgcacagagctagatttaacttcacggacaatgccggactatgtggaatacctgggttacgtgagtgtggccctcatctatccgtggctgcaaagatcggcatggctttcggcgtgcttttagctattctattcctagttgtattcgctgcgtgctggtggaagagacgccagaacattctccgtgctaaaagattagctgcagcaagggaagctccttatgcaaaatcaaggacccagttcacccgcgatgtgcaaatggccaagcatcaacggacacatgaaaatgctcggagcagcaacagtgaaggctcgccacatttgctttcctagctcggtgagaatactgcgacagtgacttggcttccatctattcttcagttcctcctttgtatgctcctctgcagtcttgaaagacgaagctgctgtacatactagctaggtcacgaatggtgtatatacttgtattttttttggtgatctagaactcagtccaggagagggatcagtctatcagatgagagaaattacccatttcatcctacttactgttctgattactgctgttgatttccccttcactgttcaagtatgcttattgtcagttttgtactgtggtctgaagctctgcaaaactgcattttgccaggagctggagccccaggctgggctgtgttgagatatagagtgaattctacaccttttcctattag

SEQ ID NO: 144402 - DNA, 2744 bp, Zea Mays
aaaatcagggtaggagtgggacattcattctcacagccgtgcagtcctttctttttcaaatcttcaggggtggctcgtcagtcgtcatcactcatcaagatccaagaacaacgtgagctgctccactgtactagtctagccctccaccccctttgaggccgcgaccagaataaataaatagaaaccatgcgaccacatcgactcctgccttcattactaccgtcataaaagcagccaccttagcaccgtctaatcgccattgctctactccaattatgctctcaaatccagacagttcttcgatttttttcagccttttctccttcttctaacggaacaggaaggagcgagcaagacgccgttgagaaaacacggggtggtattctgcagtaaaaaaaaaaaaaaacactcgaggcgaaagtgtccaaagccagaggagagaaagagaagacttgtacttggagggcagctgggcaggtgaaaggaagaggaaagagggcgagtgcgacgggaggcgcaatgcggtggagatctcccgccgtgctgcggctgcagctgtggctgctcgccgtctccgcgtcgttggctgccctcggtgttctcgcggctgatcttagcaaagaaccatttactatccgtataagctgtggaagctttgacgatgtccggacggagcctacgaacacattgtggtacagagactttggttatactggaggcaggttcgctaatgccacccggccaagctttatcgttcctcctcttaaaacgcttcgatatttcccgctatctgatggccctgaaaattgctacaacatcaacaatgttcccaatggccactatcaagttagacttttctttgcgttactggacaaccctaatcttgacagtgagccgattttcgatgtttctgttgagggtactctgttcagctctttgcttctgggctggagcagcgacgatgagaagacatttgcagaagctttggtttttgtccaggactcaagcttatcagtttgcttccatagtacagggcatggtgatccatcgattctttctattgaagttctacaaatagatgacgatgcctataactttggtccaccacgggaaaaggggacagtgcttagagcagtcaaaaggctgaaatgtggctcaggaaagcctgcttttgatgaagatctaaatgggattcactggggtggggacagattctggttaggattgcaaactttatcatccagttctgatgatcaatcaatatcatccgagaatgttatagcagagacattgcttgcaccaaatttttaccctcaaggcatataccaatcagctatcgtgggcactgataggcaaccgagtttgtctttcgaaatggatgttaccccaaacaagaactattcagtatggcttcactttgcagagattgataatggggtaactgcagaagaacaaagagtatttgatgtactcatcaatggagacactgcttttaaagatattgatataattcgcatgacaggagagcgttttactgcacttgtcctgaataaaactgttgctgtcagtggaataacactaaaaatcatcttgcaacctgtgaaaggaacccgtgccattattaatgccattgaggtgtttgagataatcccagctgaaaagaagactttgcctcaggaagtgagtgcattgcgaacgttgaagggttcacttggtcttcctcttcgatttggctggaatggtgacccctgtgttcctcagcagcatccatggagtggagttgattgccagtttgacagcaccaaagggaactggatcattgatggattaaacttgagtggcaatagcataaaggggaacattccaatctccctgggtaccatctctgtggtgcaagtactggatctgtcatacaatgagcttaatggatctattccagagagcctcggcgagctgacatcattacagatactgaacctgaatggcaatcgtctttctggtcgtgttccagccagtttgggaggaaggcctctgcacagagctagatttaacttcacggacaatgccggactatgtggaatacctgggttacgtgagtgtggccctcatctatccgtggctgcaaagatcggcatggctttcggcgtgcttttagctattctattcctagttgtattcgctgcgtgctggtggaagagacgccagaacattctccgtgctaaaagattagctgcagcaagggaagctccttatgcaaaatcaaggacccagttcacccgcgatgtgcaaatggccaagcatcaacggacacatgaaaatgctcggagcagcaacagtgaaggctcgccacatttgctttcctagctcggtgagaatactgcgacagtgacttggcttccatctattcttcagttcctcctttgtatgctcctctgcagtcttgaaagacgaagctgctgtacatactagctaggtcacgaatggtgtatatacttgtattttttttggtgatctagaactcagtccaggagagggatcagtctatcagatgagagaaattacccatttcatcctacttactgttctgattactgctgttgatttccccttcactgttcaagtatgcttattgtcagttttgtactgtggtctgaagctctgcaaaactgcattttgccaggagctggagccccaggctgggctgtgttgagatatagagtgaattctacaccttttcctattag

SEQ ID NO: 144403 - DNA, 1625 bp, Zea Mays
tctccagccacgccgccccccgcaccaacccacccccaccacacggaaggcggaaatcccccacgcgcaagcgtttgccttgttgcttggcgtccgtctgccgaaacaaaagtcgccgtcctcccccctcgtcgcttcatcacctcacctccgccgtcgcctcccctcatccctccaccggcccgtttgaccctctccctggctcgctcgttctcctcctcctccgtacccgtcctagtaggtttagcgctcaacagaaccccaatcaccaccccggcgccccccgagagcagttgccttgccgcttgctgcggttccatatggtgccccccgcgtcggcgtgagggctgcgcgcgctcgtgctgtttatcgggaggagatagatggggcccgccgtccgcagtagcgtcgtgatcagggccactgtggtagggctcgtgctggttggcatcgccctggccctgccgctggccgcggcgctgcggccgctccgggagcacgtcgcgtccatcggagccgcagcctccgctggttcgtggggcgatgagcatgccttctacaaaagggatgagaacgatataggcccatattcatggaatattactggaacatataaagggagctggacttttgctggtgccacaaatggttcgtctagatttcttgagtttgtggaatctaaaggtgattcagttttggaattgttgagcactccaacaaagataagcggggtgcattatgttcagggttcagttacattccatgatgtcattgacaatgcccacaatggtggagtggctcaaataaggttagaaggagtttacatatggccttttagacaacttcgcatggtagcaaacagtggtgcagatggtgaaccactccaggaagaggattatttcttgtcaaatccataccatttattgcggattttctcctctcaagtgtttcaagaatcttctgaagagaagaaccgaaggaagaattgtaaggttcaaattgtacactcaaatactatatattgcctccaacatgttttgatgtgtgttatttcatccttatcagctctcacatatgacatggagaaacattgcaacacagaaatagctgctaaggtggttcgtgtgtcatctaacccaaatgatggagaacacgagaagtaccgtttggagggtttgatggagagtccagccgtcgatgatgatggggaatgcttctctcctatcttattgaatgcaacttctttgaatgttgaagtttattacaacaaagcagtcaactacacactgatggtcacttttatctctttccttcaagttttgctgctgattagacaaatggagcatagcaacacacaatctggagctgctaaggtttctattttaatgattggccaacaagctatcatggatgcatatctctgtctacttcacctgactgctgggatattggttgagtcactcttcaatgccttcgcaacggctgcattcttcaaatttgttgtattttctatttttgaaatgaggtaccttctcgccatatggaaagcaagtaggcctttaaacagtggagaaggttgggagataatgaggcgagagctgtctgttctttacagccgcttttgt

SEQ ID NO: 144404 - DNA, 1795 bp, Zea Mays
agccaggcaaagaggccgaggccgaggccgcgcgcacgatataagcagcaccgccatcgctccacgcttcttggtaggtcgccggtcagcaggagcagcagcggcggcggcggggagaaggctgctaactggtggccggccgttcgccgcgagctccggcacgcctccggtccggcggacggcagcagcagcatgtcttcggccgccccgctgctaggcgacgaggccggcggtggcgagcccgcgccgcggacgccgccgccgccgtcctcgtgggtggggcgcgtggtggacgcggccgaggcgcgcgcgcagctggggttcgcggtgccgatggtgctgaccagcatggcctactacggcatcccgctggtgtcggtgatgttctcgggccagctcggcgacgtccacctcgccggcgccacgctcggcaactcctgggccaccgtcaccggctacgcgttcgtgaccggtctgagcggcgccctggagacgctgtgcgggcaggcgtacggcgcggggctgcaccgcatgctgggcctctacctgcagtcgtcgctcatcatgtcggccgccgcgtcggcgctcgtctccgcgctgtggtggttcacggagccggtgctcctgctcctgcggcaggagcccgaggcgtcccgcgccgcggcggcgttcgtccgcgcgcaggcgcctggcctcttcgccttctccttcgtgcagtgcctgctccgctacctgcagacgcagtccgtcgtgctcccgctcgtcgcctgctccgtggccccgttcgcgctccacgtcgcgctggcgcacctcatggtcaacgtgctcggcctgggcctcacgggggcggccgccgccgtctcggccacgttctgggtctcctgcctcatgctgctcgcctacgtgctgcgctccgacgccttcagcgacacgtggaggggcttctctgccgacgccttcaagtacgtgctgcccaccgtgaagctcgccacgccgtccgccgtcatggtctgcttggagtactgggcattcgagctcctggtcctgatcgccggattgcttcccaactccacagtgagcacgtctctcatcgccatgtgctccagcacggaggcgatcgcgtacatgatcacgttcggcttcagcgccgccgtgagcacgcgggtgtcgaacgagatcggcgcggggaacgtggagagggccaagaacgcggtgtcggtgacgatgaagctgtcggtgttgctggccgtcaccttcgtgctgctgctggcgttcggccacggcctgtgggcgcgcctcttcagcgggagcgccaccatcgcgtcggagttcgcggccatcacgccgctcatggtgatctccatcgtgctggactccgtgcagggcgtgctgtcgggagtggcgaggggctgcgggtggcagcacctggcggcggtcaccaacctggtggcgttctacatcgtcggcatgccgctggccatcctgttcgccttcaagctcgacctgcgcaccaggggcctgtgggcggggctcatctgcggcctcacgtgccaggcctgctcgctgctggtcatcaccgtccgcaccaagtggtccaagctcgccgatgccatgaaggaggagaaggccaactacgtcgcgtagcaaacgcactctacgtctgtactgcctttttttttggggagataaagagcacactacagtacgatcattttagacggcttgccgacgaaaatagatcatatgatgctaaaaatagtctatttttttggtatatagcttatttttggtggcc

SEQ ID NO: 144405 - DNA, 1970 bp, Zea Mays
agccaggcaaagaggccgaggccgaggccgcgcgcacgatataagcagcaccgccatcgctccacgcttcttggtaggtcgccggtcagcaggagcagcagcggcggcggcggggagaaggctgctaactggtggccggccgttcgccgcgagctccggcacgcctccggtccggcggacggcagcagcagcatgtcttcggccgccccgctgctaggcgacgaggccggcggtggcgagcccgcgccgcggacgccgccgccgccgtcctcgtgggtggggcgcgtggtggacgcggccgaggcgcgcgcgcagctggggttcgcggtgccgatggtgctgaccagcatggcctactacggcatcccgctggtgtcggtgatgttctcgggccagctcggcgacgtccacctcgccggcgccacgctcggcaactcctgggccaccgtcaccggctacgcgttcgtgatcgggatcgcatcggacgcaccccgcgacctgcacctgctgctcttcgcctcttgcagaccctggcacgcttcataacgtcgcaacatagcccatcacccacggcgacggcaggagacaggatgagcagctgcacgatctggctgggtcttgcggagcattggggattaacttgaccggtctgagcggcgccctggagacgctgtgcgggcaggcgtacggcgcggggctgcaccgcatgctgggcctctacctgcagtcgtcgctcatcatgtcggccgccgcgtcggcgctcgtctccgcgctgtggtggttcacggagccggtgctcctgctcctgcggcaggagcccgaggcgtcccgcgccgcggcggcgttcgtccgcgcgcaggcgcctggcctcttcgccttctccttcgtgcagtgcctgctccgctacctgcagacgcagtccgtcgtgctcccgctcgtcgcctgctccgtggccccgttcgcgctccacgtcgcgctggcgcacctcatggtcaacgtgctcggcctgggcctcacgggggcggccgccgccgtctcggccacgttctgggtctcctgcctcatgctgctcgcctacgtgctgcgctccgacgccttcagcgacacgtggaggggcttctctgccgacgccttcaagtacgtgctgcccaccgtgaagctcgccacgccgtccgccgtcatggtctgcttggagtactgggcattcgagctcctggtcctgatcgccggattgcttcccaactccacagtgagcacgtctctcatcgccatgtgctccagcacggaggcgatcgcgtacatgatcacgttcggcttcagcgccgccgtgagcacgcgggtgtcgaacgagatcggcgcggggaacgtggagagggccaagaacgcggtgtcggtgacgatgaagctgtcggtgttgctggccgtcaccttcgtgctgctgctggcgttcggccacggcctgtgggcgcgcctcttcagcgggagcgccaccatcgcgtcggagttcgcggccatcacgccgctcatggtgatctccatcgtgctggactccgtgcagggcgtgctgtcgggagtggcgaggggctgcgggtggcagcacctggcggcggtcaccaacctggtggcgttctacatcgtcggcatgccgctggccatcctgttcgccttcaagctcgacctgcgcaccaggggcctgtgggcggggctcatctgcggcctcacgtgccaggcctgctcgctgctggtcatcaccgtccgcaccaagtggtccaagctcgccgatgccatgaaggaggagaaggccaactacgtcgcgtagcaaacgcactctacgtctgtactgcctttttttttggggagataaagagcacactacagtacgatcattttagacggcttgccgacgaaaatagatcatatgatgctaaaaatagtctatttttttggtatatagcttatttttggtggcc

SEQ ID NO: 144406 - DNA, 1827 bp, Zea Mays
gaacaacgaaagagaccggactgtgaacgcactggactctgcagagttcagactgccccccgatccttcttgtgttctgtgctcgtgctcgctcgctacggcctatatatagagcctgttcagttcagactgaaccacaacgcacagttgcgtgcaggtgcagttagccagcgccagctgcacaagcttttgtcagcacaggaaggagaggagggtgagatatggcgagcctcaacgtgctgctcctccctgagccgggctccggccacctcatgtcgctcatcgaagccgggaagcgcctgctgggccacggcgcgggcggcggggacggcctgggccgggagttcacggtgaccgtcctcgtcgtgcggccgccgacgccggagtcggccgccgaggtgggcgcgcacgtccggcgcgtcgcggagtccggcattgctggcgtccggttccaccacctcccggccgtggagcccccggcggactgcgccggcaacctgcaggagttcaagtcgcggtacctggagctccacaggccgcacgtggaggccgcggcgcgggagctcggcgccgcggcgctcgtggtcgacttcttcgccaccgccgtgctggacgtggcgcgcgggctcgccgtgccggcgtacgtctacttcacctccacggccgcgctgctcgcgctcacgctgaggctgccggcccttgccgagactgtcgccgccgacttcgagacgttcgagggcacggtcgacgtgccgggcctgccgcccgtgcccgcggcaagcgtcccggggttcctgggacgcaaggacagccccaacttcacgtggttcgtttaccacggccggcgtttcatggacgccgacggcatcgtcgtcaacacggtggccgagctcgaaccggggctgctcgccgccatcgccggaggccggtgcgtgccgggacggccggcgccgccgctgtacccgatcggtccggttctcaacctcggtgcggggggaggtgcgtccggcgacgaggcgtgcgtccggtggctcgacgcgcagccgcgtgcgtcggtggtgttcctctgcttcgggagcctgggctggttcgacgcggcgaaggcgcgcgaggccgcggcggggctggagcggagcgggcaccggttcctgtgggcgctgcgcgggcctcccgcggccggatcgcggcacccgtcggacgccgacctggacgagctcctccccgcggggttcctggagcggaccaggggcaggggcctcgtgtggccgcggtgggcgccgcagaaggcggtgctcgcccacccggccgtgggcggcttcgtgacccactgcgggtggaactcgacgatggagagcctgtggcacggcgtgccgctggcgccgtggccgctgtacgcggagcagcacctgaacgcgttcgagctcgtggccgtcgtgggcgtggccgtggccatggaggtggacaggaggcgcgacaacttcgtcgaggccgcggagctggagcgggcggtgagggccctcatgggcggcggcgaggaggggcgcaaggcgcgggagaaggcccacgagatgaaggccgcgtgccgcaaggccgttgaggagcgcgggtcgtcgtacgcggcgctggagaggctgcgtcatgcgattcgcaagggtgcaaatacagctactgctcatttcaaggcgccgcagccgctcatttgagaattgaatgagtccaagattccagacgttcgcgacggtgtccggctgtccgcttcgtcatggaaggagtggacttccgtgtttgagcttcccggagtcgacagtcagtcagtcacacacacag

SEQ ID NO: 144407 - DNA, 1464 bp, Zea Mays
gtttcacttcttcgggatcacggcgccgtcgtggagcgcctctgcgagtctctgcagcgccgcgtgcgacgacccgccctcctccacggccttccggcacacggccttcatacgcgcggccttctccctcgccctcctcccctgctcgccgtcggcgtccatcagggaccgcacagcgcgctcgagctccgcggccaccacgaagttgccccgtttcctgtccaccttgagcggcacggccacgcccatgtcggccaccagctgaaacgcgttcaggtgctgctccgcgtacagcggccacggcgccatgggcacgccgtgccacaggctctccagcaccgagttccagccgccgtgcgtcacgaagccgcccacggcggggtgcgccaggatctccttctgcggcgcccacgtcggccacaccaggcccttgccccccgtcctctccaagaacccctccgggagcagctcgtcgaggttcgcgtccgtcgggtgctccgacccggacgcgtccgagggtggtccccgcaggacccacaggaagcggtggccgcaccgctcgagcgcggcagtgatctccgcaacctgcggcgggtcgaaccaccccatgctcccgaaacagaggaacgcaacggaccccggcggctgcgcgtccagccacgcgacgcactcgtgagacggcgagcggccgccgagcgacagcacggggccgatcgggtacaccggcggcgcgggccggccgggcacgcaccggccccgggcgacggccgccaggggccccggctcgagctcgtccgctgtgttggcgatgacccccgtggcgtccatgaagcggtcgccgaggcgcacgaagcacgcgtagttggggctcctcttgtccgccacggggcacggcatggagtccggcggcaccggcggcagccccggcagcggcacgtccccctccatctcgtcgaagtccacggcggggacggactcgtggagcacgggcaggtgcagcatgagcgcgagcatggcccccgtggacgacatgaagacgtaggacggcaccccgaggccccgcgccacgtccaccagcggcgcggcgaagaggtcgagcacgagcgcggccacggggcacgccatggcggccacggcgtcacggacgtgcggcgcgtggaggccgatgtagcgcgcgatgaactcctcgaccccgacggcgtcggtgggggcctccacggcggggaggcggtggaagcggatgtccagcccgcacgcggcctcgcgccgcacgtgcgcctccacctcggaggtggcctcggccgtcggcgggcgcatcacgagcagggtgatggagaaggccttgccgccgctgctgctgaggaggacgcgcttacaggactcgagcatggacatgaggtggccggacccccactccggtaggagcaccagcgcgggcgtcgccattggaacagtcggtgtttg

SEQ ID NO: 144408 - DNA, 2149 bp, Zea Mays
cctcgtcctcgaatcgtcaatgagcaccggcgccgcgcccctcctccactctacccgcacagcgcccctcgcccccacaccccaacccaaccatccgctccttgtcgccttccgacgctgagtttgctggtgtcgatttacgccggcggatgctcgatctggtagctgcatgtgccgacctactcgtcgaatccgttatctaacgtaatggatgggcaaggcacaaagcacaggattttgatggtgtccgactttttctttccaaactttggtggggtggaaagccatatctactacctgtcacaatgtctacttaagcttggccataaggttgttgtcatgacacatgcatatggaaacagatctggagtacgatatgtcacaaatggtttaaaggtctattatgtaccatggaggccattcctgatgcagaatacacttcctacactatccttgacgtttccaattgtaaggacaattattattcgagagaagatttctgtcgtgcatggacatcaagctttttcaacactgtgtcatgaagcattaatgcatgctaggacaatggggtacaaagttgtcttcacagatcactcactttatggttttgctgatgctggaagcattcacatgaataaggttctgcagtttactcttgcagatattgatcaggcaatatgtgtctcacatacaagcaaagagaacactgtcttgaggttagtataccgaaaaggcgccgaccttcttgttgaagtcattccagaagtgtgtcggctatttccaaaggttcactttattgttggtggtgatggtccaaaacgtgtgcgccttgaagaaatgagggagaagttctcccttcaggatagagttgagatgttaggagctgtacctcatgctcaggtgcgatcggttctgatatctggacatatatttttgaacagttcactcacagaggcattttgcatagccattctagaagcagctagctgtggactgttgacagtgagcactagagtcggtggtgtccctgaggtatgtggttatgatcttcagtttctcctttgcagaaaatccctaccttggttagctgattttccagtttcatgcaatttatcatttctcttttcaggttcttccagatgacatgatagtacttgcagaaccagctcctggagatatggtaagagctgtcaagaaagccatcgacatgctacctggaatagacccccagattatgcatcttcggatgaaagaactttatagttgggacgatgttgccaaaagaactgagattgtttatgatcgtgcaatggaatctccaacaacaaatttactagatcgccttccccggtatcttacttgtggatcttgggctggaaaactgttttgcctagttatgatcatcaattacctactatggcgccttttagaatttctacagcctgctgtaggtattgaagaagtcccagatataggcccactacatgctcatttaggttcaaggaatgatgaggctcaagagaagtgaaacttaaacctttgtcagttttgaaactgttggggacttgaggtggcagtcatggtatcttctgcttgtcagcattcgttctgatccacatgccagtgtatgcctttatgatatggcccccgcacagcattttctcttgaagcttcctgtctccgtagtcgcagctgaaagagagtggaacgccttgatttgtaggatttcttgtcatgctggttaaagatatggtccgagtctctgtcattgccagcttctttttcttcttctgcgtaatgcgtagtgagtggatggcctgcgttttaggcacgtcatcaaaaccaattatctgctggaaagttggtactctcttgccaccatattgcagtgatttagcaactagaagtcttgattggcatgttgacacacaaattcctactatgtttgatgtcttgtatcatgtcggagcaccaattcctgctgtgtttgtgatgtaataaggccaattccaaccagcgacgtgagaccaatcgtccaatctgcatggatccagtcgatgatacttttttgaattgtttgataagttcgtcaaatcctcaaaaacaagtacacaagctttgtctatgaaatacccttatattcttttgg

SEQ ID NO: 144409 - DNA, 2012 bp, Zea Mays
cctcgtcctcgaatcgtcaatgagcaccggcgccgcgcccctcctccactctacccgcacagcgcccctcgcccccacaccccaacccaaccatccgctccttgtcgccttccgacgctgagtttgctggtgtcgatttacgccggcggatgctcgatctggtagctgcatgtgccgacctactcgtcgaatccgttatctaacgtaatggatgggcaaggcacaaagcacaggattttgatggtgtccgactttttctttccaaactttggtggggtggaaagccatatctactacctgtcacaatgtctacttaagcttggccataaggttgttgtcatgacacatgcatatggaaacagatctggagtacgatatgtcacaaatggtttaaaggtctattatgtaccatggaggccattcctgatgcagaatacacttcctacactatccttgacgtttccaattgtaaggacaattattattcgagagaagatttctgtcgtgcatggacatcaagctttttcaacactgtgtcatgaagcattaatgcatgctaggacaatggggtacaaagttgtcttcacagatcactcactttatggttttgctgatgctggaagcattcacatgaataaggttctgcagtttactcttgcagatattgatcaggcaatatgtgtctcacatacaagcaaagagaacactgtcttgaggttagtataccgaaaaggcgccgaccttcttgttgaagtcattccagaagtgtgtcggctatttccaaaggttcactttattgttggtggtgatggtccaaaacgtgtgcgccttgaagaaatgagggagaagttctcccttcaggatagagttgagatgttaggagctgtacctcatgctcaggtgcgatcggttctgatatctggacatatatttttgaacagttcactcacagaggcattttgcatagccattctagaagcagctagctgtggactgttgacagtgagcactagagtcggtggtgtccctgaggttcttccagatgacatgatagtacttgcagaaccagctcctggagatatggtaagagctgtcaagaaagccatcgacatgctacctggaatagacccccagattatgcatcttcggatgaaagaactttatagttgggacgatgttgccaaaagaactgagattgtttatgatcgtgcaatggaatctccaacaacaaatttactagatcgccttccccggtatcttacttgtggatcttgggctggaaaactgttttgcctagttatgatcatcaattacctactatggcgccttttagaatttctacagcctgctgtaggtattgaagaagtcccagatataggcccactacatgctcatttaggttcaaggaatgatgaggctcaagagaagtgaaacttaaacctttgtcagttttgaaactgttggggacttgaggtggcagtcatggtatcttctgcttgtcagcattcgttctgatccacatgccagtgtatgcctttatgatatggcccccgcacagcattttctcttgaagcttcctgtctccgtagtcgcagctgaaagagagtggaacgccttgatttgtaggatttcttgtcatgctggttaaagatatggtccgagtctctgtcattgccagcttctttttcttcttctgcgtaatgcgtagtgagtggatggcctgcgttttaggcacgtcatcaaaaccaattatctgctggaaagttggtactctcttgccaccatattgcagtgatttagcaactagaagtcttgattggcatgttgacacacaaattcctactatgtttgatgtcttgtatcatgtcggagcaccaattcctgctgtgtttgtgatgtaataaggccaattccaaccagcgacgtgagaccaatcgtccaatctgcatggatccagtcgatgatacttttttgaattgtttgataagttcgtcaaatcctcaaaaacaagt

SEQ ID NO: 144410 - DNA, 1626 bp, Zea Mays
gcgccaacgccaagtcgaggcacgcggccagtggtgccctcgtcctcgaatcgtcaatgagcaccggcgccgcgcccctcctccactctacccgcacagcgcccctcgcccccacaccccaacccaaccatccgctccttgtcgccttccgacgctgagtttgctggtgtcgatttacgccggcggatgctcgatctggtagctgcatgtgccgacctactcgtcgaatccgttatctaacgtaatggatgggcaaggcacaaagcacaggattttgatggtgtccgactttttctttccaaactttggtggggtggaaagccatatctactacctgtcacaatgtctacttaagcttggccataaggttgttgtcatgacacatgcatatggaaacagatctggagtacgatatgtcacaaatggtttaaaggtctattatgtaccatggaggccattcctgatgcagaatacacttcctacactatccttgacgtttccaattgtaaggacaattattattcgagagaagatttctgtcgtgcatggacatcaagctttttcaacactgtgtcatgaagcattaatgcatgctaggacaatggggtacaaagttgtcttcacagatcactcactttatggttttgctgatgctggaagcattcacatgaataaggttctgcagtttactcttgcagatattgatcaggcaatatgtgtctcacatacaagcaaagagaacactgtcttgaggtctgggatatctccagagaaggttttcatggttcctaatgcagttgacactgcaatgtttactccctctcccaagcgcttaaactgtgatgaaatagttattgttgtggtcagtaggttagtataccgaaaaggcgccgaccttcttgttgaagtcattccagaagtgtgtcggctatttccaaaggttcactttattgttggtggtgatggtccaaaacgtgtgcgccttgaagaaatgagggagaagttctcccttcaggatagagttgagatgttaggagctgtacctcatgctcaggtgcgatcggttctgatatctggacatatatttttgaacagttcactcacagaggcattttgcatagccattctagaagcagctagctgtggactgttgacagtgagcactagagtcggtggtgtccctgaggttcttccagatgacatgatagtacttgcagaaccagctcctggagatatggtaagagctgtcaagaaagccatcgacatgctacctggaatagacccccagattatgcatcttcggatgaaagaactttatagttgggacgatgttgccaaaagaactgagattgtttatgatcgtgcaatggaatctccaacaacaaatttactagatcgccttccccggtatcttacttgtggatcttgggctggaaaactgttttgcctagttatgatcatcaattacctactatggcgccttttagaatttctacagcctgctgtaggtattgaagaagtcccagatataggcccactacatgctcatttaggttcaaggaatgatgaggctcaagagaagtgaaacttaaacctttgtcagttttgaaactgttggggacttga

SEQ ID NO: 144411 - DNA, 539 bp, Zea Mays
atagctgaatgatcagcagtgcagcaagcaatgatttggtttacgcggactgtgttagttagtaggctggcatgtactagttgtcttacttatctcagagtgtatatagatgagctactaaggtgttgtttggtttgagtaatcgtcatttcatccaaaatgaggtgttgcatcatgtattcattccttaaatttagtggagttgtcttacttatctcagagtatatatagacgagctactaaggtggtgtttggtttgagtaatcgtcatttcatccaaaatgaggtgttgcatcatgtgttcattcctcaaatttgatggagttgtcttacttatctcagggtgtatatagatgagctactaaggtggtgtttggtttgagtaatcatttcatccaaaatgaggtgttgcatcatgtgttcattcctcaaatttggtgggatgacctcatttctcatattattactaactaacttattatgagtaatgaggtggtgatggaccaacttatttcattccacaaatcaaacaaaaaaaa

SEQ ID NO: 144412 - DNA, 1598 bp, Zea Mays
actacttcctccaatctcccactcattactcagcttaggaaggtccagggcctccagctccgatccaccacgctacgctagctctatgccggactcctcctcctccgccggcacaggcggcatggccccctcgagctcggcggcggcgtccattgccgcgctcgcggccgccgcggcgtccggcgacggctcggacgactccggggcggccaacaacaacggcgcgctgccgctgccgctgccgccgccgcacggggtggaggacaacaacagtcccgcggagctggcgggcgcgggtggcacctcccgggcggtggcgaggagggtcgcggcggccggcgcctccccggcggcggcggcgaggaggggcgccgccgtgaacgcccaggcggccggcggcgccgggccgagctgccaggtggagcggtgcagcgccgacatgggcgtggagaagcggtacaaccggaggcacaaggtgtgcgacgcgcaccgcaaggcgtccgtcgtcctcctcgccggcctccgccagcgcttctgccagcaatgcagccggtaagccccgcctgcctgcttgctcggaggcacatgcacatgggcgcagtgcagtgtgcagtccggccggcgtgcgtgactcgtacgtgagtgagttcgtgacatgctcaaaggcaccgcccgctttcagttcgtacggctactactactactaaactaaacgagcttaattcgaccttgagaaagcttgcagctttttttcttgggtcatggatagcacggtgagctgctggattggatcctaagctagctaggttgctctctcaactcaagatcttgcagaagcgtctctcagtctcatgcaacctctttggaggttccacgagctgtcgcacttcgacgacaccaagcgcagctgccgcctgcgcctggcggggcacaacgagcggcgccggaggaaccccgcggaggcgcaggaccagcacggcgggcggggcgacccggggagccaccacctccagatcagataaaaacctactacgtcagcatgctctctctcttctgtcatgcaggacgcacgcacctagcgtcgtcaccgatccatagtccgatatgtgtctcaagtgttgtgtgtgcgcgctctcgccgcctacccctgtcctgcagtgttgcgtagtatatggttctacgacctacacgtactgctgctactactgcgtgctaactttaatctgatggcagtccacagctagctagcacatcacctcctgtaagtaatgtgcttatctatatgtgcaccgaccggaaccggaggcgtgcgtacgctgatctgccacgaagcctactagtagttaaatgtaacgtaacctgcaggcaattaagcagggcgctgctatatatagcgtaattaattgtgcgtatgggtatggtggttcgattatcggatgtgtaatccctgtacgtggccgggcccgtgccaaacgtacggtgacctgtgcaggctctgtgtgtcgatgatgttgtactctgataatgatataatccattgtggtaatgtatgctatttaatatgtgtgcacactgtgtgtactgtgtgctcacacgtc

SEQ ID NO: 144413 - DNA, 1281 bp, Zea Mays
actacttcctccaatctcccactcattactcagcttaggaaggtccagggcctccagctccgatccaccacgctacgctagctctatgccggactcctcctcctccgccggcacaggcggcatggccccctcgagctcggcggcggcgtccattgccgcgctcgcggccgccgcggcgtccggcgacggctcggacgactccggggcggccaacaacaacggcgcgctgccgctgccgctgccgccgccgcacggggtggaggacaacaacagtcccgcggagctggcgggcgcgggtggcacctcccgggcggtggcgaggagggtcgcggcggccggcgcctccccggcggcggcggcgaggaggggcgccgccgtgaacgcccaggcggccggcggcgccgggccgagctgccaggtggagcggtgcagcgccgacatgggcgtggagaagcggtacaaccggaggcacaaggtgtgcgacgcgcaccgcaaggcgtccgtcgtcctcctcgccggcctccgccagcgcttctgccagcaatgcagccggttccacgagctgtcgcacttcgacgacaccaagcgcagctgccgcctgcgcctggcggggcacaacgagcggcgccggaggaaccccgcggaggcgcaggaccagcacggcgggcggggcgacccggggagccaccacctccagatcagataaaaacctactacgtcagcatgctctctctcttctgtcatgcaggacgcacgcacctagcgtcgtcaccgatccatagtccgatatgtgtctcaagtgttgtgtgtgcgcgctctcgccgcctacccctgtcctgcagtgttgcgtagtatatggttctacgacctacacgtactgctgctactactgcgtgctaactttaatctgatggcagtccacagctagctagcacatcacctcctgtaagtaatgtgcttatctatatgtgcaccgaccggaaccggaggcgtgcgtacgctgatctgccacgaagcctactagtagttaaatgtaacgtaacctgcaggcaattaagcagggcgctgctatatatagcgtaattaattgtgcgtatgggtatggtggttcgattatcggatgtgtaatccctgtacgtggccgggcccgtgccaaacgtacggtgacctgtgcaggctctgtgtgtcgatgatgttgtactctgataatgatataatccattgtggtaatgtatgctatttaatatgtgtgcacactgtgtgtactgtgtgctcacacgt

SEQ ID NO: 144414 - DNA, 1484 bp, Zea Mays
gcagtagattttggtgtgctgaatccaacaccagctcctcctctctttgttagatttgtcctgaggcaccatgtcattcatgtctccattcccggggatggatctaagtaaaatggatcccgggactctgaccctccttggggcagctggttgtgtaatgctgactatgcatttcactgtgcaattggtgtcacaacatctcttctattggaaaaaccccaaggagcagaaagccatacttattattgtgctgatggctccactatacgctatctcttccttcgtgggtcttcttgatatccagggtagcaagacatttttcacattcttagatgctgttaaagaatgctatgaggcactggtgattgctaagtttatggcattgatgtacagctacttgaatatatctatcagcaagaacatagtccctgatgaaatcaaagggagggtgcttcatcattccttccctgtttctcttttcctgccccgcaatgtccgattggagcacaaaacattgaagcttctgaagtattggacctggcaatttgttattgttaggccagtatgttccattctgattattgcactccagcttcttgggctgtaccccagctgggtcagctggacgtttagtattatactgaacttttcagtctccatggccttatatgcattggttctcttctaccacttgtttgctaaagagctggcacctcacaagcctcttgcaaagttcttgtgcatcaaagggattgtcttcttctctttctggcagggttttgcgctcgatgttttaacccaagcaggcgtgatcaaatcccaccatttctggctggacgtggagcacatccaggaggcgatccagaacgtcctggtgatccttgagatggtggtgttctccgtcatccagcagtacgcataccacgtcgccccctacagcggcgctgacagggccaagtttgagaagaagaacgaatgaaccaggtttccaaaaagaatgaaagaaggaaaaaaactctctgctttctggtcgctcggagatggagcaccagtatttcctcacggatggacgacatacacaagttcatcgagtctcgcgagtagcgtatttggtagcgagttgtcgcgctgtaaaattacactgtccttgcgcgctgaataattttgctggctttgtcgttttggttttttgaacgttgtcgccgaggctatatagccaggactgttcgtcttgtacgagcgcgcgctctctctctctctctctctctgcggacttggcgaatccttttatgaataaaagctactgtcctgttctacagaggccgcactgggctgatgccgatgaaggttgcgggttgcctgcaaccacctgctgttggggggatgatattgcaatctgcacgttcgtcctttctccgtggagtaatttttttttcaggaacgtgatctgatactacactagtactagtatgtgtttttgaggt

SEQ ID NO: 144415 - DNA, 1637 bp, Zea Mays
actgcaattagtactgactctgccaagtcgccacgtgactaacccgcgaggtcgacgcggattttcttctttataccgcgggtaggcggactgggcggctgacggagccgcggagggaaccgagtggccccggcgacgcgaggccgaggcgagctaatctgacggtggcagtgacgactccaacgaccaggcgcggaggctgcactgctccagcgaaggcaccatgtcattcatgtctccattcccggggatggatctaagtaaaatggatcccgggactctgaccctccttggggcagctggttgtgtaatgctgactatgcatttcactgtgcaattggtgtcacaacatctcttctattggaaaaaccccaaggagcagaaagccatacttattattgtgctgatggctccactatacgctatctcttccttcgtgggtcttcttgatatccagggtagcaagacatttttcacattcttagatgctgttaaagaatgctatgaggcactggtgattgctaagtttatggcattgatgtacagctacttgaatatatctatcagcaagaacatagtccctgatgaaatcaaagggagggtgcttcatcattccttccctgtttctcttttcctgccccgcaatgtccgattggagcacaaaacattgaagcttctgaagtattggacctggcaatttgttattgttaggccagtatgttccattctgattattgcactccagcttcttgggctgtaccccagctgggtcagctggacgtttagtattatactgaacttttcagtctccatggccttatatgcattggttctcttctaccacttgtttgctaaagagctggcacctcacaagcctcttgcaaagttcttgtgcatcaaagggattgtcttcttctctttctggcagggttttgcgctcgatgttttaacccaagcaggcgtgatcaaatcccaccatttctggctggacgtggagcacatccaggaggcgatccagaacgtcctggtgatccttgagatggtggtgttctccgtcatccagcagtacgcataccacgtcgccccctacagcggcgctgacagggccaagtttgagaagaagaacgaatgaaccaggtttccaaaaagaatgaaagaaggaaaaaaactctctgctttctggtcgctcggagatggagcaccagtatttcctcacggatggacgacatacacaagttcatcgagtctcgcgagtagcgtatttggtagcgagttgtcgcgctgtaaaattacactgtccttgcgcgctgaataattttgctggctttgtcgttttggttttttgaacgttgtcgccgaggctatatagccaggactgttcgtcttgtacgagcgcgcgctctctctctctctctctctctgcggacttggcgaatccttttatgaataaaagctactgtcctgttctacagaggccgcactgggctgatgccgatgaaggttgcgggttgcctgcaaccacctgctgttggggggatgatattgcaatctgcacgttcgtcctttctccgtggagtaatttttttttcaggaacgtgatctgatactacactagtactagtatgtgtttttgaggt

SEQ ID NO: 144416 - DNA, 1927 bp, Zea Mays
gagagaggctaagcaccacctgactcggctgaaaatctagcgcgaccggcttttaacacggcccggcccatcaaaatgaatgcactgtactagccggcgaggaccacgtgtacccgccaccgcgccgcgcggctccaccgttcggcggcgctcgggcacggcacgccgtaaaaccctagctcttgcgccccctcctctccaccgcgccggcgagccgtggagacgcggagctaaggatgccgcggaccactgagctggagagccccggctgcccgccgctccgcgccctcaccaccgacatcctcggccttgtcaaagtcgtcgaggcccacgcgaggccggcgggtgccgccaaggtcgtggagacgtggggcgcacccgacgcctcctgcgccatcgtcgctgcctccctcgccgatcgtgccaccgaccccgttttggctgtggcgaggatgaacggcgtggttgagttgctgaatcccctgaacggagatactttggctgctgtcaaggcagtgggaccagcaccaaatgatggtggcgctgaaggtgatcccctcactgcattgcaccttttcacaagacaggcttcggactcgatcttaggaacgtttcttgcttgcactgagcaggggaaagcttctataaggtccatcacgaaagaaaatgcagcttcaggctcacatattgagccatctgctacatgggatgtgtgcggtggggccaatgtgcaattttgctcagttgatcatggtgaaaactatgtgatgtttggagggaaaggtatagaagtgagtttgtgggatattacatcttgtagtaagacatggtctgctaaatctccccgaacaaatagtcttggtatattcactcggccttggttcactgctgggaccttcttgtgcaaggatgatcatcgtaaaattgtagcctgcacaaatagtcatcaggtccgcttatatgatactgcattgcaaagaaggcctgccatctctgttgagtttaaggagtcaccaatcaaggcagttgctgctgatccgaatgggcatgatgtctatattggcacagggacaggggaccttgcttcctttgacatgagaactgggaaattgcttggatgctattttggcaaatgcagtggaagtattagatccattgttaggcatccagatctacctttgatagcatcttgcggactggatagctacttgcgtatttgggacacaaacacaagacagttgctatctgctgtctttctgaagcaacatcttacaactgtggtccttgattcacatttttctgttgaagagcctggagagatgaaatccaagcaactggagtcttcagtggagactgagactgaagtccgaaaagaaaagaagaaaaagagtaaggcaattacagaggatgagactgaggcacaaatccgaaaagaaaagaagagtagaacaattgaagaggaagaacaagctggattggtcgaccatagcgatattaatgatgaagtatatgccagaaaagaaaagaagaaaaagaagagtagaggtattgaagggggcaaggagcgagacagcgacggggaaatttgcagtcccaagagaagaaaatctggagaaagaagcaaatgcctgaagaagaggagcaagaaacagctggttgcctagtacaagtatcatttctcattacccgccttcttgattttgcagaattacacaattttgtgtggtagtttgttcggaattgtatcccttttgaaaccctgcaagggaagtgcatcattttcgtgtgcgcatttttctactctggtgtagctaaattttgagacatacacgctggagtagttacagccaaaacttgaaactaatttttgagatagacatgtgggactaaatttcgagatatacgcgtaggagtttctactataaaa

SEQ ID NO: 144417 - DNA, 1464 bp, Zea Mays
acgacgctttttctccatggtttggtgtgcatttcctctctcctgtccccacttgacacatccatgtcccaatctcccccaacctcaggtcaaccgccgctacccaagatccagtctccgttctccctctcctctcgcttcatacacaccagggcggcagcggcagcggcaggggcccgccatcaccaacccacctcccttcaattataaacctataaaatatcatcattgacccaagctgaggcgactagtgggtattgatttttggtggggcagatcaaggagggggggagggggttaacttccaaggaaccagttcattgctggttctgctagcaggaggttggatttcagaggcagaagctttcagccaggcgggctcagggcgcgggcacatcaatggctggcaaggaaatcctccacaaggtgaaggacaaggtgaaagatgcatttagttcatcaggaccagaaacagggaaaggcaagacaaagttatcaggcaagcgtgtcaagcatggttaccatctggtgaagggcaaatctaatcatccaatggaggattatctagtggcagagtaccggcaagttggtgaacatgatttgggattgtttgctatattcgatggtcacctgggccacactgttccagactttttgagctcccatcttttcaataacatcttgagtgagccagaattcttgagtgatccagaaactgctatccgaaacgcataccaacttacggatcagaagatattggaaaacgcagcagagttgggaagaggtggctccacagctgttactgccatcttaataggaagtgacaagttcgtgaaactagttgttgcaaatgttggggattcacgggcagttattagcaagaacggtgtagcgaagcagctttcagttgaccatgaaccaaacatggagcgacaaacgatcgagcagaagggtggctttgtatcaaacctaccgggtgatgtgccacgtgttgatgggcagctggcagttgcaagggcatttggagaccggagcttgaagaagcacctcagctctgatccatatgtggtcgagcaaactatcgatgaaaatactgagtttttaattctagcaagtgatggcttgtggaaggtgatgtccaaccaggaggctgtcgacgagatcaaggattgcaaggacgcgcaggcagctgccaagcacctgacggagcaggccgtgaatcggaagagcaaagacgacatttcagttatcgtagtcaagttcatgtgctagcacatcgtcaggttaaatggtctcccgattgtataccgtgttaaattatcttttaagtcttgtgctcgctggtgtcggacattttgtttaccttctttggttttgggaccccacaaagagggtcaaggcttgtaacatattgttgtttgtttaaggctccaaataaagcatggtaccaccatagtaatttca

SEQ ID NO: 144418 - DNA, 2691 bp, Zea Mays
gaccgttggagacccctgcccctatgcgggtatgcccattgcccacccccacgttcttctcccgatcggctccacctcatccatccctcattccctcgccgacgtttcctcctcctgcttcattcactcgtcttccagttcctcgccgcttcagggggcagacgcataatttgattgagctagcgagcgagagccgatggcgctggacacaggaacggtggcggcgggggcgatcgacgaggcgtacgagttctctgcgcccaggttcttcgatttcatcaccgaggaaacggaggaggccgtacgcgccgccgagagctggttcgaggccgcccgcagccacgccccgtcgccgttcaaccccaggataaaggaatcgagggcggaagccaaggtcgctgtcctctgcgatttcgcggaagccgaggagccggctccagaggcggtgcccgtggaggtggcagcaggaagcgtctcggtacacggagcagatgctattgatggtgctcaatgtcctgaggcaatatcggaatcgccgccggcttcacatccggctcaagaagagaaggataaatcgccccaatcgttcgagttcctctcggcgacagacctatccgtaaaatatggtggtgctgccagcacgcctaagatgcagacgcgtcctccttctccttctaccaaaattgcacctccaatttcgacatgtgacagctcttcagtgaatactggtgcgcgcacgccaaagacgcaggcgaacatgtgcagagcagctactatggctgcttcgacgaatgccaaggggagcgtgatcaagggtggttgtgatttggttgggactggaaaggcagccactgctggcgctgaaattgcacaagcgaaccaagcggtgaagaggcagaagcttgatgatggaagagccagacagatactcaatgttaagactaaggtcctgcctcataaacggagaactgatttagctgtaagcaatgaagtgaggaggtcccgtgaggatatgtgttctctgaaggaagcaacaacatatgtatcaactgcagaattggttaagaagtttgaatcagggaccagaaagctgagcatcactcacagcagatctcgttctcgtgacgatgctgcattacagggaaggcctaagcttgtgttaactagacctaaggaacctgagttccagacttcccaaagaatccgagcagtaaaagtaaagagctctgcagagatagaggaggaaatgttggcaaagatacccaagttcagggcacggccattcaacaaaaaaattgctgaagccccttcgttccctccacttccaaggaaacccccacagatttctgaattcagtgaatttcatcttaaaacaatggagagagcaagtcgatatgcggacacctgttcggaagtatcttgtgcagatactatccggagtcgaaataagccactgaaatcgacacaacgaaagccaccgcaacttcatacagcaaatagagctaggccaccaagtgtgaaaagttctcaggaacttgaactggaggagctggagaaggcccccaagttcagggccaagccactaaacaaaaagattcttgagagtaagggagacattggagtgtttgtccatcctaagtctcaggtcacagctcccaaagaattccgtttttgtaccgatgttcgcttgggtcctccatcagttgctgacttatttgacaagctctctcttcactctgaatgttcttcaaacagtaacaggcaaggtgtgcctagatgcaccataccaaaccctttcagtctacaaacagaggaaagaggtcaattaaaagagaggcagctagaagcacaactcttacaaaagaaggtggaggaggaaaaggccagggttcacaaagctaacccttacccatacaccacagactatccgatggtgccgccgaagcctgaacctaagccctgtacgagaccagaaggctttcaactagagagtttggtgagacacgaattagagcagcaaaggctgatggaagaaaggcagagaatggagagagaagaagctcagaggagaatcgtcaaagctcaacctgtactgaaagaggaccctatcccacttccggagaaagagcggaaacctctcactgaagttcaacaatttgtgttgcatgttgatgagagggctgtgcatagatcagaatttgatagcatgataaaagagaaagaaaagacttacaaaaggttgagagaggagaacgaattcgcgcaaaagattgaggaggagaaggcgctgaagcagctgaggagaaccatggtgccacatgcccggcaggtccccaagtttgacaaaccattccgaccacagaaatcgacgaagcaggtgacaagaccgaagtcgccacagcttcaggtggatgagcgaggggcgaggaggcatgctttaatcagatgaccaccatcctcgcctcaagatctctgcgacgttgtttatgtatctgttcgtcgggctactaagattcttttttcgctgaccaatttgtagagcaggccagcaacccattgccgctgctgtgtgtgtaggttggtgatgttttatgattatctcaatgatgacactttttaatcggatataccttgtgtattctcggacacgtatggaacttagcgctccacactcgcatgtttccccgcaca

SEQ ID NO: 144419 - DNA, 2694 bp, Zea Mays
gaccgttggagacccctgcccctatgcgggtatgcccattgcccacccccacgttcttctcccgatcggctccacctcatccatccctcattccctcgccgacgtttcctcctcctgcttcattcactcgtcttccagttcctcgccgcttcagggggcagacgcataatttgattgagctagcgagcgagagccgatggcgctggacacaggaacggtggcggcgggggcgatcgacgaggcgtacgagttctctgcgcccaggttcttcgatttcatcaccgaggaaacggaggaggccgtacgcgccgccgagagctggttcgaggccgcccgcagccacgccccgtcgccgttcaaccccaggataaaggaatcgagggcggaagccaaggtcgctgtcctctgcgatttcgcggaagccgaggagccggctccagaggcggtgcccgtggaggtggcagcaggaagcgtctcggtacacggagcagatgctattgatggtgctcaatgtcctgaggcaatatcggaatcgccgccggcttcacatccggctcaagaagagaaggataaatcgccccaatcgttcgagttcctctcggcgacagacctatccgtaaaatcagatggtggtgctgccagcacgcctaagatgcagacgcgtcctccttctccttctaccaaaattgcacctccaatttcgacatgtgacagctcttcagtgaatactggtgcgcgcacgccaaagacgcaggcgaacatgtgcagagcagctactatggctgcttcgacgaatgccaaggggagcgtgatcaagggtggttgtgatttggttgggactggaaaggcagccactgctggcgctgaaattgcacaagcgaaccaagcggtgaagaggcagaagcttgatgatggaagagccagacagatactcaatgttaagactaaggtcctgcctcataaacggagaactgatttagctgtaagcaatgaagtgaggaggtcccgtgaggatatgtgttctctgaaggaagcaacaacatatgtatcaactgcagaattggttaagaagtttgaatcagggaccagaaagctgagcatcactcacagcagatctcgttctcgtgacgatgctgcattacagggaaggcctaagcttgtgttaactagacctaaggaacctgagttccagacttcccaaagaatccgagcagtaaaagtaaagagctctgcagagatagaggaggaaatgttggcaaagatacccaagttcagggcacggccattcaacaaaaaaattgctgaagccccttcgttccctccacttccaaggaaacccccacagatttctgaattcagtgaatttcatcttaaaacaatggagagagcaagtcgatatgcggacacctgttcggaagtatcttgtgcagatactatccggagtcgaaataagccactgaaatcgacacaacgaaagccaccgcaacttcatacagcaaatagagctaggccaccaagtgtgaaaagttctcaggaacttgaactggaggagctggagaaggcccccaagttcagggccaagccactaaacaaaaagattcttgagagtaagggagacattggagtgtttgtccatcctaagtctcaggtcacagctcccaaagaattccgtttttgtaccgatgttcgcttgggtcctccatcagttgctgacttatttgacaagctctctcttcactctgaatgttcttcaaacagtaacaggcaaggtgtgcctagatgcaccataccaaaccctttcagtctacaaacagaggaaagaggtcaattaaaagagaggcagctagaagcacaactcttacaaaagaaggtggaggaggaaaaggccagggttcacaaagctaacccttacccatacaccacagactatccgatggtgccgccgaagcctgaacctaagccctgtacgagaccagaaggctttcaactagagagtttggtgagacacgaattagagcagcaaaggctgatggaagaaaggcagagaatggagagagaagaagctcagaggagaatcgtcaaagctcaacctgtactgaaagaggaccctatcccacttccggagaaagagcggaaacctctcactgaagttcaacaatttgtgttgcatgttgatgagagggctgtgcatagatcagaatttgatagcatgataaaagagaaagaaaagacttacaaaaggttgagagaggagaacgaattcgcgcaaaagattgaggaggagaaggcgctgaagcagctgaggagaaccatggtgccacatgcccggcaggtccccaagtttgacaaaccattccgaccacagaaatcgacgaagcaggtgacaagaccgaagtcgccacagcttcaggtggatgagcgaggggcgaggaggcatgctttaatcagatgaccaccatcctcgcctcaagatctctgcgacgttgtttatgtatctgttcgtcgggctactaagattcttttttcgctgaccaatttgtagagcaggccagcaacccattgccgctgctgtgtgtgtaggttggtgatgttttatgattatctcaatgatgacactttttaatcggatataccttgtgtattctcggacacgtatggaacttagcgctccacactcgcatgtttccccgcaca

SEQ ID NO: 144420 - DNA, 2601 bp, Zea Mays
gacgcggccccaccatctccacctcccggccgaacagacacgaaccagggaccaacgacaaatctcgcgacctctcgaaatgagcggtaccggaagcagcgtgtagcgcgagacgaacgccgccctaatccaaaccctagaggcgggaggaagacggcgagcgaacgcagcaacgattcctgatctctaatatcctagcacggcggcggccgcggccggatctaggggtaacgaaggatgtcggactcggcatcgatggcggccgccatcgaggcgcggttcagcagccgcgacctcatcggctgcggttccttcggcgacgtctataaagggtttgacaaggaactgaataaagaggttgctataaaagtcattgatttggaagaagctgaggatgacattgaagacatccaaaaggagatatctgttttgtcacaatgccggtgcccatatattaccgattattacggctcttatcttcaccagactaaattgtggatagtaatggaatacatggctggtggttctgttgctgatcttcttcaagctggtcctcctctggatgaaatgtctattgcatgcattctgagggacttgttacacgcaattgagtatctacattccgaaggaaaaattcaccgtgatattaaagcggcaaatatcctcctcactgaaagtggagacgtgaaggttgcggactttggtgtttctgcacagctgactaaaacaatgtctaggaggaagacatttgttggaactcccttttggatggcacctgaggttattcaaaattctgaagggtacaatgagaaggcagatatctggtctttaggtatcactgccattgaaatggctaaaggtgaaccccctctggcagatattcatcccatgagagttcttttcatcatacctcgtgaaaatcctccgcagcttgatgagcatttctcgaaaccaatgaaagagtttgtctcactatgtttaaagaagaatccagcagagaggcctagtgccaaggagcttcttaagcatcgtttcataaaaaatgcccgaaagactccaaagcttttggagcgaataagagagcggccaaaatttgcagcaaaaagcatggatgccacacaaaatgggcaaacacatgatgaagaggaggattttggtacaggcactatcaaggtcaataggacaaaagatacagctccatctttgagtcaaggaacagttaggaaatctgcagtcagagatttttctgatagatcagagggcacaggaactgtccgagttgtttcaaggcctcctcaaatcgcctccacgaaggatggtagatctgatatgcctcaaagtccaaaagcaccaatacgcacagctgatcgagaaaatcagtggaggtcatcagggactggatctgaagaatctctctctctcagagatactcagagcggacgagggagagtagaaagttctactgatgacaatgatcactctgtaagtgggtcaggaactgttgtgttacgctctccaagagcatctcagttgtactcaacagctagcaaccacagtgccaagcctcccagcagattctcctcttatgaagatatgtctaatagtgggacagttgttcggacccaaaatgaagacccagaaactccacgatcttcaaggtcaaggctggggatccaagaaaaaacatcaaatgctcctcttgaggatagtgccattaaccttgcagaggcaaaggctgctttgcaggctgggttaagaaagggaaatgctcgagaaagaccttttatcaacaggcatgaaaagggatcacatgagcatagatcttctggagtaaatagtcaagaggttcaaagcgaggatgtggacacgcagaaaggtcacaaattacggcaattacctgatgggcagtcagcctctcgtgctagttctgtagcttcacctgcagtctcatcattgctactcccttccctgaaagaggctactggtgacaagtttgatcggcctgctgttcatgccttccttgattccttgatggatttagaacgtgatatacctggatcatgcgaagtactggttggcagattgctacaccggctagggagctcaaaggattcctcattgcaaggtcttcaggagacggcgatgtcaattttcactaaggaacctgaacctccctctgaaaaagcaggcgacaagaagttagctaatatgccaccattggctgctcctaccgtgagcccactggcaaggttccttctcacaaggtggcaaaaccaagtttctcaagatcttaactctgtttgatccctgcgatgcagaaaagtgatttcatgttcgattcggtgtataattaatatttttcagtgtacataatgcaaactttagaactttatttcatccagtcggtctcaaccacctgttatttcatttgttttgttcatggcgaatactccctctgtccccaattaaaatttgttttacaattaatgtatgtgttgtatatatatgtttagtttcataatcatccatatgaatatggatgtaaaaatctagagctagtacgagtactatttttgggctagtttgagaacgtcattttcc

SEQ ID NO: 144421 - DNA, 2811 bp, Zea Mays
ctagaacatcggcaggcgcgcgcctcctcccctccacgcctcgattcggatgaaggcggagagcggtggcgttgtccgccggagtctgcagaagacggagtcggcggagatgcggtgggtggtcccggggggcgccaatgaggacgtggagatcgagagctccgacgacggcagcgtggacacctccgccaccgcctcgggctcacggggcggcgggtgctccgacgaagacgaaggttacgagaacgatgagatgctgcgccagcttctcgtgcgcacgggcccgcgcgccgactccttcgacgtcgaggcgctcgatgtccccggcgtgtaccgtcaccaggaatttaccttaggcagcagtattgtgctgactcttcagacactaggcgttgtctttggggacgttggtactagtccactgtatacctttgatgtaatgttcaacaaatactcaattactgcaaaggaggatgttctcggagctctctcacttgtaatatacactctcattctgataccatttctgaagtatacactgattgttttgtggggaaacgatggcggagaaggagggacatttgctttatactcattaatatgcagaaatgcaaaggcaagcctgcttcctaaccaattaccttctgatactcgtatagcaaatttcaatctgaaggtgccttcagtagagctcgagagatctttgaagatcaaggagcgacttgagacttcatctatgctaaaaaagctgcttttgatgcttgttctttttggtacttcgatggtaatagcagatggtgttgtcacatcagcaatgtcagttatgtctgctgttaatggcttgaaggttggaattgctagtgttaacgaaggtgaagtggtcatgataactgttgcatttcttattgttctgttcagtctgcaacggtttggaacaagcaaagtagggcttgctgttgggccagctttattcgtatggttttgctgccttgctgggataggaatgtataacctcagagtatatggtccagaagtactccaggcattcaatcctgtttatatctactattattttgaaagaaatcccactgaagcttggatgtccctggggggctgtcttttatgtgcaacaggatctgaggcaatgtttgctgatttatgctacttctctgttaaatctgttcagcttacctttgtgttccttgttctgccatgtcttctactgggatacctagggcaagctgcatttcttatggagaacttagataaaagtcagcaggtcttctttttgtccattccaagtcaggcattttggccagtggtattcatagctactctggcagcactaattgctagtcgtgcaatgacaactgctatattctcaactataaagcaggcaacagctctgggctgtttcccacgcctcaagattatccacacctctagaaagttcatgggccaaatatacatcccggtgatgaactggttcttgctggtttcttgtctggcatttgtcgcagtatttgggagcataaatgagattggaaatgcatatggcatagcagaacttggggtcatgatgatgaccactgtcctggtcaccattataatgcttctgatatggcaggtcaacatcgtcatagttctatgctttctcaacctctttctggggctggagttatttttcttttcctcagttttgggaagtgcagcagatggaagttgggtgcttttggtatttgcagctgtattgtatttggtaatgtacatatggaactatggaaccaaattgaagtacgaaactgaagtcaagcaaaaactttcaatggatttattgatacagctaggctgcaatcttggtacagtgagggcgcctggtattggattgctctataatgaactggtcaggggtgttcctgcaatctttggtcacttcctcactacactgccagccatgcattcgatgatcatttttgtctgcatcaaatgggtcccagttccagttgtgcctcagaatgaaaggttcctcttccgtcgtgtgtgcccaaagaactaccatatgttccgctgtattgctaggtatgggtataaggatgtacgcaaggagaaccaccaagcattcgaacagcttctgatagaaagccttgaaaagttcatacgccgagaggcccaggaacgctccctggaacgctccctggagagcgaccataatgacgacaaagactctgaagaggagattgcttcttcatcatcaagagttattgacgagtcaggcggtgctgacaactcagccctgggatcaagcatgtcgttggaggagggatcaagcatggacaacgagctatctttcatccacaaggccaaggagtcgggcgtggtgtaccttcttgggcacggagacatcagggcccggaaagagtcgttcttcgtcaagaagctggtgatcaactatttctatgctttcctgaggaggaactgcaggaggggcatcgcgacactgagcataccccacacgaggctgatgcaggtggggatgcaatacatggtttagggttgcctagctaccttttctttttctatttcaagatgattactaactcgcggcagtagatggtgagatgcaagcgagagagagagatgtctgaagatgattttcctttgatagaggcaacactaaccgatctggtgttttaccgaaaggttgtgaaaactgaacccaagtatgatcatatcatatacataacaaggaaaccccgttgtgtgtgaagcaaggtaacaagcctgctgctgctcacacatattcatcctacc

SEQ ID NO: 144422 - DNA, 1237 bp, Zea Mays
gaaagccacacaaacaatttgttccccctgcctaggccgccgccggggaagcggggaaaaagatcccgtcccaatggctctcctcccccaaatcctccactctcctcaccccgcgctcgccgccgccgcctcctcctctcgcgcattctgccgagcaccacgccacctccatgtctcagcgtcccggggccggggccgcggccgcctcgccacggcggcgggggcgtccgggcccggaccatcatcgccggagccatctccccctgagtccgacgacgggctggtggagctcccgctgttccctctcccgctcgtgctcttcccggacgccacgcacgcgctgcacatcttcgagtatcgctaccgcatcatgatgcacacggtgctgcagaccgacctccgcttcgggatcgtcttcgtcggcaactcggggtccgccgcggaggtgggctgcgtcggggaggtcgtcaaacacgagcgcctcgccgacgaccggttcttcctcatctgcaagggccagcagcggttccgcgtcgcccgcatcgtgcgcaccaagccctacctcgtcgccgccgtgcagtggctcgaggaccgcccgcccgcagagcccccggcgcccggggaggacgccgaggcgctcgctgccgacgtcgaggccctaatgcgggacgtcatacgcatcgccaaccgcctcaacggcaagcctgagaaggaggtcggggacctgcgcaggggcctgttccccacccccttctccttctacgtcggcaacaccttcgagggcgcgccccgcgagcagcaggcgctcctcgagctcgaggacaccgccgccaggctgcgcagggagcgggacaccctgcgcaacacgcttaactacctcaccgccgcctccgccgtcaaggacgcattcccttcctcgccgtcttcggggtgaagtgaggtgaggtgaggtcgtcactcgtcagctaggaatggatgaggataaggagtttgtggtcgtgggtataggactgaactttgttatcactctttcaagccctttttctttcttctttctcttattattatatattctatggctaggttctatctgcatggggttagcatcttagcgtgtaaaattgtataatttggtgtgtgttaactcaagaaaaattggagctgtgatatataagtccttgaaaaggacgggaattttgctctcagagagtgacttatgcttctacccttaaattgg

SEQ ID NO: 144423 - DNA, 1548 bp, Zea Mays
atggcttccgctaccacctccatctcgtcgcaccccgccgccctccgcgacgtcaaaggtgacatgttttctttgttctggatgctctttcctttgtataatttttgctcggatccgacgtttcagctagtgaaatgcgctgctccgcaacaaaattcaccggaattcgaagcgcataccggcctaactcttctcatctctctcccttctgttcgcgcagctgcgaggattggcgggctgaggcagcagcaggcgagcgtggccccgtcggcggcggcagcgcgtggccagcgcgctcgggcggtgcgatcgctgcgcgcggcggagcctgcgaggcagccggtggcggcttccgcggccgcggcggcgccggccgcgcccgtggccgacgaggcggcggcccttgcggccgtggactacgaggccctggcgcgtgagctggagggcgcgtcgccgctggagatcatggatcgggcgctggccatgttcggctccgaaatcgccatcgccttcagcggcgcggaggacgtggcgctgatcgagtacgccaagctgacggggcgtccgttccgggtgttcagcctggacacggggcgtctgaacccggagacgtaccagctattcgacaaggtggagaagcactacggcatccgcatcgagtacatgttcccggacgcgagcgaggtgcaggagctggtgcgcaccaagggcctcttctccttctacgaggacggccaccaggagtgctgccgggtgcgcaaggtgcggcccctgcgcagggcgctcaaggggctcagggcgtggatcaccggccagaggaaggaccagtcccccggcaccagggccagcatcccccttgtccaggttgatccttccttcgaaggcctggatggcggggctggtagcttggtcaagtggaaccccgtggccaacgtcgacggcaaggacatctggactttcctgcggaccatggacgtacctgtcaacaccctgcatgctcagggctacgtgtccatcgggtgcgagccgtgcaccaggcccgtcctgccggggcagcacgagcgtgaaggccggtggtggtgggaggacgccaaggccaaggagtgcggcctccacaagggcaacatcgacaaggacgcccaggcggcggcccccaggtccgccaacggcaacggctcggcgggcgccccggacatcttcgagagccccgccgtggtgtccctcacccgcaccgggatcgagaacctgctgcgcctggagaaccgcgccgagccgtggctcgtggtgctgtacgcgccctggtgcccgttctgccaggccatggaggcctcctacgtggagctggccgagaagctggcggggtccggggtgaaggtggccaagttccgcgcggacggcgagcagaagccgttcgcgcaggccgagctgcagctgcagagctttcccaccgtgctcctgttcccgggccgcaccgccaggcccatcaagtacccgtcggagaagagggacgtcgactcgctcctcgccttcgtcaacagcctccggtga

SEQ ID NO: 144424 - DNA, 1776 bp, Zea Mays
gcagaaaaaaaggcgagatgacactcactcggatccacggtggtgaccatgccggcgccctggaagtagcacgagccggcggcgcggccctgggactggtagtaggcgtcgaacgcgaacgacgcgtggctgcgcacgtcgtcgggctggtagcacgcctgcccgggctgtatcgccgtgcagtcggcgcgcccgggcccgcacgcccagtccatggccgcctgcaccgccttctggtccgcgtcgtcggcggccacgcagaaggtccggtccgtcgtgtcgttccccaggaacccgtccgcgccggacacgtgcaggaggtacaccggggtgccgttcccgtagaacaggccccagttcgcctccgacacggggcccgcccggaggtcctcgttgaagagctcgtagatgtaggcgctggactgcgcgccggcgccgggcgccatgggcgtgccggccttctcctccagcacgtgcttgatcaggttcgagttgtacgcgtccgcgttgtcccttcccgcgtacggctccgcgcgccggtccccgtacgacggccaccccgtctccgtcaccaggatcggcacgcccgcgccgcccgtcgcgttcaggttccgcacggccacgcgcaccgcgtccagcatcgcgtcgaacacgttcgtgtaccggagcagcgtgttcgggtccaccatctccatcgacggcggcagcggccggaacagcgcgttgtccagcgggatcacgcccttgctctgcatcagcgagtagtaggggtacaggttcagcatcagcggcgccgacgtgttggcgaggtgcgccagcagcggcgccacgaacgacttgtccagggactggttgaagaaggcctgcgacggcgggaacgggtccaccaccacggagaagggcagcggcgtcgacaccgggatggacgagaggttggcggcggcgagcgcggccgccagggaccggatggccgggagcagcacgggcagcgccgacgggagcgcggtcgggacctcgtccccgacggcgatggcggagacgacgttcggggtgctggagttcacgcccgcgaaggggaccacgcggcgggacacccaggaggcggccgtcgccggggaggaccccagcgccaggagctcgtcgttggggacccccacgatggcacgcacgccggaggccgctagcgccgacagcagccgcgggtccgcgtcgtacagccgcacgcgggtgatgcgctgcgcgcgcaggaacgacgccaggtccgacggcgacagcaggttcgtcacctgcgtgccgatcgtcacgcccacgtacggctcgccggaccccgccgccgacaccagcaccgccgatgggcctgctgcgcgaagagagatgaggtggagcaagaggaggaaggggaagagtagcaagcagctgccactgacactccctcctccgctcctgctccccattgggatttggtagtgtgccctgctgcgcctgctcctgctcgtgccggcctccgggactgcttctttcgtccaagactgcttcttttgatgcgcactcgatcgctttctccaggaatctccttccctcccacccccaagattgctgatttctgctgcgtggcgttggcgtgggagtgggagcgtgcgtgcttgccgcttggtgctggatggatggagctggtcctggagtgatgtcggcgaggttggtgaggtgtcggggcaaaagatgcgttgggattgggggattttccggggctcggttgggagtgggtgaattactgac

SEQ ID NO: 144425 - DNA, 126 bp, Zea Mays
tacagttaagggcttgttcgtttgtgccggtttggtgggttggaacgattcctaaccgaattgcttctctaatttatataaactttgattagctggaacgattccgggtgtaatccgacataaacg

SEQ ID NO: 144426 - DNA, 1851 bp, Zea Mays
atgacaaaagctgtgaatgatccggcggcagtgtcactctcacagcggcctggtccggcgtccggccgcccggccgcacaggagcgcgttcttggggatggggtactcgtcgcgcaacgacgtggacggcgtccagacgcggaggtagaactgctgccccaggtactgcctggcccagttctccgaccggacgttccacatgcccacgttgtccaggggcatgtaaatcgccgtccacgatctggggtacacctgaacagtgtaccgcgaaacgccgtccctcaggttgtagccctgcctgcttgccgacgaccatttccctccatccatcccgacgacccagaaggcgtatccgtcgatgtgccacgactgcacctcgtcctcgccgttctcgaacacgacctcgacgtagtccctgtagctggcgcccatgaccgacgtccgcaggtaggcggcgccgccgtaggcgggggggctgtcggcgatggtgcccacggagaagacgccgccgatcttgtagtagtctgcgaccttgagcggggtgtcggggcccacgtacgacgcgccgttcaccgcgtagcgccgcttcccgccgatggtcgccgccgagttggccaggcggatggtccgggtcaccggcaccaggccgtagtggtacgacccctgcgggttgggccgcggcccgctggccgtcaggttccaccggaccgagcgggcctggttgagcgaccagtcgatctggatggtggggccaccggggaggggacccggcgccctgccggcggagttggcgtagcgcaggaccgccgtggtggagatgatccggctcgtgaagcgcgtggagacgacgacggcgtagtcgtagcccggctggtcggcggtgagcagcacggagtaggactggcccaggtgcacgtccagggacgagtaggtggtctgcatggtgtgcgagccctccacctccaccagcttcatggtgtgcccctggaaccggatgttgagggacgtggccagccccacgttggtgatccggaaccggtacgtccggccgggctgaacgttgaaggtgtagccattcaggccccggccgttgatgagcagcccgtcagggaacccgagcgccacgccgctgtcgagcacgtaccgcaagtcggtgtggttggccttgtaccagtcgccgatgaggacggtgtagtcggcggccggcggcgggaacgggacggggatctgcgggcggctgagcacgcggatgccgccgaacccgccggcggccttgtggaaggccagcgatgggaagtagtagtaggtgccgatctggtccttggcctgcatgatgtaggtgaagttggagcccggcgggatcgggcacgtcgtcccggccacgccgtcctcgaacgagttccgccgctgctggagcccgctcctggagaggaggaacggctcgttgagcttgttgaagacgttgatgatgaggttgtcgttggtgacggcctcgatctgcggccccgggaactggttgttgatcaggatcccctgctgcttgacgcccagcgggtagatgtcgccgtaggtcaccgtccacgtgaagaaccggtacgggtcgtcgccggccacgagcagcggcagcgccagcgccaggccgaggatggagaacaggactcgagcggcgccaccggcattgccgcctgccattgcttcagttcagagggggagcttcttcaattcgctcggccgggggtggtgagtggagggagcagcaggtccgaggtgggtggggggtgggctgctggatgggagggagggcagctagatagagggcagctgcggggtcggtcggtgtcgtcagcgtga

SEQ ID NO: 144427 - DNA, 226 bp, Zea Mays
aaacttttgtactaagatccgataacacttaagacataagggataaagtaggctattcggtaggatttaattgttaggagactgtagagtagtctaatccgaaggggtaagttttttcgaaaggatggtaagaggattgccgaatatatttaaagaaggagaatcagtacaactaaccaaatacagggactactggccaacaaagtcccaactacaaccattacaa

SEQ ID NO: 144428 - DNA, 309 bp, Zea Mays
atggccaggaacgccgttcttgtcctcgttcttgccggcgtcctgctacagctgtgctccgtcgtgcctcccgtggccggagccggtcgcagggcgctgttggtggacacgcagcttgtgcatggcggcgggggaggaatcgtgaaacaagaggcggccggcacctgcgtcaacggcggcgggaacgctggcccgggggaggccacagccatcgaaggcgcagcgtattgccatgacggccagcagtacgtgagcgtgaccacagtcggcggctggaccgagactgagagcgtacatgaagccccgtaa

SEQ ID NO: 144429 - DNA, 1230 bp, Zea Mays
taactgcaaagcgaggtctggctgctgtgcttccaaattgatgccggacgattgtcgagctggtggtgaacctggagatgggaacccgatgttcaagtccgggcggagtacatccttgcctggcttctgttgcatgtggggaaacagcccctgccactgtggttgcccttgtgatcttgcgaaatctggctgcaccaactggggaaatattaccagccccttgttttgaaccgagttctctctaactacctgaacaggatgtctaaagaactgaggaacaacgcttaatttggtatcatcacaaggttggacattagcaaatggcattttccagccacaattattgtcaacgaaagctgggctgacaatggttggtttgttctctgtagcagcaccaaacgagatccaagattgagccactggagctgatggaatgctctggttctccctaacattagctggaaatgctgagaatatgttccgaggagcatcaagacctctgtttggtatatttgcttgggcaggcatagcggttgcgcctgctgattttgtatggtcactgacaatactttggccattcaaattcatggcaaattttgcagcatttattgattgatttttagtgatgaacccaatacttgtcgatggtctgcttttttttgatgttccaacctttccatcaccaggtcgtccatggtacacccatgttgcttcatttttgggctgtagtacagttgcttcttgggactggaacaagggtttagactgcccgtttgaggcatttgaggaaggagtatcatgcacactagaatcagcatcttttgcacactcaacttgctgtggtgccatttcaattggaattttgctttttgatgagtcaatctttttcatttgctgagctctagttgattctggtggttgcaaaaacggtctaggctggccagccattttatttggggcagggatatcaagcgcgccagaagaagctcctttctgtagctgcatttcaagaggtcgggcactagaagatgaattgccttttcttgtttgctcattcgttgttcttttggtctttgcgacattaccagacactctgtggttctcgtgcagtgataacgcgtctgtgctcctgtgttgaggctcagtggtaacaccaaataatcttggcttaatttctggactctctagtggtccagccactccaactacattattgcaagtggctacccg

SEQ ID NO: 144430 - DNA, 2516 bp, Zea Mays
cttcaacgtctctccagctcgtcttcgccttctctccctcttgaatccctcaccggcggcgatttaggggtttcccaccggtaccgatccccagcgactccggccggccgcaggactcctcgctgcgcctatggagggactcttcctcatcgacgtctccaccgaggacgatcttctcttcaacctcgtctcaccggccccgcggcgtcccgatccgctccacgcagagtctctagtgggagccgaggcaacctcctccggcgtttctccatcggcggtggttcgggctacggatccggactgtgtgatggaggagcgggaagatcccgagcggacggagtccccggagcagcgcaaggccaagaagggggtaaacctccgcaagagcttggcttgggacagcgaattttttaccagtgaaggggttctcgacactgaggaattagccattgtaaacagcacctatcgtaaggcccaaggttccaggctgcctggaatcattgaggaaacgaggagatcaggggagtcaacaacctcaactctggaaagtgaaacctgggcgatggaaagccttgagactgaactatttgataatgtccgtgcttcgatccagagatctcttggcaaacctgataaactttcaggtcggcccgttgctgcctcaaaccccccaaaggccacagcaaatgcacctcgtgttgcagctagaaaaggtgttgatcggatgccacagtcaaagatgagggcccctgtttcaacaagccaaggagctgttagcagacaaaggccccaagtcaccatcaacgagcctgtggctgcaagagataatttaacaggagctgcagaagcaaagatatcctcaaagcctcctagggctttgccaagagttgctatgatgagatcatcaactaatacaactgtcacctctagggcttcagacaaaagaaacagcactgggggtgctgtcaacaggcaggcagttggtaaaactgccagtacttcagctgtcctgcgatctggcaggggtacaaattccagttcaatcttgaaatcaggtttcttcacatcagcagcaacttcttcccattgtatgttgatggacactaagccagaagccaaaactaaatcagcaacactaagcatcaagaatagacctgctcagagggtccctgttcgtccgtcatcaaaatctgatatcagcaaaactataccctcaagatcatcagggaacaggatcccagctaagggccatgctgaccgtgcatcaccaagcatttcacctagcagctccatggacagcatgagctctgtgatatctggggcttcaactgcttccaccgtagggaagatgagtcatacatccgataatttgaatgcactgtccccctccctcaggaagagcaatgactgccatccgaatccaaagtttaggcctcctattgtcacagagggacattcttctggaacagcagcatctagagataatttaaaagctactgcagaaataaccaaccagggaaaaggccttaagccatcggggcttcggagacccacacccaagattggttattttgatgctgagaattatattgaccaaaacatcggtgcacaagtgcaaccacaactttcaaatatccagtgtctacctactcagaacatgaatctgaatgccgcaccatctacctacggccaacaggaatcaaaattgacagcagcacctcatgaggaaagctgtgtttccaaaagtaagctgatgacgccactgtctcttatggtggaagtagagccttttaaggtggccgaactagcttgcacaaacctgactgatccagttgtggtcagacctgaatctgtgcaaccgcaatccatggagatccagtgcttgctacctgccacaccaaaccctcagccaacctttcatcaacaagtattaaaacctatagcagcacctcttgaagctgtgcaaatggaagtagaagcttttaaggtggacaaacctgaagcgtgcatacacctgtccagtccagttgtcgtgaagcccgaaaacaaatccattgaccaaaacgctggagcactgctgcaactgcaacttgtcgccgaacctgaatcatgcacgcgcaagtctaagacagtggtggctgcagactattccaaggagaatattccggctttgaatcagaacatacaagctaatggcgatgcgaattcgttagttgagttacttacccagaagctatcctccatttcccttggggaggctgcccctaacgtggcccctaggtcctgctgggaataaggtttggacactatgctgttggttgtttctgattaccctctttgttatctgtaggcaaaggcaaccgccgctgaggaacctgatttctttctctgcttgtggtgtaaaatgcttgtacacagggctttatagaatttcacttttctattgtatgcataaacacatgatctttgtctattgccggtttgcaagtagcgtgttattggtataacattagttt

SEQ ID NO: 144431 - DNA, 2461 bp, Zea Mays
cttcaacgtctctccagctcgtcttcgccttctctccctcttgaatccctcaccggcggcgatttaggggtttcccaccggtaccgatccccagcgactccggccggccgcaggactcctcgctgcgcctatggagggactcttcctcatcgacgtctccaccgaggacgatcttctcttcaacctcgtctcaccggccccgcggcgtcccgatccgctccacgcagagtctctagtgggagccgaggcaacctcctccggcgtttctccatcggcggtggttcgggctacggatccggactgtgtgatggaggagcgggaagatcccgagcggacggagtccccggagcagcgcaaggccaagaagggggtaaacctccgcaagagcttggcttgggacagcgaattttttaccagtgaaggggttctcgacactgaggaattagccattgtaaacagcacctatcgtaaggcccaaggttccaggctgcctggaatcattgaggaaacgaggagatcaggggagtcaacaacctcaactctggaaagtgaaacctgggcgatggaaagccttgagactgaactatttgataatgtccgtgcttcgatccagagatctcttggcaaacctgataaactttcaggtcggcccgttgctgcctcaaaccccccaaaggccacagcaaatgcacctcgtgttgcagctagaaaaggtgttgatcggatgccacagtcaaagatgagggcccctgtttcaacaagccaaggagctgttagcagacaaaggccccaagtcaccatcaacgagcctgtggctgcaagagataagaatttaacaggagctgcagaagcaaagatatcctcaaagcctcctagggctttgccaagagttgctatgatgagatcatcaactaatacaactgtcacctctagggcttcagacaaaagaaacagcactgggggtgctgtcaacaggcaggcagttggtaaaactgccagtacttcagctgtcctgcgatctggcaggggtacaaattccagttcaatcttgaaatcaggtttcttcacatcagcagcaacttcttcccattgtatgttgatggacactaagccagaagccaaaactaaatcagcaacactaagcatcaagaatagacctgctcagagggtccctgttcgtccgtcatcaaaatctgatatcagcaaaactataccctcaagatcatcagggaacaggatcccagctaagggccatgctgaccgtgcatcaccaagcatttcacctagcagctccatggacagcatgagctctgtgatatctggggcttcaactgcttccaccgtagggaagatgagtcatacatccgataatttgaatgcactgtccccctccctcaggaagagcaatgactgccatccgaatccaaagtttaggcctcctattgtcacagagggacattcttctggaacagcagcatctagagataatttaaaagctactgcagaaataaccaaccagggaaaaggccttaagccatcggggcttcggagacccacacccaagattggttattttgatgctgagaattatattgaccaaaacatcggtgcacaagtgcaaccacaactttcaaatatccagtgtctacctactcagaacatgaatctgaatgccgcaccatctacctacggccaacaggaatcaaaattgacagcagcacctcatgaggaaagctgtgtttccaaaagtaagctgatgacgccactgtctcttatggtggaagtagagccttttaaggtggccgaactagcttgcacaaacctgactgatccagttgtggtcagacctgaatctgtgcaaccgcaatccatggagatccagtgcttgctacctgccacaccaaaccctcagccaacctttcatcaacaagtattaaaacctatagcagcacctcttgaagctgtgcaaatggaagtagaagcttttaaggtggacaaacctgaagcgtgcatacacctgtccagtccagttgtcgtgaagcccgaaaacaaatccattgaccaaaacgctggagcactgctgcaactgcaacttgtcgccgaacctgaatcatgcacgcgcaagtctaagacagtggtggctgcagactattccaaggagaatattccggctttgaatcagaacatacaagctaatggcgatgcgaattcgttagttgagttacttacccagaagctatcctccatttcccttggggaggctgcccctaacgtggcccctaggtcctgctgggaataaggtttggacactatgctgttggttgtttctgattaccctctttgttatctgtaggcaaaggcaaccgccgctgaggaacctgatttctttctctgcttgtggtgtaaaatgcttgtacacagggctttatagaatttcacttttctattgtatgcataaaca

SEQ ID NO: 144432 - DNA, 466 bp, Zea Mays
atacatccatgacatatcctggcctcaccaaactcagccttggttgcaggctcttcaattacattttctacgtcgatttcgaagcatcgatgacggatgtccgcgcgcaaaatgcattgaagggtctcgaggaagttgcaagtttcctgcgtgtccttggctgctacccgtgcagcacgacaacgatctgagctgccgcgtcaagccgtctgtctctcggttgctccgcctcggaagactagagtgcgagatggttgttgtttcaactcgagttagcgatgaataaatacttttgttccgatgacatctcggctgtagctccatgttgaaatgacgagcaccgccagtgttctgcgcaagtaggtgtactgtaacgagtgatcggaccctgattactgctgtcagattcactgtatcgagcaatcgcaccttgattccgcttcagatcatcagatgttttgggatt

SEQ ID NO: 144433 - DNA, 1026 bp, Zea Mays
atgtgcccggtcgcccacgccaaggctggtcaaagagttggtggagttagaagacgtgttgcatccatccaatggaacatgcacgactatggcagcatcattcccacttcctggctatcaaggcccaagttctgtggcatggcaccagtgcgacactatggcggtgtggacgacatgcaccacgacctaccgcgtccctgtagcgacgtgtgcataaacctaccatgtacctactttcttgtagcttatgccacgggcttccgcaatgctacgggtagggcatacgtctacaacacctcggacatgtctacaggacatgacttccattactgtaggatgggctagacccctggctagactcatctgtcagttgtaaccccctcacccttggtatataaaagggatagggtggcccctgtgtaaggggttccaactccacacattttacacattcgggctctcttagccatccggtgctcggcacttagccatttgcaagcaatccaatccactcaaagagatcgtagggtattacgctctggtgatccgaacctttataacccttgtctgcctcgcggttctatgtatgtttgtcatgttcctcctcccagttaatcgggttgggcctaatcggtcgtctaagcaatagggtgatacaccaaaatccctgccgaatctatatggggtatactccatgtatctgtgactgtcacctgatgacagtcgggtatttagtgaatctagataatatcggtgagatataacaaaaaaacttcgtcttcaaggacatgattatccccatccggactatccaatgtgtacggtaaaaagtcttcactttgatgcttgtagtgatcctttttagagttacttagtctatcaccaacaacttactcatcaccatatgttatttcaaacttcactctaactattaggctttggcacatgaggtgcgtggatgaagaagccctaaacaaggatgaccgttactggtatggtggtgaagctagctacttttactcgttt

SEQ ID NO: 144434 - DNA, 1511 bp, Zea Mays
ttgagggaagcgtcgccgtctgcccacacccgcaccgcacccaaccgcagcggagccgggagccgaaggccgagggtattcttccttcgccgctaagcacgcctcctctccacaggcagccgacccaggggaagcgtcgccgtctgcccccaccccgaatctgatgcttcatcgattggagggggagccattgccggtgttctgattgctgctggaggtcgagggatggtaggggtgctgtcgaatcgcgtggatcgggacgacctcaaggccggggatcacatctacacttggcgggccgcctacatctacgcccaccacggaatatatgctggagatggcatggttatccattttacaagggcagctggacatgagattggaacaggaacattcttggactggttcctttatagctcctctccggcagcaactgagggtcctccctgccagaaatgtgggcacctagtcaagtccgatggggtcatcacctcttgcctcgattgcttcttagatgggggcagcctgtacctctttgactacgctgtgtcgcctgctttcttcctcgccaaagcacggggaggaacgtgcaccctggctgcctctgaccccagtgacgttgtgatccaccgtgcacggtacctcctggacaatgggtttggcatgtactccctgttcaagaacaactgcgaggacttcgccatatactgcaagactgggctgcttgtggagaccgctttcagtgttggccgtagcgggcaacttgcgtctctgactgctgccttcagcgccgtggcctcgtcccccttgcgtttcctgacaaccagtgctggtggcctggcaattgtgaccagcggcatgtactgtgtcgggcggtatgtgtcggatattggtgtccggcgtgatgttgtcaaggtccctgtcgaaaggcttgtggagcagaatgttacttggattcctcagtgtgtggctacagagacagatatcgcggcaggagcaccgcagcagcagttggaggttccttgtgcggttgccgaggaagcatccgttatacagcccgcggcaccgtgatccattgctgaaatgtcatcatgtaccaggtgttggcatgagacaggacaactggaactacgtacttgtgtggaagtacatgtaatgatgtatctggtggtgttatgcaatccattgctgctgctgctaatgttgcaagcaatgatgatgatgatggatgtggttccatgaccgctattattacagaattgagaagacctgtatttgcccttgatgattaatgatttctgttatacagttgcttatggatgcatctgattgtgcattttccgagtcgccatacattagcaatcttgacacgctcttcactcagtccaaaaccacaacttatatctagattaaagtaagcatcacgagcaattctcttggaatagcgcaaaatgaactgattctagacgttgcagtgtacgccccttcagggcttgttcggttctacatcc

SEQ ID NO: 144435 - DNA, 1557 bp, Zea Mays
gaaagggagaaaatgttatgcttgcttgccttgagggaagcgtcgccgtctgcccacacccgcaccgcacccaaccgcagcggagccgggagccgaaggccgagggtattcttccttcgccgctaagcacgcctcctctccacaggcagccgacccaggggaagcgtcgccgtctgcccccaccccgaatctgatgcttcatcgattgatttggagcggagcaggagggggagccattgccggtgttctgattgctgctggaggtcgagggatggtaggggtgctgtcgaatcgcgtggatcgggacgacctcaaggccggggatcacatctacacttggcgggccgcctacatctacgcccaccacggaatatatgctggagatggcatggttatccattttacaagggcagctggacatgagattggaacaggaacattcttggactggttcctttatagctcctctccggcagcaactgagggtcctccctgccagaaatgtgggcacctagtcaagtccgatggggtcatcacctcttgcctcgattgcttcttagatgggggcagcctgtacctctttgactacgctgtgtcgcctgctttcttcctcgccaaagcacggggaggaacgtgcaccctggctgcctctgaccccagtgacgttgtgatccaccgtgcacggtacctcctggacaatgggtttggcatgtactccctgttcaagaacaactgcgaggacttcgccatatactgcaagactgggctgcttgtggagaccgctttcagtgttggccgtagcgggcaacttgcgtctctgactgctgccttcagcgccgtggcctcgtcccccttgcgtttcctgacaaccagtgctggtggcctggcaattgtgaccagcggcatgtactgtgtcgggcggtatgtgtcggatattggtgtccggcgtgatgttgtcaaggtccctgtcgaaaggcttgtggagcagaatgttacttggattcctcagtgtgtggctacagagacagatatcgcggcaggagcaccgcagcagcagttggaggttccttgtgcggttgccgaggaagcatccgttatacagcccgcggcaccgtgatccattgctgaaatgtcatcatgtaccaggtgttggcatgagacaggacaactggaactacgtacttgtgtggaagtacatgtaatgatgtatctggtggtgttatgcaatccattgctgctgctgctaatgttgcaagcaatgatgatgatgatggatgtggttccatgaccgctattattacagaattgagaagacctgtatttgcccttgatgattaatgatttctgttatacagttgcttatggatgcatctgattgtgcattttccgagtcgccatacattagcaatcttgacacgctcttcactcagtccaaaaccacaacttatatctagattaaagtaagcatcacgagcaattctcttggaatagcgcaaaatgaactgattctagacgttgcagtgtacgccccttcagggcttgttcggttctacatcc

SEQ ID NO: 144436 - DNA, 1654 bp, Zea Mays
agcgtgaggagttcgaaagaaagggagaaaatgttatgcttgcttgccttgagggaagcgtcgccgtctgcccacacccgcaccgcacccaaccgcagcggagccgggagccgaaggccgagggtattcttccttcgccgctaagcacgcctcctctccacaggcagccgacccaggggaagcgtcgccgtctgcccccaccccgaatctgatgcttcatcgattggttctaatcctcactacctccatattcatgcacgagattgcgcgtgattaggagcagggaccaatcatattgaactcagatttggagcggagcaggagggggagccattgccggtgttctgattgctgctggaggtcgagggatggtaggggtgctgtcgaatcgcgtggatcgggacgacctcaaggccggggatcacatctacacttggcgggccgcctacatctacgcccaccacggaatatatgctggagatggcatggttatccattttacaagggcagctggacatgagattggaacaggaacattcttggactggttcctttatagctcctctccggcagcaactgagggtcctccctgccagaaatgtgggcacctagtcaagtccgatggggtcatcacctcttgcctcgattgcttcttagatgggggcagcctgtacctctttgactacgctgtgtcgcctgctttcttcctcgccaaagcacggggaggaacgtgcaccctggctgcctctgaccccagtgacgttgtgatccaccgtgcacggtacctcctggacaatgggtttggcatgtactccctgttcaagaacaactgcgaggacttcgccatatactgcaagactgggctgcttgtggagaccgctttcagtgttggccgtagcgggcaacttgcgtctctgactgctgccttcagcgccgtggcctcgtcccccttgcgtttcctgacaaccagtgctggtggcctggcaattgtgaccagcggcatgtactgtgtcgggcggtatgtgtcggatattggtgtccggcgtgatgttgtcaaggtccctgtcgaaaggcttgtggagcagaatgttacttggattcctcagtgtgtggctacagagacagatatcgcggcaggagcaccgcagcagcagttggaggttccttgtgcggttgccgaggaagcatccgttatacagcccgcggcaccgtgatccattgctgaaatgtcatcatgtaccaggtgttggcatgagacaggacaactggaactacgtacttgtgtggaagtacatgtaatgatgtatctggtggtgttatgcaatccattgctgctgctgctaatgttgcaagcaatgatgatgatgatggatgtggttccatgaccgctattattacagaattgagaagacctgtatttgcccttgatgattaatgatttctgttatacagttgcttatggatgcatctgattgtgcattttccgagtcgccatacattagcaatcttgacacgctcttcactcagtccaaaaccacaacttatatctagattaaagtaagcatcacgagcaattctcttggaatagcgcaaaatgaactgattctagacgttgcagtgtacgccccttcagggcttgttcggttctacatcc

SEQ ID NO: 144437 - DNA, 880 bp, Zea Mays
atcagctgctctccctcctctcgctccctgtttctctgtcttcctagctagcatagtgttggagacctatggccggagtgcggggagaagagttcgacgagggagacgtgtgggacgtgctgcaggacgatagccgccatcaggctcaggcggcgccgctcacggcggcaacaactactactccaccaaggaatactattaggaggggcgggaagaacaagtgcaagaaggccatcacgacgatgtcgtccaaggagtacgagccggctgcaggcgcgaggggcggcaacaacaagggcggaggaggaaggtcgtcggcgccggtggccattccggctggcagctcgagctcggcgaggcgaggcggcggcagaggtgacgaggaggacgatgcgggggagatgctgcctccgcatgagtggctggcgaggaagatggagcggatgggcggcgtggcgtcggcgtcgccgccggatcaggcggggaggagcaaggggcgggagctgaccaaggtcagagacgccgtgctccgccttctctgagcgcgcggtagcttattactagtattaactattaagcttaagctaggtggtggtcaaggtcaagcatgcatcgatctacgtactacacagctcactaaagcaaggaattagtgcatgttccttgctcgatcgatcaaggtagctagctatctactgccaataagatgcgcgaatgctcgatcgtatgagttagctgctaaatttcttgctagtacggggtggcttctttttgggggaagtagtactgctaaatttcgatcgtatgagttaccacgcaatctgtatttctgtgtactattgcaatgcataataattaagtaaatactagttcatgttta

SEQ ID NO: 144438 - DNA, 3366 bp, Zea Mays
atggactgcagtcaagatccccaagaagaaagccatcaaagaagggagaatggtgaagaagcagaaaagacggctgactatggaaatgctttgagtcgtaaggaggtaacagaagagcttcttggttgtgtggttcatagtgaggaagaggcgtacaggttgtactgtgattatgggcatcgaatcggttttagcgtgcggaagggcaaacagtcttactttattggtaccaagaatattcgaacaaaggattactactgctcaaaggaagggcttaaatacgatgagcctgttacagaagcaaattttaatcgaccagacacaagaactaattgcaaagcaatgatccgctttagagttgacgagaaggggcggtggacagttatacgctttgttcctgtacataatcaccagttggcaaaacctggagaaagacacatgctgagatcagccaaatcgcttgctgttggcaaatcaggtgttatagatccattagcatctacagaggcacatccaattaatggtttctctgatatgacaggtgatatagttgagaattcagggtatactataagggaatgttacaatcaagtgggcatgcagagtataacagtaattgaggcaggggatagccaaagtcttgtcagctatttcaagcataaaactaatgaggaaggcatgttctattgggacgtccaagttgatcaagaagggcgcatgacgaacttcttctacagggatggtaaaagtagaaatgattatggctgctttggagatgccattatatttgatacaacctaccgcacaaacaaatataacttgatatgcgccccatttgttggtgttgaccaccattggcaaaatgttgtttttggctgcgcgttcttgttagacgagtctgtaacttcctatgcctgggtatttaaatcattcttggagtcaatgggagggcgatcaccaaaatcaatattcactgatcaggatgaagctattatgcaggcagtcaaacaggttttccctaatacgcaacattgtttttcctactggcatattctgaagaatgctcaatctcatttaggctcactaaatacgtctcaagcatttcaaagtatgtttaccaagtgtatgcaaggatctgactcagaagaggattttaaggaatcatggactgcaatgatccaggaatacaagctacaggataataattggttgattgacctttatacattccatcataaatggtgctcggcgtttaacaaagatacatttgatggtggaattaattcttctcagtggggggaggtttcaagtaatattctcaatggaatttctgatgaaaatacctctcttacacgttttgcccttttgctagaaaaggttgtcaaggatctacgtagaaatgaatctgaagaggattttcgatgtagccaaactgctccagtccgtgcaattaagcatagtaccgttttgaagcaagctgcagaatcatatacacataggatctataaattatttgaagcagaatttctggatgggtgtggagcaacttcatgccatgaaacttcgagtggtggaaatttattgaggtttggaattacaatgcaggggaggggttcaaaagtatgggatgttgttcttgacacttccaccatggagatcagttgtggttgtagaaagtttgaaaggatgggtcttctttgttcgcatgccctcaaagtcttcaccctgcagaatgttgacacaattccagaaaagtatgttttgaaacgctggacaaaagatgccaggagaagcatgtatacacttgctcaggatgattcaacccaacaggaatgcacagaggctgaacttgcatatcgcaatcgggcaatgcagtatgcatataacctaattataaagagccaggaactggaagaatcacgaaaaatattctgggactcccttgaaactggagagaaggcactggaagtgttctttgaaatgagaaacatgcgcactcaagcagccaaggatgctgataagaatgtaaagaagaagaaaaaaacatcaaaaggaacaaacccaaaaaaagctaaacaagccccaggagtttcctcaactggtccagagctgatagtccatactaatgagcatcaatttcaatcttcacaagatgctcagggtaatgcaaccattggaagaccatattactatcaggcttttccaaatgcccctatacaaccaaaccagatgtacatgcatacaaatatgcacacaatgcccctttgcacaccgcaggagctgtctgcatatgctgcaatacgccccaattcaatgtttggtggtgccaagaacatctgaaggatattaaggtccagattcatgtggatgtcattggaaaaccttattgagactttcgctatcaactccgctttgatctctgtggacccatttatggaggcctggtggcacttcatgtttggttggttcaggggctcttcgttctgatctttagggaagcggttattctggctgttgcagtgcaggctgtgcagccccttatccatatagcagtggccagtggcttgctattaatatcactcacaggcaattttagggttgtaaactgtaaggcctcaatccgctgtgggcgtgagtttctccccttccaaggcagtttcctgcatgggttcagcttgagttgagctgctgagttgtgaacgaggaagcaaccaaagcaactgggagcctgggagagtgggagtggaggagctggctgccggcactggccgaggaactactcagtccaagacgtgtgtcgatctgaagtgacgctgacggctgacctatcacctatgttttgggaggggctcagggccggcaacagccatggccgggcaggtctccacacagtggccactggagctagaactggacctggaacggcgccccacctgccaaacggcaatgctgatgaccgcttgacagctgcttccgatgggctggccacctcccactgcccacatatgaaagggaacctggaactgtgtttgctcggcaaccagcactggtttggggaaacagaaagggtacataattgtagattgagagaaaaattagaggatgcagctgttgcttgggttcagtggtgaaggaagcagctagcagcttcttgggttcattcaagagagattggagaagggggaaggattggaaatgttgcttctgattcgcttgaactctgaatttctgattgtttccttgttcacagaatgtagtgtcatgcataacctgggttgccacgccttgtttctgaggcgtgacatgtgactgtcgtgatggtgtttttgaaatttcggttggtaagaaatgctgaaagaagaaatg

SEQ ID NO: 144439 - DNA, 3134 bp, Zea Mays
atggactgcagtcaagatccccaagaagaaagccatcaaagaagggagaatggtgaagaagcagaaaagacggctgactatggaaatgctttgagtcgtaaggaggtaacagaagagcttcttggttgtgtggttcatagtgaggaagaggcgtacaggttgtactgtgattatgggcatcgaatcggttttagcgtgcggaagggcaaacagtcttactttattggtaccaagaatattcgaacaaaggattactactgctcaaaggaagggcttaaatacgatgagcctgttacagaagcaaattttaatcgaccagacacaagaactaattgcaaagcaatgatccgctttagagttgacgagaaggggcggtggacagttatacgctttgttcctgtacataatcaccagttggcaaaacctggagaaagacacatgctgagatcagccaaatcgcttgctgttggcaaatcaggtgttatagatccattagcatctacagaggcacatccaattaatggtttctctgatatgacaggtgatatagttgagaattcagggtatactataagggaatgttacaatcaagtgggcatgcagagtataacagtaattgaggcaggggatagccaaagtcttgtcagctatttcaagcataaaactaatgaggaaggcatgttctattgggacgtccaagttgatcaagaagggcgcatgacgaacttcttctacagggatggtaaaagtagaaatgattatggctgctttggagatgccattatatttgatacaacctaccgcacaaacaaatataacttgatatgcgccccatttgttggtgttgaccaccattggcaaaatgttgtttttggctgcgcgttcttgttagacgagtctgtaacttcctatgcctgggtatttaaatcattcttggagtcaatgggagggcgatcaccaaaatcaatattcactgatcaggatgaagctattatgcaggcagtcaaacaggttttccctaatacgcaacattgtttttcctactggcatattctgaagaatgctcaatctcatttaggctcactaaatacgtctcaagcatttcaaagtatgtttaccaagtgtatgcaaggatctgactcagaagaggattttaaggaatcatggactgcaatgatccaggaatacaagctacaggataataattggttgattgacctttatacattccatcataaatggtgctcggcgtttaacaaagatacatttgatggtggaattaattcttctcagtggggggaggtttcaagtaatattctcaatggaatttctgatgaaaatacctctcttacacgttttgcccttttgctagaaaaggttgtcaaggatctacgtagaaatgaatctgaagaggattttcgatgtagccaaactgctccagtccgtgcaattaagcatagtaccgttttgaagcaagctgcagaatcatatacacataggatctataaattatttgaagcagaatttctggatgggtgtggagcaacttcatgccatgaaacttcgagtggtggaaatttattgaggtttggaattacaatgcaggggaggggttcaaaagtatgggatgttgttcttgacacttccaccatggagatcagttgtggttgtagaaagtttgaaaggatgggtcttctttgttcgcatgccctcaaagtcttcaccctgcagaatgttgacacaattccagaaaagtatgttttgaaacgctggacaaaagatgccaggagaagcatgtatacacttgctcaggatgattcaacccaacaggaatgcacagaggctgaacttgcatatcgcaatcgggcaatgcagtatgcatataacctaattataaagagccaggaactggaagaatcacgaaaaatattctgggactcccttgaaactggagagaaggcactggaagtgttctttgaaatgagaaacatgcgcactcaagcagccaaggatgctgataagaatgtaaagaagaagaaaaaaacatcaaaaggaacaaacccaaaaaaagctaaacaagccccaggagtttcctcaactggtccagagctgatagtccatactaatgagcatcaatttcaatcttcacaagatgctcagggtaatgcaaccattggaagaccatattactatcaggcttttccaaatgcccctatacaaccaaaccagatgtacatgcatacaaatatgcacacaatgcccctttgcacaccgcaggagctgtctgcatatgctgcaatacgccccaattcaatgtttggtggtgccaagaacatctgaaggatattaaggtccagattcatgtggatgtcattggaaaaccttattgagactttcgctatcaactccgctttgatctctgtggacccatttatggaggcctggtggcacttcatgtttggttggttcaggggctcttcgttctgatctttagggaagcggttattctggctgttgcagtgcaggctgtgcagccccttatccatatagcagtggccagtggcttgctattaatatcactcacaggcaattttagggttgtaaactgtaaggtaggaggtagtgagagtaggtggtcattctacagatccagaatccagttgcatactatactgatatagggattgatttgcttgtgctaaaggcctcaatccgctgtgggcgtgagtttctccccttccaaggcagtttcctgcatgggttcagcttgagttgagctgctgagttgtgaacgaggaagcaaccaaagcaactgggagcctgggagagtgggagtggaggagctggctgccggcactggccgaggaactactcagtccaagacgtgtgtcgatctgaagtgacgctgacggctgacctatcacctatgttttggggtatggtttctcttctgatttatgttgcatacaagtttatataatgtaatatgtattttactcctggtcgacgagacgaagagacgattaatggacagattctaggaaattcaaatatgatttttttggaagcggttctggttaggttagcacatgttgaactgatgatgattgatggcaccactagaggggctcagg

SEQ ID NO: 144440 - DNA, 525 bp, Zea Mays
atggagtctttagcaaaggcgacgctatgttcttcaaaatgtcacattggccgatggaagatgtgggaagaaacatcagaacatagaatgaggaatggcggaatatgttgttggctttctctattcgtgggcttgccatggctaggaccctgcggcgggtacaccaggaggcacgcacagcaggcggtgctgccagtgcgtagaggcagcttgggcacggagagcctcgtggccacctcgggagcgaatagcagcacgtcccgatggcggccacagggaacggagtatgaaggcacgaacgacggtgggggtagagatgaggtcagacgcgaggaagatgacgagcgaactggttccttacggagtgagaggatgcgcaatatggctgaatgcaccgtcactgaagaagcaatagaggcagctaggatgcggcggcccgaggggggaggtggagctgggatgtggtggcccgacgcggattcgaacgggaggtgggaggaggataaaaatgcaaggcgtggatga

SEQ ID NO: 144441 - DNA, 1876 bp, Zea Mays
gggcaggatcccagtttccccagagcattattttgttttccattcctgacaagcaaaaatggactgcggagagcgtcatattgcaaagcggtgcagccagctcggcagatccacatgatcctccccatctcgccatcactgcccctccaccactcagctcggcttgaataccccaccgtgcacacctctccacccaaacccaatccatccaaacccatttccctcgctcccatcccgtcccgccccttgtctcttccgcttccccccgaccccgcgcgccgcggaccagcagccatgtcgtgctcccacctctccaccgcctggtcctcctcggcgctcgccagcagcgcctccaccacccgacggcgctcccccccgcgctcgggtctcctggtgcggtgttccctccgtgagctccgcacccgcatcgactccgtcaggaacacgcagaagatcacggaggccatgaagctggtggccgccgccaaggtccggcgcgcgcaggaggccgtcgtctcctctcgccctttctcggaggcgctggtggaggtgctctacaacatgaaccaggagatccagacggaggacatcgacctgcccctcacccgcacccgccccgtcaagaaggtggccctcgtggtcctgaccggcgagcgcggcctctgcgggagcttcaacaacaacgtgctcaagaaggcggaaacccgcatcgatgagctcaagcagctgggcctccagtacaccgtcgtcagcgtggggaagaagggcaacgcctacttccagcgccgcccctacatcccgttggagcgcgatctagaggtgagcagcgtgcccaccgtcaaggactcgcaggccatctgcgacctcgtctactcgctcttcgtctccgaggaggtggacaaggtggagctgctctactccaagttcgtgtcgctggtgcgctccgaccccatcatccagacgctgctccccatgtcgcccaagggcgagatctgcgacgtcaacggcgtctgcgtggacgccaccgaggacgagctcttccgcctcaccaccaaggaggggaagctcaccgtggagcgcgagaaggtgaagatcgagacgcagcccttctcccccgtggtgcagttcgagcaggaccccgtgcagatcctggacgcgctgctcccgctctacctcaacagccagatcctccgtgccctgcaggagtcgctcgccagcgagctcgccgcccggatgagcgccatgagcagcgccaccgacaacgccatcgagctccgcaagaacctctccatcgcctacaaccgacagcgccaggccaagatcaccggggagatcctcgagatcgtcgccggtgccgacgccctcgctggctgagcctgagtccccttggtggtgcggtgctcctgctatatataattctttttcctcattttctccactctgcctgtaattcctgataatagcacaaacgcaacggagttctgtgttccttgcgacacacaagaatttcaatccagagatgccaaaatgtataatcttgccgcaactgagacgtcgaagctcagtgtatttttatgcccaagtcttccaaatgtttggcacgaatcagctacggctcggcatcctgcggcatgcaccaaacaccctacctagtacatgagtaaaggtgcaatagcaactaagacgaggctgttttgaacacataaatctcaaagcaatttgacaggattgctttttcatgcaaaatttatcaaacttctgtgttctttttttttataaaaaaacattgttaagagaagaaacatataatgctgcagttgaatcacgtcacttcctcagaatcatcaggccggtaggggatgaaggtaaactatat

SEQ ID NO: 144442 - DNA, 3179 bp, Zea Mays
cgtcgcgatcgcgacatgcccggcgccgccaccctcagatcgcgcgtggccgtcgcggccgccgcgtgccttgcggtcttcgcagcggtggcgctgctccaccgcaagcgccgctggaaccgggcgccctcctcgtctcgtcgcctcggggtcgggggacgcccacgccgcgcttgcgaggaggaggagaagccgcaggaccggttcaagcgcgtcctcgcggacaactcctactccccgttcaaacacccgcgccgcaagagtgctcagttgggaagtgcagaaggcgaggcacccctgccaccgcctcaagaattgtcacaaaaaggtcatccatttgaggaggaaatcacatctttgctaaagaacccccctggttttcatagctttatgctgtgtgaccagtgcccagaaatgagtgctacatataattgggttcatacagaaactcaactggaacatttggcgagattattgggtgaggaaagagcttttgctgttgatacagagcaacatagcattcgatctttcctaggatatactgcactaatgcagatctctacccagaatgaagactatctgatagacacaatagcactgcacgatgtgatgggcattctacgaccagtgtttgccaattcttctatctgtaagatcttccatggagctgacaatgatattctttggcttcaaagggattttcatatttatgttgtgaatatgtttgatactgctaaggcatgtgaaattctattgaaaccacaaaaatcactggcatatttgcttgaagtatattgtgaagtgaccaccgacaagacaatgcagcgtgaagattggagactgcgtcctctgactccagaaatgatcgagtatgcacgcactgatgctcactatctgttatacattgcaaattgtttggcatcagagctccatgcaaaagcctatacttccagtgataaaatcaattttttcttcgaggctagtcatcgctcaaatatggtgtgcatgcaactgtattcaaaagaaattgaatcccctcctggagcttccagtgcaacatctattctctcacgaaatttgcaaactcatgggttcgactccaaaaagtctagtgaagtgaaggatcttgtttggaaattttgtgcatggagggacttaatggctcggatgcatgatgaaagcttacgatatgttctgccagaccaagctatagctgcccttgccgttagtcttccaaagggcccaacagaggtgtttgctgtcatagcagaaactgacctaagcatttcaagtatgtacccttccttgtcatcaccgtcacctcttgttgtggctcatgtcaaagaactctgttatctgctggatgacatcactaccagcatggacagcatctttaaaagtttactagagaagtataaagatccaagtggattatgtcgactatcagtttataattataaccttataacacacctaagtttgaagcaaacaagtatgttttccgttgctccaagtggaaagaagttgacagcactgcctaataaaaaggtttcacgggatttattcattaaaaagttttcctgcaagtccccggtatatcacaattgcaggatttatgctagtgatggaagactactttgctactgtgaccgcaaaaaactggaatggtacattcagcgtaatttggcgaaattgattgaaaatagtcctccagcaatcatgcttctctttgaacctaaaggtcgtccagaggatgaagataacgagttctatattcagagcaagaaaaatatttgtgtgggctgtggagaaaagagccattatattagatacagaataataccgtcatgctacaggatgcattttccagaacatttaaagagccatcgttcacatgatattgtacttctttgtgtagactgtcatgaaatagctcattcagcagctgagaaatacaagaggcgaatagcagaagaatttggaatacccctttttgtgcaaaagataatgaactcgggtgatataagtttgattaccaacacatcagtatctgaagataaattgaatggaacaggtgtctccccattgcagctgaggactgctgccatggctcttctacgtcatggatccactatgccattgaagagatgtgaagagctaatgcagattgtgaagtcatactatggtggtagagatgtgactcctgaagatctcgagatggcattacttgttggtatgagccctcatgagcgaaggcgtcttgaaaagaaaaagggatattcgtttagagctcaggctcaaactattattagaaagagcagcagcaataccatctcagaagacagtggacatggatcagaaaattgtcatgccttatctgcgcgatttcctgaggttggaactggtagtaatggtcagcaagagtttgatgagacagggaatcaaaaccagctagagaatttaaccctgagccagggaagctcaagtttgccagtcagcatggaggacaccacttctgatcatgacactgtgacactcgagaccgataccgagcagcaagcaagaggtgcctgtactcctggaaacagtcatgacgacaaggaacaatccatatgtgacaattctagtcaggtcatttccaagaatgctgagaagatatccctgttgggtcatgggcatcatggtaaacaagttgtggaacttttgttttctaatggtggagaggaatttgttaaccagttttgccaaaggtggaggcagatctttgttgaagctgttcacccccgttatttaccttctggctggaatattaaccacagtggacggcgggattttggtgacttcagtgtctacaagccaccaaggaaagatcctcaatctgcaactgcaagggattaggcttacgcgggtgtcatgctgtcgttggtaccctgaggttcaacttactttccagaattggttccattcccttaaacttgatcttgttgtacttgttccattcccttaaacctgatattgttgtacttgtatgtatctcaatctgtgtgtttgttcgagtaccttgaaataccaatttcatctcctatgtatttctttgagatgaactttgcatcagttttgttgagccgtttttttatacgtgaggatttagagtactaacaatttaagtccaagaaaaa

SEQ ID NO: 144443 - DNA, 2910 bp, Zea Mays
cgtcgcgatcgcgacatgcccggcgccgccaccctcagatcgcgcgtggccgtcgcggccgccgcgtgccttgcggtcttcgcagcggtggcgctgctccaccgcaagcgccgctggaaccgggcgccctcctcgtctcgtcgcctcggggtcgggggacgcccacgccgcgcttgcgaggaggaggagaagccgcaggaccggttcaagcgcgtcctcgcggacaactcctactccccgttcaaacacccgcgccgcaagagtgctcagttgggaagtgcagaaggcgaggcacccctgccaccgcctcaagaattgtcacaaaaaggtcatccatttgaggaggaaatcacatctttgctaaagaacccccctggttttcatagctttatgctgtgtgaccagtgcccagaaatgagtgctacatataattgggttcatacagaaactcaactggaacatttggcgagattattgggtgaggaaagagcttttgctgttgatacagagcaacatagcattcgatctttcctaggatatactgcactaatgcagatctctacccagaatgaagactatctgatagacacaatagcactgcacgatgtgatgggcattctacgaccagtgtttgccaattcttctatctgtaagatcttccatggagctgacaatgatattctttggcttcaaagggattttcatatttatgttgtgaatatgtttgatactgctaaggcatgtgaaattctattgaaaccacaaaaatcactggcatatttgcttgaagtatattgtgaagtgaccaccgacaagacaatgcagcgtgaagattggagactgcgtcctctgactccagaaatgatcgagtatgcacgcactgatgctcactatctgttatacattgcaaattgtttggcatcagagctccatgcaaaagcctatacttccagtgataaaatcaattttttcttcgaggctagtcatcgctcaaatatggtgtgcatgcaactgtattcaaaagaaattgaatcccctcctggagcttccagtgcaacatctattctctcacgaaatttgcaaactcatgggttcgactccaaaaagtctagtgaagtgaaggatcttgtttggaaattttgtgcatggagggacttaatggctcggatgcatgatgaaagcttacgatatgttctgccagaccaagctatagctgcccttgccgttagtcttccaaagggcccaacagaggtgtttgctgtcatagcagaaactgacctaagcatttcaagtatgtacccttccttgtcatcaccgtcacctcttgttgtggctcatgtcaaagaactctgttatctgctggatgacatcactaccagcatggacagcatctttaaaagtttactagagaagtataaagatccaagtggattatgtcgactatcagtttataattataaccttataacacacctaagtttgaagcaaacaagtatgttttccgttgctccaagtggaaagaagttgacagcactgcctaataaaaaggtttcacgggatttattcattaaaaagttttcctgcaagtccccggtatatcacaattgcaggatttatgctagtgatggaagactactttgctactgtgaccgcaaaaaactggaatggtacattcagcgtaatttggcgaaattgattgaaaatagtcctccagcaatcatgcttctctttgaacctaaaggtcgtccagaggatgaagataacgagttctatattcagagcaagaaaaatatttgtgtgggctgtggagaaaagagccattatattagatacagaataataccgtcatgctacaggatgcattttccagaacatttaaagagccatcgttcacatgatattgtacttctttgtgtagactgtcatgaaatagctcattcagcagctgagaaatacaagaggcgaatagcagaagaatttggaatacccctttttgtgcaaaagataatgaactcgggtgatataagtttgattaccaacacatcagtatctgaagataaattgaatggaacaggtgtctccccattgcagctgaggactgctgccatggctcttctacgtcatggatccactatgccattgaagagatgtgaagagctaatgcagattgtgaagtcatactatggtggtagagatgtgactcctgaagatctcgagatggcattacttgttggtatgagccctcatgagcgaaggcgtcttgaaaagaaaaagggatattcgtttagagctcaggctcaaactattattagaaagagcagcagcaataccatctcagaagacagtggacatggatcagaaaattgtcatgccttatctgcgcgatttcctgaggttggaactggtagtaatggtcagcaagagtttgatgagacagggaatcaaaaccagctagagaatttaaccctgagccagggaagctcaagtttgccagtcagcatggaggacaccacttctgatcatgacactgtgacactcgagaccgataccgagcagcaagcaagaggtgcctgtactcctggaaacagtcatgacgacaaggaacaatccatatgtgacaattctagtcaggtcatttccaagaatgctgagaagatatccctgttgggtcatgggcatcatggtaaacaagttgtggaacttttgttttctaatggtggagaggaatttgttaaccagttttgccaaaggtggaggcagatctttgttgaagctgttcacccccgttatttaccttctggctggaatattaaccacaggttgtttgcctttcatatatatcttctcttgtgcgctatgcatgctgattagttgcataattgcctgaacttcctggtgcttagaattggc

SEQ ID NO: 144444 - DNA, 1222 bp, Zea Mays
cgtcgcgatcgcgacatgcccggcgccgccaccctcagatcgcgcgtggccgtcgcggccgccgcgtgccttgcggtcttcgcagcggtggcgctgctccaccgcaagcgccgctggaaccgggcgccctcctcgtctcgtcgcctcggggtcgggggacgcccacgccgcgcttgcgaggaggaggagaagccgcaggaccggttcaagcgcgtcctcgcggacaactcctactccccgttcaaacacccgcgccgcaagagtgctcagttgggaagtgcagaaggcgaggcacccctgccaccgcctcaagaattgtcacaaaaaggtcatccatttgaggaggaaatcacatctttgctaaagaacccccctggttttcatagctttatgctgtgtgaccagtgcccagaaatgagtgctacatataattgggttcatacagaaactcaactggaacatttggcgagattattgggtgaggaaagagcttttgctgttgatacagagcaacatagcattcgatctttcctaggatatactgcactaatgcaggtaatttactgatctctacccagaatgaagactatctgatagacacaatagcactgcacgatgtgatgggcattctacgaccagtgtttgccaattcttctatctgtaagatcttccatggagctgacaatgatattctttggcttcaaagggattttcatatttatgttgtgaatatgtttgatactgctaaggcatgtgaaattctattgaaaccacaaaaatcactggcatatttgcttgaagtatattgtgaagtgaccaccgacaagacaatgcagcgtgaagattggagactgcgtcctctgactccagaaatgatcgagtatgcacgcactgatgctcactatctgttatacattgcaaattgtttggcatcagagctccatgcaaaagcctgtgatacttccagtgataaaatcaattttttcttcgaggctagtcatcgctcaaatatggtgtgcatgcaactgtattcaaaagaaattgaatcccctcctggagcttccagtgcaacatctattctctcacgaaatttgcaaactcatgggttcgactccaaaaagtctagtgaagtgaaggatcttgtttggaaattttgtgcatggagggacttaatggtcagtaaaaaactgttttccttagaatagctgcatccccttctgca

SEQ ID NO: 144445 - DNA, 2720 bp, Zea Mays
gtgacaatccagtagctcagagcctttgattcaacccttttcatcttttctgttctatggtatgcagattattaacgctggagaagctgcgagaaaataaaaatcatctctctaccacaacattgaagattagcggtgaaccaattgagaagctcttcttatggggccaagcctcttgtgtgtttactattggagaagagcagcaggtcctaacttttggtggttttgggggaccagggcgacatgcaaggagaaactattcccttctactcgatcacaaatctggtctgttgacagaaatgatctttaaagcatctccttcaccacggatggggcatacagttactgcagttgataataccacttatataattggaggtagaggtggcccttcagaaattcttgatgatgtctggattttgccaagtgttgggaatacatggtcaaaactggagtgttgtggagatctgttccgaccaaggcaccgacatgcagctgctgcagtagcttcaaaaatttatgtatttggcggactcagtaatgaaggcatatattcttgtatgaatgtattagacacaaaaaatatgcaatggagtgtacttgctgcttcaggcgaatggccatgtgctcgacattcacattctatggtctcatatggtacaaatctattcatgttcggaggtcatgatggccaacgggcactgaaggacttctacagttttgatacaacaaaacttaggtggaacaaggaaaacacaaatgggggaactccgtcacctagattttcacactgcatgttcatctacaaaaattatcttgggatacttggtggctgccctattacagaaaacaatcaagaagttacattgctgaacataaatcatcgagtctggttttgtgtttcggttccattgctgagccagtccctctgtgtccgtagttcatcggttgtcattaaagatgatcttgttattttaggtggtggtgcatcttgttatgcattcggaaccaaattcagtcaaccaatagttcttgatctgcattcagtggagtctatgtttaaatatgataggaacaaagatggcacagttcaaaggcgtgatgcaatatctgttgttgaattgtcaagagatgaacaaaatggcatccttgatcatgacacaaaattacaagatgcttgttcgggtagtttgacggactctagccctctggttcttcaactggggaagacatatgccaaattagcaaaggacattatgaaaaagtttggatggttggatctttctagaaaagttcgaataagtcatgataatggccatgttctttttcctattaacgaatctttctgtgccctaaatgctgaagagcatatcaataggaatcttgatgattcatgtacctttggggaatcattagtattttctgaaaagaagcttgtaggggacaacctatctcttcaggatgcattaatttttttttcatcttgcaatggttccgttatgaaagatgaactagccatcagccgaaagccttccaagtctcctcaaactatcatgaaagaacttgtatcttctctactggaaagtaaagggatgccctctcagttgttgcagcagcttccggctaggtgggagacacttggtgatatcgtcatacttccaaagacatgttttaagaatccattgtgggaatctgttagcgaggaactttggccactagttgccaagtcacttggtgcacaacgtcttgcacgccaaggtaaaatcatgccaaatggcacaagagatagtacactggaacttcttctgggtgataacggatgggttacccattatgaaaatggcatctgctattcacttgatgcaacaaaatgcatgttttcttctggtaatcgttcagagaaacttcgcatgggacagctaaactgcagagatgaggtggtcgtggatttgtttgctggaattggatattttgttcttccatttcttgtgaaggctaatgccaagctagtttatgcatgtgagtggaatccacatgctctggaggctcttcggcgcaatgttagtgacaacagagtggaggatcgatgtattatacttgaaggagataaccgggtgactgcacccaaaagtgttgctgatcgagtctgtcttggattgttaccctcaagtgaatgtagctgggccactgctgtcgaagctttaagggttggcgggggcgtgttgcatattcatgggaatgttaacgactctgatgagacacgctggttggacagtgttgttgaatccatcagtaatgtcgccaaaaatcatggactatcttggaacgtgtcagtggagcatgttgaacgtgtcaaatggtacgggccgcgtattcgccaccttgtagttgatgttacatgcaggcaaatctagcaaagcagatgcgttcacagaatctttgtgcactgtcaggccttggattcttggatagttggatgcatatatcattgcagattgtaatgctcaacagcttgcatcgtttgtgttttagtcttaagtgggttacagtactcttagtcatcatggagccctctgttgtgaccttgaaagcatgttcaggttcttgacgacagtttcgcaactgtattgctactgtaaagttgtgttcttggaccgagtgtatttatcttatgtatcttttgttttcttatataagatgctttattacgttgtttgaac

SEQ ID NO: 144446 - DNA, 3612 bp, Zea Mays
aaagcctaacccaaaccctagcacctctcgaaatctccccgcgaaagacagccttctggtcacatggatttcggtcgccggaaggcggcggcgctggctgcgctctcctcgccgacgccggacaggtccccgaagggcggtgtcgacgccccgatcgctccgctcctcgatgccctcaactcccacccggacctcttcactacctcctcctgctccggccgcgtctccgtcctcgcgcagcctccgccgccgcatgagggctggggcgagggcgcccccaagccgaagaagaaggcgcggggcggcgggtgggtatacgtatcgcacgaccctgccgatccggacgctgtggtggagcagctgttcggcgggagcgggtcgggagtggcgggggacgagctggtgttcaggttcgagccgatgatcgtggcggtggagtgcagagacgttgccgcagctgcggcgctcgtcgcagccgcgatcggtgcggggttccgggaatcaggtatcacaagcttgcagaaacgtgcaatggtagcaataagatgctcaattcgcatggaagtgccactggggcagattgacgaacttgttgtttctccggagtatgtccgctaccttgttagaattgccaacagtaaaatggaggcaaataaaaggcgaatgaatggatttttggatctcttgcaaactaagggtttgtcatacccatcagggttatcaaacaactctaatagtggtggtcagtctgatgattacgaggcttctgtgggtcctgaagttaagataccatcagatacaagtgccaaaacaaatgatgagtacttagttacaaaaatgagaaatggtggacgtagtcgtgatgatgatgatacaggttcaatagaagcacagtattttggaaaacaagactctgcatggagccagggtgtcaatcatggttctggtaatgctaaacgattattaacgctggagaagctgcgagaaaataaaaatcatctctctaccacaacattgaagattagcggtgaaccaattgagaagctcttcttatggggccaagcctcttgtgtgtttactattggagaagagcagcaggtcctaacttttggtggttttgggggaccagggcgacatgcaaggagaaactattcccttctactcgatcacaaatctggtctgttgacagaaatgatctttaaagcatctccttcaccacggatggggcatacagttactgcagttgataataccacttatataattggaggtagaggtggcccttcagaaattcttgatgatgtctggattttgccaagtgttgggaatacatggtcaaaactggagtgttgtggagatctgttccgaccaaggcaccgacatgcagctgctgcagtagcttcaaaaatttatgtatttggcggactcagtaatgaaggcatatattcttgtatgaatgtattagacacaaaaaatatgcaatggagtgtacttgctgcttcaggcgaatggccatgtgctcgacattcacattctatggtctcatatggtacaaatctattcatgttcggaggtcatgatggccaacgggcactgaaggacttctacagttttgatacaacaaaacttaggtggaacaaggaaaacacaaatgggggaactccgtcacctagattttcacactgcatgttcatctacaaaaattatcttgggatacttggtggctgccctattacagaaaacaatcaagaagttacattgctgaacataaatcatcgagtctggttttgtgtttcggttccattgctgagccagtccctctgtgtccgtagttcatcggttgtcattaaagatgatcttgttattttaggtggtggtgcatcttgttatgcattcggaaccaaattcagtcaaccaatagttcttgatctgcattcagtggagtctatgtttaaatatgataggaacaaagatggcacagttcaaaggcgtgatgcaatatctgttgttgaattgtcaagagatgaacaaaatggcatccttgatcatgacacaaaattacaagatgcttgttcgggtagtttgacggactctagccctctggttcttcaactggggaagacatatgccaaattagcaaaggacattatgaaaaagtttggatggttggatctttctagaaaagttcgaataagtcatgataatggccatgttctttttcctattaacgaatctttctgtgccctaaatgctgaagagcatatcaataggaatcttgatgattcatgtacctttggggaatcattagtattttctgaaaagaagcttgtaggggacaacctatctcttcaggatgcattaatttttttttcatcttgcaatggttccgttatgaaagatgaactagccatcagccgaaagccttccaagtctcctcaaactatcatgaaagaacttgtatcttctctactggaaagtaaagggatgccctctcagttgttgcagcagcttccggctaggtgggagacacttggtgatatcgtcatacttccaaagacatgttttaagaatccattgtgggaatctgttagcgaggaactttggccactagttgccaagtcacttggtgcacaacgtcttgcacgccaaggtaaaatcatgccaaatggcacaagagatagtacactggaacttcttctgggtgataacggatgggttacccattatgaaaatggcatctgctattcacttgatgcaacaaaatgcatgttttcttctggtaatcgttcagagaaacttcgcatgggacagctaaactgcagagatgaggtggtcgtggatttgtttgctggaattggatattttgttcttccatttcttgtgaaggctaatgccaagctagtttatgcatgtgagtggaatccacatgctctggaggctcttcggcgcaatgttagtgacaacagagtggaggatcgatgtattatacttgaaggagataaccgggtgactgcacccaaaagtgttgctgatcgagtctgtcttggattgttaccctcaagtgaatgtagctgggccactgctgtcgaagctttaagggttggcgggggcgtgttgcatattcatgggaatgttaacgactctgatgagacacgctggttggacagtgttgttgaatccatcagtaatgtcgccaaaaatcatggactatcttggaacgtgtcagtggagcatgttgaacgtgtcaaatggtacgggccgcgtattcgccaccttgtagttgatgttacatgcaggcaaatctagcaaagcagatgcgttcacagaatctttgtgcactgtcaggccttggattcttggatagttggatgcatatatcattgcagattgtaatgctcaacagcttgcatcgtttgtgttttagtcttaagtgggttacagtactcttagtcatcatggagccctctgttgtgaccttgaaagcatgttcaggttcttgacgacagtttcgcaactgtattgctactgtaaagttgtgttcttggaccgagtgtatttatcttatgtatcttttgttttcttatataagatgctttattacgttgtttgaac

SEQ ID NO: 144447 - DNA, 1031 bp, Zea Mays
aaagcctaacccaaaccctagcacctctcgaaatctccccgcgaaagacagccttctggtcacatggatttcggtcgccggaaggcggcggcgctggctgcgctctcctcgccgacgccggacaggtccccgaagggcggtgtcgacgccccgatcgctccgctcctcgatgccctcaactcccacccggacctcttcactacctcctcctgctccggccgcgtctccgtcctcgcgcagcctccgccgccgcatgagggctggggcgagggcgcccccaagccgaagaagaaggcgcggggcggcgggtgggtatacgtatcgcacgaccctgccgatccggacgctgtggtggagcagctgttcggcgggagcgggtcgggagtggcgggggacgagctggtgttcaggttcgagccgatgatcgtggcggtggagtgcagagacgttgccgcagctgcggcgctcgtcgcagccgcgatcggtgcggggttccgggaatcaggtatcacaagcttgcagaaacgtgcaatggtagcaataagatgctcaattcgcatggaagtgccactggggcagattgacgaacttgttgtttctccggagtatgtccgctaccttgttagaattgccaacagtaaaatggaggcaaataaaaggcgaatgaatggatttttggatctcttgcaaactaagggtttgtcatacccatcagggttatcaaacaactctaatagtggtggtcagtctgatgattacgaggcttctgtgggtcctgaagttaagataccatcagatacaagtgccaaaacaaatgatgagtacttagttacaaaaatgagaaatggtggacgtagtcgtgatgatgatgatacaggttcaatagaagcacagtattttggaaaacaagactctgcatggagccagggtgtcaatcatggttctgatgggatgaagggcaagcctagtgcagtggtgagagctgtctcactgaggcactaggtgacaggttcaaagcagcctctccgcat

SEQ ID NO: 144448 - DNA, 2072 bp, Zea Mays
ttaggcgagggtttctccattatagaaaagctgggcatagccaacactctaaaatgaacatgacgactccattacacggttcgaaccacgattactgtcgttgataccggcgccgtcccaagcgccgtgagttctccatcgccatcgagttttcccttctctcctcctcgcagatatctcccttctctctcgctctctcgcaccagagccgcaccctcgcaccagagagcaggtagaccatgtccttgtacttccccgtcgcatgacgtggtcgtcgagcagcgacgcggcggaggcggagggcggggaggagaaatttgccattacgcatggcgccgtcgttgtaggtgcggagcagccccgacagggaggagaaatttgccattacggcgtgggcgggctcgcctaaccacgacatcgccttcgactcctcctgggggctcctcgacgacctagatatactcgtcaagcgcctccgctcaaagcaggtgcggaagggctccatcgacgggagcggcggcgccggcaacagcaacttcgactccttctccgaggccgggtggtccagggagatctccggcgcggcggattcggcatccaccagcgccccgtgggacgagacgagccgtgactacctcaccttcgtcaaggagtaccgagaagccgccatattgtgcccatctcatgccagggcactcaagctcctggggagcgctctctttggcgttggggagtaccgagctgctgagaaggcactggaggaggccatcttcctgaaggaagactatgctgatgcgcactgtgaccttgggtcggccctgcatgcagtaggggaggatgatcgtgctatccaggagtttcagacagcaattgatctcaaacctggccatgttgatgccttatacaatcttggtggattgaacatggatgctggccgcttcgtacgggctgcagagatgtatactcgtgtgctgagcatccgaccaaaccattggcgtgcacagctaaacaaggcggtggctttgcttgggcagggtgaatctgaggaggctaagaaggcactcaaggaggcgtttaagatgacacagagggtgaaagtgtatgatgctatctcacatttgaagacattgcaaaagaaaaagccaaagccttccaaaggaaaaaatgatggtcaaggggagcagacttatgttaatgtggaggcatccaagttcaagagggttggcaggaagactaccttgcggcaggatttggccaatgctctagatataagggccttcgagaggatgacgaagctaggccactgcgatgtggagcttcttagaaaagagatgaatgagactgatgtccccgtatcttactcagacactggcatccctgagaagtcaatacgcaaagcagctcttgaggttattctccgcaggctcctctcttttctcaagccaaacacctttcaggtgccatcaaggcaatcaacgaaagaattctctctgtccttgatgctcctggttctggtcgtgttgatctgggtatgttcttcgccatcattgctccaatctgttcaggccctgtggataggcgcaagcgtatcgtctttgatgcacttctttggcgtcatacacggaattattagagatgttcaatgacccggattggggatttgggatcctgagcactctggtgaagctcgaagagggtgaccacatacgccatggtagccacacatcccagtcccccgagctcgtagtagtcgctgccaccgtgacgggctccgctgcgggcgccgaggacgcatggcgatgacggtcgtccttggcagacgcggaagcggaagtcgcggaggaagaggagtccccgtcgccgccgccgaggagaccacagaggatggcgaagagcacgaggcagaggagaccacaacggaaatatgacggcgtgagtttgagatcgtcgttaacggaaatatgacggcgtgagtttgagatcgtcgttacttgttaatagagttgtcatgttcattttagagtgttggctatacccagcttttctataacggagaaaccctccgagcctct

SEQ ID NO: 144449 - DNA, 1253 bp, Zea Mays
aaaccttaaccaaatcccccctcccctcgcttccacaccttccgcctcgtctccctctctctctgtctctctctctcacacacacacacacacgcatcaggtcgggacgggaggggaggtctcgtgcgcgcccggctttcctctcctctcctcgccgcacgacgcgcgcgcggtcccggtcgccgatggccaaggcacgcaggccgccgttcgccgccgccgagcggttcctcggcttcccccgcggcgggccctcgccgggggccgtggcgccggcgcccgccgccctcgacgacctgccggacctcgccgaggccgacgtctggtactcggctgccgacccgggtagcccgtatcccgcggcgtcccgacatgcggcggcggagggcaggagcgcaggccagcgcggcccgcggcgcggcgtgcagggcggcctgagccgggcgttcggggacgggtccgggtccgggtccgggcggcaggcggcggcgtcggcgcccgtcgaggtggccgcgtggccggcccgcttctccgtgccggacgcggagccgacgctgctgttcgagatggagatgggggacgacgacgacgacaagggggagggggacgccgggtgggtgcctccgcacgtgtaccttgcgcggcgccaggcgcgggcgtcggtggtggagggcgccggccggacgctcaagggccgggacatgtcgcgggtgcgcgacgccgtctggagccggacgggcttcgacggatagcgaatgagcaagcgagcctggacagattttgatctgcttttgctccctgccccccctcttcttcttcattgcctgtcagatttctcttccccctctttgttttttcttctcccttctggatgaaatggaaattttgtaacaaggccggtgtgcttgttttggcctccgatccaccggcgattttagtactggaatcaatggcaaagaaaggaaatgagctcagctcagctgctgtgaaggaaatgtgaggtgtcatgtgtagcagtatcagagtagtatagctcaatacaggtgcatgtcgattggttgaatagtaatctgcttgctgattggggcagttggatactgtggccttgtggctggctccaactcaaattggttggcctgcctgctgaggctgatgatcctcttggctactcattgagtataattcgctactagtaccaggggcaaaaataaacaaaaaatgggccatgtgttgtgatccagaactggattttt

SEQ ID NO: 144450 - DNA, 270 bp, Zea Mays
atgagcctcctgaggttcctgaggtgcctctgcacggcgcggcgggcgcgcgccctcacgccacggatggcgagcctgagcttcttcagccggacgccgacccttgcctgcttcaccctcaccagcgccggtggcctagctactcctagaccttaccgtaccgccctcgacgacgacgacggcgtcggatcgttgagcaccttgtggatcaggaactgcgcccggacgtgccgcgcctcctctgcgtccttcttgtccagcctgtcgtag

SEQ ID NO: 144451 - DNA, 844 bp, Zea Mays
ggacatctgaaacaagcaaattaacaatctgacgaagacattaatatcaacagagcacacttcaacagtcaagatctcaacgacaaacagaagaaacatccggagtgccatcatcgattaacactggtccccaagaaagtctaaccactcctatgcgactatatgaccttcatatctatataggatgtctcattgcagcgccccgtgactccaccatcactctaatccgatagcactccagaggtgtgcaagcaatcgtcactgcaaatgaaaggcaacaaaattactcatcagcctaataaacgtcccaacatagaagactcataacatgacactcaacatcaacatagacttttagtcccaaacaagttggggtaggatagagttgaaacccaacaagatgtcaccaaaagaagaaagagagagaaaggggaggggaaaagattttgagagcactaaaagtaaaaaggcctaaatcacggttcaggcacgtggatagcttatttccaagcacttctatactgcatggctcaaattatcttcagaaaatcagcaattggctggttcaggatagtaagatttttaacagtcgatttcctaaatttgaactatggaaagatagtaagatttaagcaatggggattgtccgtgccctacgtgctgtggtggtggaggctgctgcagctgctgttcctgtgttggctgctgctgctcatagttaccacaaccagagtatccgtagtagttttgcatgcttgggtcttgtgcactggaagcaccatagccataaccttcataacccggctgttggtatccataatagctgttcccattatactggttg

SEQ ID NO: 144452 - DNA, 999 bp, Zea Mays
atggaaacaacttggctctggcaaaggcgatggtagttgtggttcgcggcgacggcgtcgactccctcctcgccaagaccacgcagggccacaccgacgtcctcctcctcgactcgaacactctggcctgtgctataactcttaatcctcttcgtcaagaacccatccttactcccaagaaggacctccatccctgcaggctccccagcatataagtccatggcagtgaagagatattgagctaccataactatgtcttgatgaccacatatccattggagcatgttgaactgactgccaagaccaagagagataaatgcactacaagttgtgcatgtgtggattcagtaagcatcgacgccatactcgagcaacacctggacgttgttggcgtggccttggccgacgacgaggtcgagcagcgtgcagtcagacaggactatggcgtctgcagcacatcactcgggctctctgtggttgagcacctccttgagctcctcgatcgcgctgtcctcgacaacaagccgtgtggccacagatgctcctacaaagctcgccctgattccattgtccacaaacaactgcttcatcctcgttgagaaccactccaggttgactgagcccagcgttgtcatgggttccttcgccacgacaccggctgcgaccacgttgtgcagcagggacacctcctcacctcgatttcctcctcgtgacatcatcaccaactactctcccaccatcctttgcatccaacaaggtaactggtggtgatataaatcatgagattctagaatatggctctattatactgaattgattggttggaaaggacaggtaactacttaattcgtgtgatttcttgttagatgtaaatagctactgattgcaactgaaatgtgtcgatttatgattgcaaccaaaatatgtcaatttatctttatagttagtattattgtaaaggtttggaacaattttaaacaactatctcatttaaaaaga

SEQ ID NO: 144453 - DNA, 417 bp, Zea Mays
atgaagtcgaggccgagacgaaccaaaagcgatgccttcaggaggggaatgacttctgggacaccaccatcgcatgtccgagatggaccgggttgtcacccatggatgacagagctggagaatgcgacgcccccatcaggggaacgacgctcacgggcgtcatcgtcgccaaggatttcgcccaagaagtcctccaacacatcgtcaggccaggaccctgggtcaaagcatcgacagcaccgcattgacatcccacacaaaacccttccaaaggggctacgacgcgccgacttccgtagcagccgcaaagctgcgtcgtccaccccccccttcggctgggcatacggaaccaggcaacaccataccgcgagcgacacactgtcgcgcgtcagagccggagccagccttacaccatga

SEQ ID NO: 144454 - DNA, 4060 bp, Zea Mays
atgagccgccgcgagccggacacctcccccttctgcgacctctccaacctccgcaccccgagacccaaccccaaaaccgtacctccctcgcctcagttcttcaccgcctccaaatccgccctccaggctcccactccgacgtcactccgccgccggaggcctggcgacggcgtccctaccccgacgcccctcggccgccgcctccacgccctcgaggtcgaccagtcgcgctccgcccgccgcgccgagtccggccgtgagcgcgccctccgtaccttttccgcctccgcctcgtcatggctatccctcctcctacgcgacccctccgcctgcgggtgcttcccagggttcaccggttccgccgcggccgcgcagccctgggctacggggaaacgcggcgcgctcgatggagaccgggcgcgtggggggcgcagcccgaagaggtgccgcggtggtggtgatcgcggcggagagaggagcaaggagatgacgccggcgatggtggccgcgttaagggaatctcttaaggatgcgtgcagcctggaggatgtcacggagaggatggagaaacacatgagtaagggcgcgtgtgaggaggtgctctttatgatgtttcaaatttgtaagaacatcgatgaaggcagattgaagatgaaagcacggtgcccccttgttactgaccttaggctcaaagagaaagcaactagggttttcatgtcctacaatccatattggctcaggattggcttgcatattgttctcggtggtgattccttgctgcagactggacaaggaaaacgggacaaggaggttcattttctaaaactaattttggagaagcatatgctttctcaaatcatgactgcaaaatcatgtggtaacaagaagctggtagaagagcaccatgtacaaggttacagtgatgtgctgggcaatattatattgaaaagaatttttcttcttgttgttgcactagacagaaccaaaatagaaagtactcttcctctcgaagctggaatcgatggccttgatggtggatcccctcttttattttgtcaccaaagtcaaataaaatctagtcgtcaaatcattcaagagtctttgagggagaccatgcatggagaaggtgacattctggtacacctcacaactatgggatataaactaaattatcaacagcctgctttgtcagaatatgatttcacaatgaggaatttatttgaagatctccaagatggcataattctttgtagagttgttcagctgctcctcgcagatgcatcaatcatttcgaaagtaattgttccctcagatacagacaagaagaggcgaagtaactgcaccactgctatacaatatatcaaacaagctcgggttccattatctgattctgatggagtcacaatttccgcggaagacatcgctgctggggataaggagcttattctttcactgctgtggaatatgttcatccatatgcagctaccgttgttagcaagcgcaacctcgctagctcgtgaactaaccaagctaaacgtacatgtaacggaacaacaaatatctgagaacaagccacacatgggtttgctttacaattgggttcaggcaatatgctcaaagattggcatgactgttgaaagttcatctcagttagacagaagagcactgaactgtttcatcaactattatttgaatattgatatttcccccttcaaggaaacaccaactggatgccgaaaggaattgttcacctgtcaccaacttgatactatatcagatatcgctggctggccatccagcgagatggggaaagatattccagctagtggcatcctagctgatggtgtattatttgatgagaggagtaccattcttttgctagcattcctatcttcgcatctgactaatgatgaaagattggatcaactaaagaatttgatcaacatgaggttgtacaagagtgcggatactaagattgcagcaagacgtatatctcgaggaaagattgatataaagtatcatccatctcagacagataaaaatgatggtgcatgcaccaaccaggcaactccactacagtttagcggcaatcaaagcaactttataacttctaccactcagctgtgcaaaagtgagcatgactgtcggtcgtgtgtggttgagaaatccaattcagtttccgtcagtaagcttgtgagtgcggatgacattcagtgcagcagcagtatttgtttccctgtctgcaaggaactagtggctgctcaaacgatacaaagtgcatacagaaggtttttgaacaacagaaacaggataactggtgcaattaaaatccagagccactggcgatgctattcagtacgcaagtgtttcatgaaggaaattcaggctattgtaggaatccaaacatcaataagagtattcttgtgctaccaagcttttcaacgccaccgacttgctgcagtactgattcagcgagttgtcagaggatggctggctagaaagagactgttaggttcctcttcactgcgaacctacacaagactttgtgtagtcgaccaaagtcaaaagagaaaatgttatcaaagccttgagttgaacattgtgctagactctgtcataaggctacaaagatgctggaggaagttcctgctgcgtcagtctgtcaaaacatatgtgatctcaattcagtcttttgtccgtggctggttggcacggaagcaactaaaccaaactttccgttgcatcaacatcattcaaagatggtggcgaaaggttcttcaaacgaggaagcgagctgtgattgtcattcagactcgtttccgtggttgggttgcacgacaagatgctattagaactagaaactctatctgtaacatacagagatggtggagaaaggttttgttccttaaattgaggaagcaagcggcgttagttatacaggctcatttccgtggttggatagcacgacaagttgcttttagaactagaaaaagtattactataatacagtcctatgtcaaagcctaccttgtgaggaaggcttcgaagcaagaagttgcacatataagatctagactgcagaagtcatcttcacaggttgatgatagtatgcgcctgatcaacagactggtgtctgcattgtcacaactccatcgctgtcggagcatacacagcattcgtcaaacttgtgcaacattgagtactgctacagagtattccaagaaatgctgcgagaagctggtcgctgctggtgctgtagatatattgctaaagcaaatatatttgctgaaccgtgggattgctgaccaggaggtcttgaagcaagtgttccttactctcaggaacattgctcgatattcaaatcttagacaggtgttagccagcactgcagaatctgttgaaatcatcttccaggaattactgaggaacaaagcagacggattcttcatcgcgtctgatattctaaaaagcctatgtgaatccaaggaaggccgtgaaaccgtccaagcgctgagtcacctcatcaaaaggctgcgcaatctggtgcatgacctggaaaagaaggtagagcttgataagaggaatgggcgcaccggagccgtgaaggcgaccaacctgcggcggcttcgggaggccgccacactctatcatatcctcaccagtggtacttaacgcgtcggcagcatagctagaaaggctaatctgacgttttgttgtacaataatttagtctaagaaggttttcatgtaactggaggtgactacggtgcaattgtcgaaaaccttcctaggtaaccaggatcttctaagttctgttgctgcagttggttttgtgtggtaggtgtgagaatcatcggcttgatgtattggattacctcttataaagagtgaagtcgctgagttaaccgtcctcacgtgtcttggattaaccgccttttatgttctaacaaatcatcagctcttgatgtgattgttagtatcacataccagtaccaaacagaaaaacgagtcatcctattcattaacttgcagaaatggattttctgaaatagttttttttt

SEQ ID NO: 144455 - DNA, 1899 bp, Zea Mays
agccatctgccaaacagtgagtgggcacacacggccacctctgcgatctcagatcccatcgctacagagaggagaagcacactgcacgcagcgcaccgagtttagcagctaatcctagacatggaccacctgccgctgacctcgcccgccgcgccagccgttgcggcgtcgctgctcccgtcgcagggcggcgggagggtgctcgacgcgtacaagacggcgctggccacggcggcctcggccgcggcgtacgccgtgatggcgcgaagcatggcgcgggagctgctgcccgacgagctgcgcgccgcggcgcggtggtgcgcggttttcgcgcgcgcccggttcggccgcggcgagaaggagcgccacaccatcgtcatccggcaccagttcgacacgggctacagcgagaaccacctcttcgacgcggcgcgcgcgtacgtggccacccggatcgacccgcgcgccatgcgccggctctgcctcgcgcgctcccgcaccaaggagcccgacggcagcggcaggtggaacacgctcctgtgcatggagcccgggggctccaccgtcgacgtcttcggcggcgtcgagtttacgtggaactgcgtcgagaccggcggcgacgacaagaagggcaagggcggcggcgggcggccccgcgagtccttggaagtgagcttcgacgccgagcacaccgagacggcgttggagcggtacattcccttcgtcatgtccacggcggagcagctgcagctgcgggaccgcgcgcttaggatcttcatgaacgaggggcgctcgtggcacggcatcaaccaccaccacccggccacgttcgatacgctcgccatggacccggtgctcaagcagtccgtcgtcgacgacctcgacaggttcctgaagcgcagggactactaccgccgcatcggcaaggcgtggaagcgcggttacctgctctatggcccgcccggcaccggcaaatccagcctcgtcgccgccatggccaactacctccgcttcaacctctacgacctcgacctctcggaggtgcgcctcaactcggcgctgcagaagctgctcatccacatgcccaacaagtcagtgctcgtcatcgaggacatcgactgctgcttcgacaacgctgccgcgtccaggaacggcctggacatggaccccaactactcatcgggatcgggatcgggatcggattcctcggacgaaaactgggcccagccgcgagtcgctcccccgaaggccaggggcatcaccctgtccggcctgctcaacttcatcgatgggctgtggtccacgtgcggcgaggagcgcattatcgtcttcaccaccaactacaaggaccgcctggactcggcgctgctgcggccgggccgcatggacatgcacgtctacatgggctactgcgggtgggaggccttcaaaactctggccagaaactacttcctcgttgacgaccacaagatgttcccggagatacaagaacttctctcggcggtggaggtgacgccggccgaggtctccgagatgctgctgcggagcgaaaacggtgacgtggccctcgggattcttgcagagttcctccgggagaagagacggagggggagaaaagaaacaaaggaggagaaggacgcaacagaggacaaggatgaggaggaggtagcagagaaagctgcgtagcatagtactgtattctttaggtttcctccatggatcatttttatttctggagaaaggaatcgaaataggtcacgggaataaatagctaggccataggaacaatttattaggccttctcgtcggtactgttatcctatcgctcggttgctgcatgtttttgctgcacgtcagctcatctgtttctgattattcactagtcactactgcagcgtc

SEQ ID NO: 144456 - DNA, 1882 bp, Zea Mays
acatacacaaagcataacagcctgctgctgtgcagtgtgcaccaccaacatctgacatctccaatggattcttctcttgtcctagcgcttatcgccgtcgccttgcccgtgctcctccatctcctaaagaggggaaagacgccatggcggccggccgcggccaagctgccgccgggctcccttggcctgccggtgatcggccagagcatcggtcttctccgcgccatgcgcgccaacactgccgagcggtggatcctggaccggatacaccggtacggtccggtgtccaagctgtcgctgttcggcaggccgacggtgctcgtcgcggggtcggcggccaacaggttcatcttcttcagcagcgccttagcgatgcagcagcctcggtcagtgcagcggatcctgggggacaagagcatcctggagctcacgggcgccgaccacaagcggatccgcggcgcgctggtcgagttcctcaagccggacatgctgaggctgtacgtgggcaagatcgacggcgaggttcggcgccacctcgacgagtgctgggccggccgctgcaccgtcacggtgatgccgcacatgaagaggctcacgttcgacatcatctccctgctgctcttcggcctcgagcggagcccgctccaggacgccctcgcgggcgacttcgcccgcgtcatggatggcatatgggccgtcccggtgaacctgccgttcacggcgttcagccggagcctcagggccagcgccagggctcgccggctgatcgcggggatcgcgcgggagaccagggccaagctggaaaggggcgaggcctcccgtagcagcgacctcatcgcgtgcctgctcagtctgaccgaccacagcggcgcgcggctgctgagcgaggaggagatcgtggacaactccatggtggccctcgtcgccggtcacgacacgtcgtcaattctcatgacgttcatggtccgccacctcgccaacgacccggacaccctcgccgccatggtccaagagcacgacgagatcgcaaagaacaagggcgacggccagaccctggactgggaggacctggcgaagatgaagtacacgtggcgcgtcgcgctggagacccttcgcttggtgcctcccatcttcggcaacttccggcgagcgatgcaggacatcgagttcgacggctacctcatcccaaaaggatggcaggtgttctgggcggcgagcgtgacgcacatggacacgggcatcttccacgagccggcaaagttcgacccgtcccggttcgagaaccagtcggcggcatcggcgccgccgtgctcgttcgtcgcgttcggcgggggtccgaggatctgcgtcggcatggagttcgccaggatcgagacgctggtgacgatgcattaccttgtcaggcggtttaggtggaagctctgctgcaagaacgataccttcgccagggaccccatgccatcgccgctgcacggactgcccatagaacttgagcagaaggcatcgccatgatcgtgacaaaatttggcggcagatatacatggcagtgctttttaaggatcagggagtggggtggggaggagattagcccctactggaaaataaattaacacgtagaaaaattagctctactgcataaaagaaaaaaacaaatcatgaaaatatatttcataatgcatcaaatgatattaagagcatatataatgtgtgttttgagctgtgtcttcagacgcgtctaaggtgataaatgtaaaaaaaatctaagacatgtctcttgatgaagttattatgtcttgtctctatgctcgagactgaggactgactaattagtcaatttaatttattgaataattgattggtgtaatgaatatagtaagacaca

SEQ ID NO: 144457 - DNA, 108 bp, Zea Mays
agccattcttgcctcagattccgagaagctacctacggatcaagtactatttaaattttcccatctcatacgtaccgttctttaattaatctgaaatccattcgatgc

SEQ ID NO: 144458 - DNA, 445 bp, Zea Mays
gtttggatccggcgccctcggcgctccctggataaatagatgtcagccctgtttcttccccttttgcgcacccatctgccaacgtccaggaacctcgatcaaaggaaaccctgagagctagtcaatcggagggagaagagagggactccgcgacgccaccaggggtgaactcatggctgcgtgcccgctcggggaaactgagggggtcaggaagtgtcatcggggtccgctggtcacgtctgcggtcaaacggcggttggagaagcgcgatgtcactaggaattcctcgatggagaccctctccgttgcaacgtcgcgggcagccttgcgcaacctaccgcgcttggtaatggccgccgccacggaccggggcgccaccgcgagcaccgtggtgtccggtgatagcgatgggggtcaggcgtcgtctgatcgttgatcaacgggt

SEQ ID NO: 144459 - DNA, 655 bp, Zea Mays
aggtgaaatcaatgcattactataatatatgtatgccctgacatggttgattaagctggatatatggttgtatctaatgtataaacatgaaacattagacaaataacagttcgcaaatataagccttggcacatattatttcctcatttgtactcaaatgtctggcattgtctggttttcatttctgagctagacatcttaccaaaatatatctcaatgtgttgcagttgactgacctggtaatggaaaacggctctggttatctcggaatacctctggatgcaaagcgggacctcttactgggacttcatgaggctaccgtgattgagctttctgatgattgggagggagcaacacccgtacagataatgaagcagctagcttcatcctggcgcatcgacctgcagcaacttatcaattagggttacattgattgtcgatatatgggttaatttgaatatttgaattgttcgtttccctctggttcttgtctggtctttagctattagtattaggaatattatattgggtggggtggaagtggcactgtgttgaaatggattggttgtattggaaaatatggtattgatgttgtctcaccttcattgaggctagggagcaacgaagaaaaattctaggttgggttttagatctc

SEQ ID NO: 144460 - DNA, 1041 bp, Zea Mays
tcttctggtatgaaaacccatcttggagaccagattctgaatcatgggaacaaatgcttattctggttcgagaagcggtatgaatgtgaggagaggattagattctgtttcatcagacaataggatggcaagaaatgaacggagtaatgatcaagcgggtcctcggagaggttgggacaaagggcagggaccctttaggttcggtgagggtccttctgcccgaagtgcatggcgagcatcaaaagatgaagcaacactggaggctattagagtggctggtgaagataatggaaattcgagggccgctgcaagagttgctattcctgaactggatggagaagctttgaatgatggcaaccaaggggacgaaagaggcccactttgggaggcctggactcgtgcgatggatgctgttcatcttgatgatatggactctgcttatgctgaggttctttcaactggtgatgctgaattacttgtaaagttgatggaacaaacgggaccgattattgatcaactttcaaatgaggttgcaaatgaagtcctacatgcagtgggacagtttctcgtggaagaaagcttctatgatgtagcattaaactggcttcagcagttgactgacctggtaatggaaaacggctctggttatctcggaatacctctggatgcaaagcgggacctcttactgggacttcatgaggctaccgtgattgagctttctgatgattgggagggagcaacacccgtacagataatgaagcagctagcttcatcctggcgcatcgacctgcagcaacttatcaattagggttacattgattgtcgatatatgggttaatttgaatatttgaattgttcgtttccctctggttcttgtctggtctttagctattagtattaggaatattatattgggtggggtggaagtggcactgtgttgaaatggattggttgtattggaaaatatggtattgatgttgtctcaccttcattgaggctagggagcaacgaagaaaaattctaggttgggttttagatctc

SEQ ID NO: 144461 - DNA, 2970 bp, Zea Mays
gacgaactggatttagactctggttgatatgttgtttggataaccaccagagagctcatcattatttgcttccttttgttaggtgcaacgtctatctctgtttgcagttggcaatttggctttctgcttggagactcggcgcaccctcatgcattctgaaagtttgcgtgaccttttaatccgtttaactatttcacaagaacgtcgtgtcagcaaagcagctgcacgtgctttggcaatcctaggggagaatgagaacttgcgtcgagcaattagaggaaggccagttgcaaagaagggtctacgcattctatcaatggatggtggtggcatgaagggccttgcaacagttcaaatgcttaaacagatagagcaaggaactgggaaacgcatacatgaaatgtttgatctcatatgtggtacgtccactggtggcatgcttgcaatggctcttgggatcaagcagatgactttggatcagtgtgaagaaatatacacaaaacttggaaaacttgtatttgctgaacctatcccaaaggatgaagctgctacgtggaaggagaagcttgatcaacttttcaaaagttcgtcacaaagttttagagtggttgtacatgggtccaagcacagcgcagatcaattcgagaggttactaaaggaaatgtgtgccgatgaagatggtgaccttctaattgaatctgctgtaaaaggcattccaaaggtttttgctgtatccactttagtcagtgtcatgcctgctcaaccgtatatattccgaaactatcagtatcctcctggcactctggaggtatcaccaggaatggcagaaagtccatcaattagtgcaattggtactgctgtttctggtgcgccagttggtattaaacgtggtgccttcatggggagctgcaagcatcgtgtgtgggaagcgataagagcatcatctgcagcaccatattatttggatgatttctctgttgatgccaatcgttggcaagatggagctattgtagccaacaatcctacgatctttgccattagagaagcacaacttttgtggccagatacacgaatagattgtctagtttcgataggatgtggctcagttccaactaagagtcgtagaggtggatggcgctacttggacacagggcaagtgttaatagaaagtgcatgctcagtggagagagttgaagaaactttggatacactgataccaatgcttcctgaaatgcaatatttccgctttaatccagtggatgaacgatgtggtatggaattagatgaaactgatcctgctatctggcttaagttggaagctgcaactgatgagtacattcagaagaattttctggctttcaagaatctttgtgagcttctggtcccaaggtaccaagaggaagaaaagtcatctgatatttacaaatccctttcattttcaaggctgacatcactaaatcaaggtttcagcgaaagtaatcctaccttaggatggaggcgtgtggttttacttgtcgaggcttcctttagtcctgatttcgggaagaaaataaatcatgcacgctcccttgaatctttctgctcccagaatggtattaggttagctctaatgaatagtgcttctgggtttgggaaaccagccactgcacttcctaccccgataacttctcccttgtttactggaagtttcccatctagtccacttctatatagtccagatggcactcaacggatcggtcgaattgacctagttccaccacttagtttggatggccacccaactacaaagtcctcaccaccaacatcaccattgaagtcaaggcagccatcagcacatgttcggtcattgtatgataaactgcagaatatgcctcaagttggtgtaatacacctggctcttcaaaatgattcaaccggttcagtattgagttggcagaatgatgtatttgtggttgctgaacccggagaacttgcagacagatttctgcaatctgtcaaaactagcttgtcaaccttgttgcgtgggcgtaatagaaagggtgcatattccttgtccaagatttcatgtttatctgagctggttgctgaatgtccatcttttgaaatcggtgggatacaccaccgctatataggtcgacaaacacaagtaatggaagataaccaagaaattggcgcatatatgtttaggaggacagtgcctgctgttcacatggcacctgaagatgttcgatggatggttggagcatggagggagagaatcattgtatgcagcggtaagtatggcctcgctcatggcctggtgaaggcattcatggattgtggcgccaaagcagtcatctcatcgtccatcgagcctccggattcccagacaatagtctatcatgggatggatgtcaatggaagcctagagaatgggaagtttgtcatcggggatgaagaagccgatgaatcggaacctgaacctgttagccctgtaagtgactgggaggacagcgacgtggagaaaggtggcaaccatgacatggatgatgaggagtacctggctcagttcatgtgcctgatgtacgataaattgttccgtgagggtgtgactgtggatacagctctgcagcaagctctccgctcgcatcccaagttaaagtacagctgccacttacctcacgttttgtagttagggacattgacaaaccatacaggagtatagcaaaacgggcatggacaacaggaaatgaataaggattgggtggattcatagtggggttatagaggtttatatcgtgttcgttgtgcaggcgtagtgacagagggtacccccttactgaatctttgggcgagaaagcctatgtaaacctgtgtgctcatgagcagagtagttaagctgacgaataaaagcatgatgaagggcattgtaatctggatgtgcatttttgtttcagctaggagaatggacattcgcaatgttttggtgtc

SEQ ID NO: 144462 - DNA, 4674 bp, Zea Mays
gcgcaggcgcaaacgcaaacgcctcccttcttccctccgttcgttccatcgtcgctccctactccggggcgccctccctcggtttcttcctcgtctcgagctctcgtctagacgtcactgtcctcgcaccgctcccttctccggcatccgagccgtagccctgccctccgcatccacaatttgatgcggagggctcggccgccatgtcgtggggcctcggctggaaacgcagctccgagatcttccacctcacgctcgactatggggactacgacgacaacgacgaccatcagccctcgtccccgtcccctccggcgtcctcttccccttccgcctcggcatcgtcgaccccggtatcctcctcctcgcccaccgccacccgcaacggcgacgtcggcttccgcatcgagctcgaatggtcggcgggggacgacgaggatcaggtcgcgctccgcctccagtcccagctcatggtcgcgctgcccccgccccacgacgccgtctccgtcgacctgatcccgagagacgacggggaggaggaagtggtgcagatcgagatgcgtgtggtcaggaggcgggaggcactgcggtccgtgcgcgtgtcgcgggctcccggatccgcgctgggcagcggcgatggcgcgggggtgctcgcgcgcctcatcagatccaacctcgcgcccgcgcctgccgtggatggccccacagccgccgcgggcgtgccagtgctcgctgatcactggcggcccgtcgccatgctcagcctctgcaactgcggaatgtcgtgtagagattacaggaaatgaggccatgctacaaaagggtcgtaagatgacccttatgatggtcaaatgaatcctgctgtgagcccattacttaaattgcacatacatgtacttccagttgagttaactcgccttccacttctcgagaagctatatcttgacaacaataaattgtcagttttgccccctgaagttggtgctttgaagaatatggaagtgctgtcagttaacaacaacatgctagtttctgtccctgtagaactgcggcaatgtgttatgctggaggaattatcattagaacataacaagcttgtccgtccactattggatttcaggttatttaatgtttaattgtggagttctttgttacactgatgtcttccaattagtgccatttcctcattattaattctctgtttcccacaggtcaatgcccaagctccgaattttgcgtttgtttggaaatcctctagagtttcttccagaaattttgccactgcataacctcaggcatctcacacttgcaaatattagaattgaagcagtggaaagtcttaaatctgtcaatgtgcaaatagagactgagaatagttcctacttcatagcggccaggcacaaacttggtgcctttttttctcttgttttccgtttctcttcttgtcaccatcctttgctagcttctgctttggccaaaataatggaagatcgtagcaaccatattgcaattagcaaagaagaaaatgctgtcaggcagcttataagcatgataagcagtgataaccgtcatgtggttgagcaagcatgccttgctatttcatcactggcatctgatatttcttcagcaatgcagctgattaagtgtgacattatgaagcctattgaagctgtactaaagtcatctgacgaagaagaactagtatcagtattgcaagtggtagtcaccttaactttcgtttctgatcatgttgctcaaaagatgttgacgaaagatgtgttgaagtcactgaaagcactttgcggacacaagaactctgaggtgcaacgtctatctctgtttgcagttggcaatttggctttctgcttggagactcggcgcaccctcatgcattctgaaagtttgcgtgaccttttaatccgtttaactatttcacaagaacgtcgtgtcagcaaagcagctgcacgtgctttggcaatcctaggggagaatgagaacttgcgtcgagcaattagaggaaggccagttgcaaagaagggtctacgcattctatcaatggatggtggtggcatgaagggccttgcaacagttcaaatgcttaaacagatagagcaaggaactgggaaacgcatacatgaaatgtttgatctcatatgtggtacgtccactggtggcatgcttgcaatggctcttgggatcaagcagatgactttggatcagtgtgaagaaatatacacaaaacttggaaaacttgtatttgctgaacctatcccaaaggatgaagctgctacgtggaaggagaagcttgatcaacttttcaaaagttcgtcacaaagttttagagtggttgtacatgggtccaagcacagcgcagatcaattcgagaggttactaaaggaaatgtgtgccgatgaagatggtgaccttctaattgaatctgctgtaaaaggcattccaaaggtttttgctgtatccactttagtcagtgtcatgcctgctcaaccgtatatattccgaaactatcagtatcctcctggcactctggaggtatcaccaggaatggcagaaagtccatcaattagtgcaattggtactgctgtttctggtgcgccagttggtattaaacgtggtgccttcatggggagctgcaagcatcgtgtgtgggaagcgataagagcatcatctgcagcaccatattatttggatgatttctctgttgatgccaatcgttggcaagatggagctattgtagccaacaatcctacgatctttgccattagagaagcacaacttttgtggccagatacacgaatagattgtctagtttcgataggatgtggctcagttccaactaagagtcgtagaggtggatggcgctacttggacacagggcaagtgttaatagaaagtgcatgctcagtggagagagttgaagaaactttggatacactgataccaatgcttcctgaaatgcaatatttccgctttaatccagtggatgaacgatgtggtatggaattagatgaaactgatcctgctatctggcttaagttggaagctgcaactgatgagtacattcagaagaattttctggctttcaagaatctttgtgagcttctggtcccaaggtaccaagaggaagaaaagtcatctgatatttacaaatccctttcattttcaaggctgacatcactaaatcaaggtttcagcgaaagtaatcctaccttaggatggaggcgtgtggttttacttgtcgaggcttcctttagtcctgatttcgggaagaaaataaatcatgcacgctcccttgaatctttctgctcccagaatggtattaggttagctctaatgaatagtgcttctgggtttgggaaaccagccactgcacttcctaccccgataacttctcccttgtttactggaagtttcccatctagtccacttctatatagtccagatggcactcaacggatcggtcgaattgacctagttccaccacttagtttggatggccacccaactacaaagtcctcaccaccaacatcaccattgaagtcaaggcagccatcagcacatgttcggtcattgtatgataaactgcagaatatgcctcaagttggtgtaatacacctggctcttcaaaatgattcaaccggttcagtattgagttggcagaatgatgtatttgtggttgctgaacccggagaacttgcagacagatttctgcaatctgtcaaaactagcttgtcaaccttgttgcgtgggcgtaatagaaagggtgcatattccttgtccaagatttcatgtttatctgagctggttgctgaatgtccatcttttgaaatcggtgggatacaccaccgctatataggtcgacaaacacaagtaatggaagataaccaagaaattggcgcatatatgtttaggaggacagtgcctgctgttcacatggcacctgaagatgttcgatggatggttggagcatggagggagagaatcattgtatgcagcggtaagtatggcctcgctcatggcctggtgaaggcattcatggattgtggcgccaaagcagtcatctcatcgtccatcgagcctccggattcccagacaatagtctatcatgggatggatgtcaatggaagcctagagaatgggaagtttgtcatcggggatgaagaagccgatgaatcggaacctgaacctgttagccctgtaagtgactgggaggacagcgacgtggagaaaggtggcaaccatgacatggatgatgaggagtacctggctcagttcatgtgcctgatgtacgataaattgttccgtgagggtgtgactgtggatacagctctgcagcaagctctccgctcgcatcccaagttaaagtacagctgccacttacctcacgttttgtagttagggacattgacaaaccatacaggagtatagcaaaacgggcatggacaacaggaaatgaataaggattgggtggattcatagtggggttatagaggtttatatcgtgttcgttgtgcaggcgtagtgacagagggtacccccttactgaatctttgggcgagaaagcctatgtaaacctgtgtgctcatgagcagagtagttaagctgacgaataaaagcatgatgaagggcattgtaatctggatgtgcatttttgtttca

SEQ ID NO: 144463 - DNA, 4514 bp, Zea Mays
gcgcaggcgcaaacgcaaacgcctcccttcttccctccgttcgttccatcgtcgctccctactccggggcgccctccctcggtttcttcctcgtctcgagctctcgtctagacgtcactgtcctcgcaccgctcccttctccggcatccgagccgtagccctgccctccgcatccacaatttgatgcggagggctcggccgccatgtcgtggggcctcggctggaaacgcagctccgagatcttccacctcacgctcgactatggggactacgacgacaacgacgaccatcagccctcgtccccgtcccctccggcgtcctcttccccttccgcctcggcatcgtcgaccccggtatcctcctcctcgcccaccgccacccgcaacggcgacgtcggcttccgcatcgagctcgaatggtcggcgggggacgacgaggatcaggtcgcgctccgcctccagtcccagctcatggtcgcgctgcccccgccccacgacgccgtctccgtcgacctgatcccgagagacgacggggaggaggaagtggtgcagatcgagatgcgtgtggtcaggaggcgggaggcactgcggtccgtgcgcgtgtcgcgggctcccggatccgcgctgggcagcggcgatggcgcgggggtgctcgcgcgcctcatcagatccaacctcgcgcccgcgcctgccgtggatggccccacagccgccgcgggcgtgccagtgctcgctgatcactggcggcccgtcgccatgctcagcctctgcaactgcggaatgtcgtgtagagattacaggaaatgaggccatgctacaaaagggtcgtaagatgacccttatgatggtcaaatgaatcctgctgtgagcccattacttaaattgcacatacatgtacttccagttgagttaactcgccttccacttctcgagaagctatatcttgacaacaataaattgtcagttttgccccctgaagttggtgctttgaagaatatggaagtgctgtcagttaacaacaacatgctagtttctgtccctgtagaactgcggcaatgtgttatgctggaggaattatcattagaacataacaagcttgtccgtccactattggatttcaggtcaatgcccaagctccgaattttgcgtttgtttggaaatcctctagagtttcttccagaaattttgccactgcataacctcaggcatctcacacttgcaaatattagaattgaagcagtggaaagtcttaaatctgtcaatgtgcaaatagagactgagaatagttcctacttcatagcggccaggcacaaacttggtgcctttttttctcttgttttccgtttctcttcttgtcaccatcctttgctagcttctgctttggccaaaataatggaagatcgtagcaaccatattgcaattagcaaagaagaaaatgctgtcaggcagcttataagcatgataagcagtgataaccgtcatgtggtacacactacataccccaactgcctttcagtagttgagcaagcatgccttgctatttcatcactggcatctgatatttcttcagcaatgcagctgattaagtgtgacattatgaagcctattgaagctgtactaaagtcatctgacgaagaagaactagtatcagtattgcaagtggtgcaacgtctatctctgtttgcagttggcaatttggctttctgcttggagactcggcgcaccctcatgcattctgaaagtttgcgtgaccttttaatccgtttaactatttcacaagaacgtcgtgtcagcaaagcagctgcacgtgctttggcaatcctaggggagaatgagaacttgcgtcgagcaattagaggaaggccagttgcaaagaagggtctacgcattctatcaatggatggtggtggcatgaagggccttgcaacagttcaaatgcttaaacagatagagcaaggaactgggaaacgcatacatgaaatgtttgatctcatatgtggtacgtccactggtggcatgcttgcaatggctcttgggatcaagcagatgactttggatcagtgtgaagaaatatacacaaaacttggaaaacttgtatttgctgaacctatcccaaaggatgaagctgctacgtggaaggagaagcttgatcaacttttcaaaagttcgtcacaaagttttagagtggttgtacatgggtccaagcacagcgcagatcaattcgagaggttactaaaggaaatgtgtgccgatgaagatggtgaccttctaattgaatctgctgtaaaaggcattccaaaggtttttgctgtatccactttagtcagtgtcatgcctgctcaaccgtatatattccgaaactatcagtatcctcctggcactctggaggtatcaccaggaatggcagaaagtccatcaattagtgcaattggtactgctgtttctggtgcgccagttggtattaaacgtggtgccttcatggggagctgcaagcatcgtgtgtgggaagcgataagagcatcatctgcagcaccatattatttggatgatttctctgttgatgccaatcgttggcaagatggagctattgtagccaacaatcctacgatctttgccattagagaagcacaacttttgtggccagatacacgaatagattgtctagtttcgataggatgtggctcagttccaactaagagtcgtagaggtggatggcgctacttggacacagggcaagtgttaatagaaagtgcatgctcagtggagagagttgaagaaactttggatacactgataccaatgcttcctgaaatgcaatatttccgctttaatccagtggatgaacgatgtggtatggaattagatgaaactgatcctgctatctggcttaagttggaagctgcaactgatgagtacattcagaagaattttctggctttcaagaatctttgtgagcttctggtcccaaggtaccaagaggaagaaaagtcatctgatatttacaaatccctttcattttcaaggctgacatcactaaatcaaggtttcagcgaaagtaatcctaccttaggatggaggcgtgtggttttacttgtcgaggcttcctttagtcctgatttcgggaagaaaataaatcatgcacgctcccttgaatctttctgctcccagaatggtattaggttagctctaatgaatagtgcttctgggtttgggaaaccagccactgcacttcctaccccgataacttctcccttgtttactggaagtttcccatctagtccacttctatatagtccagatggcactcaacggatcggtcgaattgacctagttccaccacttagtttggatggccacccaactacaaagtcctcaccaccaacatcaccattgaagtcaaggcagccatcagcacatgttcggtcattgtatgataaactgcagaatatgcctcaagttggtgtaatacacctggctcttcaaaatgattcaaccggttcagtattgagttggcagaatgatgtatttgtggttgctgaacccggagaacttgcagacagatttctgcaatctgtcaaaactagcttgtcaaccttgttgcgtgggcgtaatagaaagggtgcatattccttgtccaagatttcatgtttatctgagctggttgctgaatgtccatcttttgaaatcggtgggatacaccaccgctatataggtcgacaaacacaagtaatggaagataaccaagaaattggcgcatatatgtttaggaggacagtgcctgctgttcacatggcacctgaagatgttcgatggatggttggagcatggagggagagaatcattgtatgcagcggtaagtatggcctcgctcatggcctggtgaaggcattcatggattgtggcgccaaagcagtcatctcatcgtccatcgagcctccggattcccagacaatagtctatcatgggatggatgtcaatggaagcctagagaatgggaagtttgtcatcggggatgaagaagccgatgaatcggaacctgaacctgttagccctgtaagtgactgggaggacagcgacgtggagaaaggtggcaaccatgacatggatgatgaggagtacctggctcagttcatgtgcctgatgtacgataaattgttccgtgagggtgtgactgtggatacagctctgcagcaagctctccgctcgcatcccaagttaaagtacagctgccacttacctcacgttttgtagttagggacattgacaaaccatacaggagtatagcaaaacgggcatggacaacaggaaatgaataaggattgggtggattcatagtggggttatagaggtttatatcgtgttcgttgtgcaggcgtagtgacagagggtacccccttactgaatctttgggcgagaaagcctatgtaaacctgtgtgctcatgagcagagtagttaagctgacgaataaaagcatgatgaagggcattgtaatctggatgtgcatttttgtttca

SEQ ID NO: 144464 - DNA, 1460 bp, Zea Mays
aagaatcctgaaccccttcttcgccgattcctctaacccaactcatctcatctccgctcccaaggcgagatctcaccaccccattcccaaatcaacccaaacaccgaattccaaacctggtgatcgatccaaaaacgccataaatcccaccgaatccaactcaaattcgcaatcaaatgccccagattggcacccaaaccccgcacccagcaattcaaatctgacctcgccattcccgctcctccccctctaccctccgctgcatgctccagactcccatagcaatggcgaccgcgctctccaaatctgccgtcaaatcccaccctaggtcgcctaccacagcgcagccgccgccgaaccccggctcaaacgccgcatgcttggccaaggcagtggaaggggccgggcctgggcccggtgccatcgggatgtttgggaagctcggtcctaggatctgcaagttgctcggtgggcacggcgtgcaagccaaggcggcattgctcggcgtcatgggaagtttggcgcaggtgggagcaatcagttcccataatatgccgcagacactccaaagtatccgtgactgccttgagaatagcgattgggctactagaaaagcagctgctgatacattatgtgtctttgctacacattctggtcacttgataggtgacggaatagctccaaccatttctgctcttgaagcttgccgttttgataaggtaaggcctgtcagagatagcatgattgatgcagtacagttgtggaaaaaactgactggagaagatgcaactgacggtagaaataaggatctaggtgatggtgaagggaaactggactcaagacggtcaatgcaaagtggtggaaaatcagaatgctttgatgattgctctccagattcacctagtaacatgaagggaagtagcatagctgaaaaggcagcagttcttttgaagaaaagaccaacattaactgacagggaactgaaccctgagttcttccaaaagcttgagacaaggaaaacagatgacttggcagttgaggttgtagtcccccgcaagactctacaatctcacttacgaagtgaagatgacacagaagaagatgatgatcctgttggtccagttgacagcaatggatcagctgaagatgaagcaaatctaacccaaatgcgtgctagctctaattttcaaaatattcgggatagatgggctagccaaaggggaaatagcaacaaagatgcaaaatctaggacagctgatgttgaagataggggtgaacccagtacaaaagattccacagctgcaaccatgaacattcctggagaaggcccttccgtaaataataaaacaaattggttagcaatacagaggcaattgtcacacttggagagacagcaaactagtctcatgaacatgttgcagtttcatttcctgtttaatgctaagggaaaaagaacctga

SEQ ID NO: 144465 - DNA, 1469 bp, Zea Mays
ctgctttctctcgtcccccactaccctcagcaaacaaaagaatcctgaaccccttcttcgccgattcctctaacccaactcatctcatctccgctcccaaggcgagatctcaccaccccattcccaaatcaacccaaacaccgaattccaaacctggtgatcgatccaaaaacgccataaatcccaccgaatccaactcaaattcgcaatcaaatgccccagattggcacccaaaccccgcacccagcaattcaaatctgacctcgccattcccgctcctccccctctaccctccgctgcatgctccagactcccatagcaatggcgaccgcgctctccaaatctgccgtcaaatcccaccctaggtcgcctaccacagcgcagccgccgccgaaccccggctcaaacgccgcgtcggctggcgtaggggcggctcctccgcctccgccgccgttgtcggccgccgccggtgccacgccgtcgaagaacgccgcgatggtggagctcaagtcgcgcgtgctcgccgcgctggccaagctctcggaccgcgacacgcaccacatcgccgtcgaggagctggaacgcatcatccgcgcgccgccgttgaccgacgccgtgcccatgctgctcaacgcactggcatctgactccccggggttcgcctccccggccaggcgcgagtctctgcgcctcctcgccacgctctgcgcgtcgcacccggacgctgccgcgccgcacctccacaaggtgcttgcccacctagcgcggcggctcaaggacccggcgtccgacacctccgttcgcgacgcgtgccgagacgtcgcgggccagctcgcggcagtgtacctccgccctctgtctgcttccggcgttgccgaggcgggcaatgccaccgtgatgctgttcgtgaagccgctgttcgaggtgatgggggagcagagtaaagcggtgcagggtggagcggccgcatgcttggccaaggcagtggaaggggccgggcctgggcccggtgccatcgggatgtttgggaagctcggtcctaggatctgcaagttgctcggtgggcacggcgtgcaagccaaggcggcattgctcggcgtcatgggaagtttggcgcaggttacaggccaagaatttgctatgaatgttattctctactctggctagggcttccagcgggtccactcctgctttgtggtactgtagcttgtgtatctcacagagaaatgtgggcttgaacgcttgacacttgcaaatttcaaactgctggtgaaacattactgagaatggcaaatggagataggattttaaagcataagcactgtgatcacaatgtgattcctgataaagtgattagtgaatgtggaagttcaaccttcaacgcttgatgtcttcctggagaacaaagagtctgggtttacttgtttctgtttgacttgatggacaatggaaaatatcacattgttgtg

SEQ ID NO: 144466 - DNA, 204 bp, Zea Mays
aaataaaataaaacagagtataaagagagaacgtatggaccaccgggtaatagtttaagtcttcatcaactactaggtaaatacccgtgcgttgcaacggaaaaaatattgcaacaataacatatgtatgaccacatattatgttgtaataaaaattaagttgtctctagaactttgtaatagtcctacatcaacaaaattaag

SEQ ID NO: 144467 - DNA, 1629 bp, Zea Mays
attcccatcagagaagagataaccacacgtccacacaccacagaccacacgcacggtacagcctctccgcagctgcaggtgcatgctgttctccgacgagaccccaagaactcgccaacctatcccaattcccagccacccttccctctttcacaatgctggcctccgccgccaccgtcaagccctccaccgccgcggccgcggccacctgcaaggcggccttcaagccgctccacctccctcccctccccgccgccgccggcctcaggccgctctccctctccgtctccgcgcgcccgctgtaccgtcaggagcatgtcctggcatccgtggcggtggcggcggctgggcgcaacgaacgcgccacgtcccccgcgccgccgtccgccaccgctgacggcgcccggccgctggaggtcgccgcgccggcggagacgggtcggcgcgccaagatcggggtctacttcgccacgtggtgggcgctgaacgttatcttcaacatctacaacaagaaggtcctcaacgcgttcccgtacccgtggctcacgtcgacgctctccctcgccgccggctccgccatcatgctcgcgtcctgggccaccaggatcgccgaggcgccccagacggacctcgatttctggaaggcgctgactcccgttgcgatcgcgcacacgatcgggcacgtggcggcgacggtgagcatggccaaggtggccgtgtcgttcacgcacatcatcaagagcggggagccggcattcagcgtgctcgtctccaggttcttcctcggcgagcacttcccggcgccggtctacttctccctcctccccatcatcggcggatgcgcgctcgccgccgtcaccgagctcaacttcaacatggttggattcatgggggcaatgatctccaacctggcattcgtcgtccggaccatcttctccaagaaggggatgaagggcaagtccgtgagcgggatgaactactacgcctgcctctccatcatgtcgctggtgatcctcctgcccttcgccgtcgccatggaggggcccaaggtgtgggcagcgggctggcagacagcagtcgccgagatcggtcccaacttcgtctggtgggtggcggcgcagagcgtgttctaccacctgtacaaccaggtgtcctacatgtccctggacgagatctcgcccctcaccttctccatcggcaacaccatgaagcgcatctccgtcatcgtcgcgtccatcatcatcttccagacgcccgtccagcccatcaacgcgctcggggccgccatcgccatcctcggaaccttcatctactcccaggccaagcagtagccgcccttggcgcgcgcgtctggctctcaggcctcagttcagttcaccgccgaatcagctcggcgctcgaagatataacagattatataacttttgaggatatctacctagcttgtataatagtattattactagatcctctcttctttttttcgtattttcttttttcctaggactagcttattactagatcatttcgtcgtcgtgttttcactatgactatgatggcgtagagagagagagagagatggatccatctaaataaaaaaaaaggtaccggatcttgttttgtctctgt

SEQ ID NO: 144468 - DNA, 1498 bp, Zea Mays
caggcacagcggcagtgttgatgcgccaccgatccttgtcctgtactgtgtagtgggtagcctccatgggtagcggcaacggcaaggtgtacgccacggtggtgctcatcaggctcatctacgcggggatgcacatcctcaccaaggcggccttcaacgaaggcacgagcaccaccgtcttcgtcttctaccggcacgccgtcgcggccgtcttcctgctgcctttcgccttccttgagatcaggaagcgaccggcgccacctctgaacttgaggctctgcatgaagatctttgctcacggcttctacgggatggctggaacgatcaacctgtactgcattggcctgaaatatgcttcggccacctcttcgtcggctatcttcaacatcgtgccggtggtcgccttcctcttggccgtcatgttcaggatggagaccctgaagctcaggagcgtccatggcatagccaaagcctgcgggatactcctctgcgtcgccggcgtcatcgtgctggcgctgtaccagggcccccagctcaagtcgccgaaccaccagcagctgctgaagcagcacgcgggcgcggccgccgcgcaggtccaccattccagcagggagtgggctctggggatcttcctgatgacaacgtcggtcgtgatatggtctctctggacggtgaagcaggggcccctgctgctggagtacccttccaagctcctgaacacgacgctgcagtgcgcgttcgcgagcgtccagtcgctggccatcgcccttgtcctcgagagggacttgtcgcggtggaagctcgccggccccgtcagcctcgcatccgtgctcttcacgggcgtcgtcgtggcggcgatctcgtactacctgcagatctgggtgatcgagaagagaggtcccgtgttcctgtccatgtcgatgccgctgagcctcgtcttcaccatggccatcgcctccttcctgctgggcgaagacgtcagcctaggaagcattatcggcagcgtcctcctcgtcgccggcctctacaatgtgctgtggggcaagagcagggaggagaagcaacaagcggcggcggcggtgggtgagacgacgacgacgacgacgacgacgacggatggcggccgcgacaacggagacgcggagaagaacgccgcggccgtgcagccggcggacggggaggacgacgacgacgacgacgacgcggcggccaaagtctgacatgcggatcatgcatgcaaagcgatctgccggctccgtgcgtctttgattcacgcaagaaggcgtggctggcggggcgggccaccggtgtttgtgcgatcactgcatgcagaaagggtgcgtgctgggctgctggcaggcactcatcatgtgtatatctgatctgaaagcaggttcttggggggtgtttcagcaccctgtatgcgccaccctttgtgtcatcgcatcaccaagttcagttcattctgggagatgattgggccttccatttcgtaaag

SEQ ID NO: 144469 - DNA, 2422 bp, Zea Mays
aaccatgcacctcaattttagcaacctcgcacaaaaactgcatgcctaattataccttcttggcccctcctcccccgctggaacgcatgtgtttgcttcccatcgctcctggcttccccgtcgagcgagggagccacattcttgcttccattgttcgctcaaacgcttggtagctcgatcggcgccgttgttcttgggccggccggtcgagccgaatggtcatggcagcgccagtgccgctccggcggcggcgggcgctcctggtggtagcgacgttactcgccgtggtcaccgcggcgatggcgcaggactataaagatggtggcggcgacgactacgaggaggacgagaagaagaagccgcagttcaaggcgcaggaggcgtgcaacggcgtgttcctgacgtacacgttcatggagcgcgccaaggagtacccgcacctgaagaaggcggcggcgcagccgtacgcgttcaaggccacggcgacggtgctcaacaccatgaccgaggacctcaaggcgtggcagatgttcgtgggcttccagcacaaggagatcctcgtgtccgtcggcggcgccgtgctgctcgacggctccgacctccccgccaacgtgtccggtggcgccacctttgcgggatacccaatggccgacctcctcaactccatcgagacggcgggcgagccgtccctgatcgagagcaagattgagatcaccggcacccaattcggcgtgaaggcccccgggaagcccatgcccaagaccatcaagttgaccaaccccgtgggcttccggtgccccgcccccaaccacaaagacagcgtgatgtacgtgtgctgcgtcaaggaccgcaagttcaaggcgaagaaggctaacagcacgcggtaccagacacggcggaaagcggacctgacgttcgcctacgacgtgctgcaggccaacaccaacaactaccaggtgcaggtgaccatcgacaactggagccccatcagccggctggacaactggaacctcacctgggagtggaagcgcggcgagttcatctacagcatgaagggcgcctacacgctgctcaaggaaggccccgcctgcatctacagccccgcagcgggctactacaaggacatggacttcacccccgtctacaactgcgagaagcggcccgtcatcgtggacctcccgccggagcgggagaaggacgacgccgtcgggaacctccccttctgctgcaagaacggcacgctgctgccgcccaccatggacccgtccaagtcgcgggccatgttccagatgcaggtgtacaagctgccgccggacctgaaccgcacggcgctgtacccgccgcagaactggaagatctccggcaagctcaacccgcagtacgcgtgcgggccgcccgtccgcgtgagcccccaggagttcccggacccgacgggtctcatgtcgaccacccccgccgtggcgtcgtggcaggtggcgtgcaacatcacgcggcccaagaagcgcgcctccaagtgctgcgtctccttctccgcctactacaacgactccgtggtgccgtgcaacacctgcgcctgcggctgcggcgacgacaccgcgacgtgcgacccggacaagcgcgccatgctgctgccaccggaggcgctgctcgtcccgttcgacaaccggtcggccaaggcacgggcgtgggccaagatcaagcactggcgggtgcccaaccccatgccgtgcagcgacaactgcggcgtcagcatcaactggcacgtcatcaacaactacaagtccggctggtcggcgcgcatgaccatcttcaactggcaggactacaccttcaaggattggtttgccgcagtgaccatgggcagccacttcagcggctacgagaacgtctactccttcaacggcacgcggatgggcgcccccttcaacaacaccatcttcatgcagggggtgccgggcctcgcttacctcgagcccatcaccgacgcgaagacgacatcggaacccaggcttcccggcaagcagcagtcggtcatctcgttcaccaggaaagacgcgcccaatgtcaacattcccagaggggaaggcttccccaagaggatctacttcgacggcgaggagtgcgcgctcccggataggatacccaaggtgtcgagcgcgcgccggcgggctgggaccgcgagcctgggtcagatagccatggcggcggcgctcgtgatgattgtggcgctagtggattccttgtgcctatgatgactgaaaacttctttggttcatagaggatttgactgacctagcgcgctgcatttgttgaacacttcattcattaactaggtacgtgcccgtgcgttgctacggaagtaaaaaaatagcgtacaaaatatatacgaagcgaaaaacatcactatgatagtaaaaatcgt

SEQ ID NO: 144470 - DNA, 327 bp, Zea Mays
atgcctttaagagcatgcgcagcatccccagggacccagccgccgacgccatgtaaaacggcgactccccagcgccgccgcacatccccacgagaccagggtccgcggtggccagcgcacgcgccgcggcctcgtggccgccccgcacggcgtcgtgcagcgccgtctccccgcgccggttcgtggcccgggtcagggcgcgcagggagcaagctggtgaggacgatgacgaggacgaggaggcggcgaggagcgcgacgaccttgtgcgcccccgcgcgtgcggcgaggtggagcggggtgtcgagcgccgcgttacgcgccgtga

SEQ ID NO: 144471 - DNA, 2205 bp, Zea Mays
aaggcacgcttcgtacttgccatagttcgtcatctccaagtgcgtgccctggccgccccctatcccgccggccctgtgtgtgttccccgctaccagccatggcgtcgccgttctccgtgccttcgctgatcatggaggaggaagggcggttcgaggcggaggtggcggaggtggagtcgtggtggggcacggagcggttccgcctcaccaagcgcccctacaccgcccgcgacgtggtcctcctccggggcacgctccggcagagctacgcgtcgggggagatggccaagaagctgtggcgcacgctcaaggcgcaccaggccggcggcaccgcgtcccgcaccttcggcgcgctcgaccccgtccaggtgaccatgatggccaagcacctggacaccatctacgtctccgggtggcagtgctcgtccacgcacacctccaccaacgagcccggcccggacctcgccgactacccctacgacaccgtgccaaacaaggtggagcacctcttcttcgcgcagctctaccacgaccgcaagcagcgggaggcgcgcatgtcgctgccccgcgccgagcgcgcgcgggcgccgtacgtcgacttcctcaagcccatcatcgccgacggcgacacgggcttcggcggcgccacggccaccgtcaagctctgcaagctcttcgtggagcgcggggcggccggggtccacctcgaggaccagtcctccgtcaccaagaagtgcggccacatggcgggcaaggtgctcgtcgccgtctccgagcacgtgaaccgcctcgtcgccgcgcggctccagttcgacgtcatgggcgtcgagaccgtcctcgtcgcgcgcaccgacgccgtcgccgccacgctcatccagaccaacgtcgacgcgcgcgaccaccagttcatagtcggcgccaccaacccgggcctcaggggccagagcctcgcggccgtgctctcggccggcatgtcggcgggcaagagcggcagggagctccaggccatcgaggacgagtggctggccgcggcgcagctcaagaccttctccgagtgcgtcagggacgccatcgcgggcctcggcgtcgcggccaaggagaagcagcgcaggctccaggagtgggaccgcgccaccggcggctacgacaggtgcgtgtccaacgaccaggcgcgcgacatcgccgccagcctcggcgtcacgtccgtgttctgggactgggacctgccgcggaccagggaagggttctaccgcttcagggggtccgtggcggcggccgtggtccgggggcgcgccttcgcgccgcacgccgacgtgctgtggatggagacgtccagccccaacgtggccgagtgcaccgccttctccgagggcgtcaaggcggcgtgccccgaggcgatgctcgcctacaacctctcgccgtccttcaactgggacgcgtccgggatgacggacgccgagatggccgccttcatcccgagcgtcgcgcgcctcggctacgtctggcagttcatcacgctcgccgggttccacgccgacgcgctcgtcaccgacacgttcgcgcgggacttcgcacgccgcggcatgctggcctacgtggagaggatccagagggaggagaggatcaacggcgtggagacgctggagcatcagaagtggtcgggcgccaatttctacgacagggtgctcaaggctgtgcagggtggcatctcctcgactgcagccatgggcaaaggagttactgaagagcagttcaaggatccacggcccgcaactgggagcagtggcctgcaagttatggccaaatccaggatttgatgaagactcagaagaagaatgattcggagaaggctctaaataaattcgaaaaaaaaataagctgggttcagttcatcagcaatggggaagctgctttccaagttctaaactgaacataatcagcataaatgaatcaacgaatcgtctagctagctacgtacggatggagttctgagttgtgactccaaatgaaaacccaggttgggttgaaagtattggtgtcaatctgtgagattatttatcacttcagattgaatatatgattttggttttggtactctgttctcagggttaaaatattttttttttattttttggtactggtattgtgaccacgtccgtgcgttggaacgtgaataaaattatgtcacgataaattttaagtttg

SEQ ID NO: 144472 - DNA, 855 bp, Zea Mays
aaggcacgcttcgtacttgccatagttcgtcatctccaagtgcgtgccctggccgccccctatcccgccggccctgtgtgtgttccccgctaccagccatggcgtcgccgttctccgtgccttcgctggtcggtttcgatttactagttctatagacagttgctaatgctaggcgcctaggcgtacgtgtgcatgatgatctcgtacgtacgtaactgataataactcacttattcgtcccgtgtggacgtgtgtgcatgcatgcagatcatggaggaggaagggcggttcgaggcggaggtggcggaggtggagtcgtggtggggcacggagcggttccgcctcaccaagcgcccctacaccgcccgcgacgtggtcctcctccggggcacgctccggcagagctacgcgtcgggggagatggccaagaagctgtggcgcacgctcaaggcgcaccaggccggcggcaccgcgtcccgcaccttcggcgcgctcgaccccgtccaggtgaccatgatggccaagcacctggacaccatctacgtctccgggtggcagtgctcgtccacgcacacctccaccaacgagcccggcccggacctcgccgactacccctacgacaccgtgccaaacaaggtggagcacctcttcttcgcgcagctctaccacgaccgcaagcagcgggaggcgcgcatgtcgctgccccgcgccgagcgcgcgcgggcgccgtacgtcgacttcctcaagcccatcatcgccgacggcgacacgggcttcggcggcgccacggccaccgtcaagctctgcaagctcttcgtggagcgcggggcggccggggtccacctcgaggaccag

SEQ ID NO: 144473 - DNA, 115 bp, Zea Mays
ccgaaaccgaattcaacttgaagatgcatctaccgaaggaaaccaccagccagaagggcgaccgcaaacacggacgagcagggcaaaccgaagcttccaaggcatcccagaggga

SEQ ID NO: 144474 - DNA, 1236 bp, Zea Mays
aggccacacagaggggcaaccaaagtcgttgccgcagaaaaaaataataatcacaagcgttctaccggtggaggacaaccattaatcagcaggctttggggccaaaagaaacggagaggagaaaagcgggggcggcaagcaaccacgggcggagctcggagcgtcctcctcctcccgtctataaattcccctccttttcttcctccatatataggggccatcagatccaagaagagggaagagcaccaaggaccttcggcgcccgttcaggatccacatcttcccgagcgagttcttggttgacctcttcctcttcggaccacctccaaggctcttggtgtagcttgccactctcaccaatcaagttttcatgtctgatctcgacattcagatcccaactgccttcgatcccttcgctgaggccaatgctggggactctggtgcggcagcagggtcaaaggactacgtacacgtgcgcatccagcagcgtaatggtcgcaagagcctgaccaccgtccagggattgaagaaggagttcagctacagcaagatcctcaaagatctcaagaaagagttctgctgcaatggtacagtggtccaggacccagaacttggacaggtcattcagctccagggtgatcagaggaagaacgtctcgaatttcctcgtccaggccggcattgtgaagaaggagcacatcaagattcatggtttctgagcaaccgccgggtccatagcaaaccaaccctgcatgcagggccagcttattatatataatatctgaggtggagcatatctatctggctgtgtactgcaagcaggcctagtacgccgcctgcgcgttcctcctattacacatataggcccctccctgcgtgtatgcttgttaccgtcgtgtcgaaccttgtactacgaggctccatcgaacatcgatggcttgcttctttatcagaacatgtttgaataaacgctatttggtaatgctgtgtgtcgaatgcttccgctgaattcaccaagtcctgttggatgggcggtatagtttaccaggctgacttgaagtgtcaaagacaattgatacggttaagcaggtgaagcccgcacagtcgccttgaagcatgctgctggcagaatacgattagatgttaatgaggtgtttgttggaagagtcaattcattcgtgaagcattatgacttcattacgactttattaatttggaggaatgaattcatttcatc

SEQ ID NO: 144475 - DNA, 1250 bp, Zea Mays
aggccacacagaggggcaaccaaagtcgttgccgcagaaaaaaataataatcacaagcgttctaccggtggaggacaaccattaatcagcaggctttggggccaaaagaaacggagaggagaaaagcgggggcggcaagcaaccacgggcggagctcggagcgtcctcctcctcccgtctataaattcccctccttttcttcctccatatataggggccatcagatccaagaagagggaagagcaccaaggaccttcggcgcccgttcaggatccacatcttcccgagcgagttcttggttgacctcttcctcttcggaccacctccaaggctcttggtgtagcttgccactctcaccaatcaagttttcatgtctgatctcgacattcagatcccaactgccttcgatcccttcgctgaggccaatgctggggactctggtgcggcagcagggtcaaaggactacgtacacgtgcgcatccagcagcgtaatggtcgcaagagcctgaccaccgtccagggattgaagaaggagttcagctacagcaagatcctcaaagatctcaagaaagagttctgctgcaatggtacagtggtccaggacccagaacttggacaggctgcccgctataggtcattcagctccagggtgatcagaggaagaacgtctcgaatttcctcgtccaggccggcattgtgaagaaggagcacatcaagattcatggtttctgagcaaccgccgggtccatagcaaaccaaccctgcatgcagggccagcttattatatataatatctgaggtggagcatatctatctggctgtgtactgcaagcaggcctagtacgccgcctgcgcgttcctcctattacacatataggcccctccctgcgtgtatgcttgttaccgtcgtgtcgaaccttgtactacgaggctccatcgaacatcgatggcttgcttctttatcagaacatgtttgaataaacgctatttggtaatgctgtgtgtcgaatgcttccgctgaattcaccaagtcctgttggatgggcggtatagtttaccaggctgacttgaagtgtcaaagacaattgatacggttaagcaggtgaagcccgcacagtcgccttgaagcatgctgctggcagaatacgattagatgttaatgaggtgtttgttggaagagtcaattcattcgtgaagcattatgacttcattacgactttattaatttggaggaatgaattcatttcatc

SEQ ID NO: 144476 - DNA, 852 bp, Zea Mays
attcattatcatttgaatgaaagtgaacggaaaaaaataggcagaacggaaggagtatcttattttccaactattatctctgtttcatattcatattagggttatgcagctggtagttgcattccaagtcctcaaaagaatgttgagagagacttcttgaagaaatattggtccaggtggaaagcggatcatgtaggtcgttgtcgggctatgcctcacataaaaacctttactcgttacagtggccaaaacattgcatggtttctgcttacctcagcaaatttaagcaaagctgcttggggcgcgctacagaagaacaacacacagctaatgatacgttcatatgagctaggtgtattgttcttgccccaaacactccaatcagtaccacaattttcatgcacggaaaagagccgctcaatcagggatggcgtcgcccttggcaagacgatcaagaccaagctggtcactctttgctggaaaggtgacgaagaggatccatctattgtgagattgcctgtgccataccagcttcctccacaaccttatggcacacaagatgtcccttggtcgtgggatcggaggtacacaaagaaggatgtgtatggttccgtctggccacgatatggctagcctgtgatttggttttatttatatcccagaaaaagatgattcctaaccctgttactgttcgggtcggtttgaaccatcgggcagcccctctcgttctgtgaccctgctttcatggccactcgaccatcagtggcgagaattgtgggatacgatattttcatctggttgaagctatgatattgattgatgcgtgaacaaaatgccattggttgcttgcta

SEQ ID NO: 144477 - DNA, 2487 bp, Zea Mays
cgctttctccctgtctcctcgacgccaccgccgccaccgcctgggcacctcccccggcctccgacgctgctaaccgctcgacgtcccgccacctccacaacgcagttgggcgcgcttccagcctccgccggaccggcgagctccggaggtctcagagtgtccatggaatgatttaaagatggcggcaccactgccttcgtcttgcacatctcttgcacactctcctagggtttagggtctagactcaaaccccttctcgaagactaccatatggcgtccgcatctcgagtgaggcttggcactctagttccccttaccaaggacaatgctggctcatcaaatggatctgtatcaagcattcctatattccaggggcccaatgtagtcgggagggatcatttggttgtcgtcgacaagaggatcagccgcaagcatctgagcctccacgcctctactgatggctccattgaagtagtagtggaaggtccaaaccctataattgtgcgatcgaagggacagaggaggaaggtttgtgctaaagagacagccaagattgctcatggtgatgtcctagaactgattcctggtgattatttcgtgaagtacgtggacatgggtgatgaacatgtaccaatgcatttgagcgacttaatgaagggtaagaggtatagtgaggaacatggcgcagcagtcaagaggattcgacagattatggaagatgaggctttggcaaaaacactacaggaaagctttgcagcagatgatgcagctgtttctggcatgccttctggccaaaaaataagttcacatgacagtgccggttcttccgaaagaaataatgacagaacacactctgttggtcctttgaaagatatgctccctttgacttttcggctcatgcatgtccaaggtcttccatcatggactaacacttcatcagttaccattcaagatgtcatacagggtgaagtactgcttgctgtactttcaaattacatggtggacattgattggttgcttactgcgtgcccaagtttgaggaaggttccacatgtcctggttctacatgggcaagatggtgcttcattagagcttatgaagaagctgaagcctgcaaattggatccttcacaggcctccactcccaatttcatttggaacacaccattctaaggctatgttgcttgtgtatcctcaaggaattcgaattgttgtgcacacagcaaatttgatacatgttgactggaattacaaaagtcagggactatggatgcaagattttccctggaaagacacagtcgatatgaataaaaaaacagcctttgagaatgatctagttgattatctaagtgcacttaagtggcctgagttcagggtgaatctcccaggggttggtgatgtcaacatcaatgcggcattctttaggaagtttgactatagtaattcaatggtcaggttgattggatcggttcctggttatcatgtgggctccaatattaggaagtggggccatatgaaacttaggaatgttctggatgaaatcatgttcaataaacaattttgcaaatcccctctgatttaccagttttcttccctggggtcacttgatgagaaatggatgagtgaatttgcatgctcgctgtcagctggtaaatcagatgatggatcacagctaggaatcgggaaaccactgattgtctggcctacggtggaggatgttcggtgctcgatagagggttatgcagctggtagttgcattccaagtcctcaaaagaatgttgagagagacttcttgaagaaatattggtccaggtggaaagcggatcatgtaggtcgttgtcgggctatgcctcacataaaaacctttactcgttacagtggccaaaacattgcatggtttctgcttacctcagcaaatttaagcaaagctgcttggggcgcgctacagaagaacaacacacagctaatgatacgttcatatgagctaggtgtattgttcttgccccaaacactccaatcagtaccacaattttcatgcacggaaaagagccgctcaatcagggatggcgtcgcccttggcaagacgatcaagaccaagctggtcactctttgctggaaaggtgacgaagaggatccatctattgtgagattgcctgtgccataccagcttcctccacaaccttatggcacacaagatgtcccttggtcgtgggatcggaggtacacaaagaaggatgtgtatggttccgtctggccacgatatggctagcctgtgatttggttttatttatatcccagaaaaagatgattcctaaccctgttactgttcgggtcggtttgaaccatcgggcagcccctctcgttctgtgaccctgctttcatggccactcgaccatcagtggcgagaattgtgggatacgatattttcatctggttgaagctatgatattgattgatgcgtgaacaaaatgccattggttgcttgcta

SEQ ID NO: 144478 - DNA, 2510 bp, Zea Mays
cgctttctccctgtctcctcgacgccaccgccgccaccgcctgggcacctcccccggcctccgacgctgctaaccgctcgacgtcccgccacctccacaacgcagttgggcgcgcttccagcctccgccggaccggcgagctccggaggtctcagtcactcgaactctcgaagaacagagtgtccatggaatgatttaaagatggcggcaccactgccttcgtcttgcacatctcttgcacactctcctagggtttagggtctagactcaaaccccttctcgaagactaccatatggcgtccgcatctcgagtgaggcttggcactctagttccccttaccaaggacaatgctggctcatcaaatggatctgtatcaagcattcctatattccaggggcccaatgtagtcgggagggatcatttggttgtcgtcgacaagaggatcagccgcaagcatctgagcctccacgcctctactgatggctccattgaagtagtagtggaaggtccaaaccctataattgtgcgatcgaagggacagaggaggaaggtttgtgctaaagagacagccaagattgctcatggtgatgtcctagaactgattcctggtgattatttcgtgaagtacgtggacatgggtgatgaacatgtaccaatgcatttgagcgacttaatgaagggtaagaggtatagtgaggaacatggcgcagcagtcaagaggattcgacagattatggaagatgaggctttggcaaaaacactacaggaaagctttgcagcagatgatgcagctgtttctggcatgccttctggccaaaaaataagttcacatgacagtgccggttcttccgaaagaaataatgacagaacacactctgttggtcctttgaaagatatgctccctttgacttttcggctcatgcatgtccaaggtcttccatcatggactaacacttcatcagttaccattcaagatgtcatacagggtgaagtactgcttgctgtactttcaaattacatggtggacattgattggttgcttactgcgtgcccaagtttgaggaaggttccacatgtcctggttctacatgggcaagatggtgcttcattagagcttatgaagaagctgaagcctgcaaattggatccttcacaggcctccactcccaatttcatttggaacacaccattctaaggctatgttgcttgtgtatcctcaaggaattcgaattgttgtgcacacagcaaatttgatacatgttgactggaattacaaaagtcagggactatggatgcaagattttccctggaaagacacagtcgatatgaataaaaaaacagcctttgagaatgatctagttgattatctaagtgcacttaagtggcctgagttcagggtgaatctcccaggggttggtgatgtcaacatcaatgcggcattctttaggaagtttgactatagtaattcaatggtcaggttgattggatcggttcctggttatcatgtgggctccaatattaggaagtggggccatatgaaacttaggaatgttctggatgaaatcatgttcaataaacaattttgcaaatcccctctgatttaccagttttcttccctggggtcacttgatgagaaatggatgagtgaatttgcatgctcgctgtcagctggtaaatcagatgatggatcacagctaggaatcgggaaaccactgattgtctggcctacggtggaggatgttcggtgctcgatagagggttatgcagctggtagttgcattccaagtcctcaaaagaatgttgagagagacttcttgaagaaatattggtccaggtggaaagcggatcatgtaggtcgttgtcgggctatgcctcacataaaaacctttactcgttacagtggccaaaacattgcatggtttctgcttacctcagcaaatttaagcaaagctgcttggggcgcgctacagaagaacaacacacagctaatgatacgttcatatgagctaggtgtattgttcttgccccaaacactccaatcagtaccacaattttcatgcacggaaaagagccgctcaatcagggatggcgtcgcccttggcaagacgatcaagaccaagctggtcactctttgctggaaaggtgacgaagaggatccatctattgtgagattgcctgtgccataccagcttcctccacaaccttatggcacacaagatgtcccttggtcgtgggatcggaggtacacaaagaaggatgtgtatggttccgtctggccacgatatggctagcctgtgatttggttttatttatatcccagaaaaagatgattcctaaccctgttactgttcgggtcggtttgaaccatcgggcagcccctctcgttctgtgaccctgctttcatggccactcgaccatcagtggcgagaattgtgggatacgatattttcatctggttgaagctatgatattgattgatgcgtgaacaaaatgccattggttgcttgcta

SEQ ID NO: 144479 - DNA, 1647 bp, Zea Mays
aaaggggatttctcctctggcagaaacggcagcagcactgacaggagcttccgtgtccggttcctcttacttgcaggtcgtcgcggcgggagacgttggcagctcgccccgcgccacgtgcggcggcttcgtcgccctcgacgtcggcgcgctgtcgtctctggccggcgacgccggcccaccgggcacgcccaccgcgccgccgcggacacccgtaagtccgaggaaaaaacacgcgttattagcgagtcggcctgggcaggccggacgcgccaaattcccttccgttgcttccaaagctgactgttcttcctcgatcgcgcccgtgccgtgaacgcgacagaaggtgatgcggtcgctgtcgaggaagggcgacaggaagccggccgaccccgacgccaacgccaacgccaacggcaccgccggtacgtcaccactccagacggttgccttgcctctccttggaatcgcgcgctgagtgaaattgatgcaatggttattattattttttctcgtggctctctagtttctttttatcttctttgtttggcttgcgtttatgattcgcttaagctagtgtcagcagaggtgacaattgacagcgatgtattagtattgccgataattccaacgacgtatcaaagagatgcaagggatgatgtatgtattggtacgtgtgctgcaggtggcggcggtagcgagcggcccgcagcttgttccgtgcacgtggcggccggcgaactcggggacgcgccccggcagcgcgcggctggtcgtccacacgccgctggccggcacgcccggaagcaagtcccggcggttcggcaggcggcggcgccgtggctcgatccccggagggtggtcctcctcttccccacgctgtccagcgtgggaacgctgatcctcctctacttcacgctatccatgagcagggcggacaccagtagtggcggcgccagcgacgctcggtgagacgccggcggtcgaaagcgaagggggcatttttgcctcgtctgagaattttcaaacttgcaaagattgacaagaatcaatacaagtagggccaggcatatcgacggtgaagagatcgagccggctggggattttgtggacaagtttgtgatggtagacatacttgtttcttcttgtattatctctctctctctctccttttttttcggattctctcaaaaagggatacatgtcgctttacagcgtaacagataatactgaaatttttactcccctctgatgctaaaaacacaaccaaaccattttcgccacatgtcttaacagggatggccaattgtctttgagctcggatgccgttcattcaacagtggtgtgtgtgtatttgttccctgaacctaacctcaacgaacaaacaaaccatgttgcaaatcacaaggggtgatccaagataatttgggaccctctatgcacactggcattaagaacaagttcaataataaagtcaagcgcttcactattgagtcaaattatagaatagtagtctcctaattgtgcataagaatttttttattgttaatttacccatgttccactttctctttctcctcacatcgttgtgttgttgagtggtggcccaccactatatagactctcgtgtccaacttagggtttgtt

SEQ ID NO: 144480 - DNA, 94 bp, Zea Mays
agacctcgacctcccctcccacatgctcttcagtctttgggacttcacagggcacggcaccaagagaggggagaatctttcgccctgaaaaaga

SEQ ID NO: 144481 - DNA, 1566 bp, Zea Mays
cattacgcccatccacgtgctcgcctctccccatcggcccatcgcataattttcctcggcggcgtcgccatctcaccggcggcgggcctgcggccggcaaccggaggcgatggcgagctcgtctgtggcggcggacatggagctggaccgccccaacctggaggactacctcccgcccgactcgctcccgcaggaggcgcccaggaatctccatctgcgcgatctgcttgacatctcgccggtgctaaccgaggcagcgggtgccatagtcgatgattcattcacgcgctgctttaagtcgaattctccagaaccatggaactggaacatatatttgttccctttatggtgcttcggtgtagtaattcgatatggattactcttcccactgaggtccttaacgcttgcaataggatggttagcattttttgctgcctttttccccgtgcatttcctattgaaaggtcaagacaagttgagaaataaaattgagaggaagttggttgaaatgatgtgcagtgtttttgttgcttcatggactggagtgatcaagtaccatggaccacgcccaagcacacgacctcatcaggtatttgttgcaaaccatacatcaatgatagatttcattattctggagcaaatgacagcatttgctgtcatcatgcagaagcatcctggatgggttggatttattcagaagactatcttggaaagtgtgggttgcatctggtttaaccgtaatgatctccgggatcgtgaagttacggcacggaagttgcgtgatcatgttcaacatccagacaaaaaccctctcttgattttcccagaaggaacttgtgttaacaaccagtatacggtcatgttcaagaagggtgcctttgagcttgggtgtgctgtctgtccaatagctatcaaatacaataaaatatttgttgatgccttttggaacagtaagaagcaatcttttacgatgcacttggtccggttgatgacatcatgggctgttgtgtgtgatgtttggtacttggagcctcaatatctgagggagggagagactgcaattgcgtttgctgagagagtaagggacatgatagcagctagagctggtcttaagaaggtcccgtgggatggctatctgaaacacaaccgccctagtcccaaacacaccgaagagaagcaacgcatattcgccgaatctgtcttgaggagactagaggagaaatgaagagacatcaaacactacaagcgcatttggttagtggtttaccgttcagctaccttgtaattcggttggctccccgaaaaaaaaaagtccgggacacgtcaagtgcccagctcagttttgttgtaaatttattagaaatttgacagaattggtagtgtgaacttaccaagaaaggaagaatagccgcatgtgttgtggctgttcattctatgattggttaggaattgacacttgaaacacggtactctattcagaggctgtgtccgtatttatgaatcgacgatgtaatggttttaattcatgtgattattgattcaataatatgagtagattacatcctc

SEQ ID NO: 144482 - DNA, 1757 bp, Zea Mays
tcgtattacgtactcctgcatagcatagcttagcttgcttccccaatgccaatgtcatcgacagcacaaatggcttccctcgccgttctcatcatttccctcgtctttgcggcgcttgcctccgactccgacgccgccgcaggcgtccgcgtcgagctcacgcgcgtccacgccgaccccagcgtgaccgcgtcccagttcgtccgcggcgccctgcgccgcgacatgcaccggcacaacgccaggaagctagccctagccgcgtcgtccggcgccacggtgtccgcgccgacccaggactcgcccaccgccggggagtacctgatggcgctggccatcggcacgccgccgctgccgtaccaggccatcgccgacacgggcagcgacctcatctggacgcagtgcgcgccctgcacctcccagtgcttccgccagccgacgccgctgtacaacccgtccagctccaccacgttcgccgtgctcccgtgcaacagctcgctgagcgtatgcgcggcggcgctggccgggaccgggacggccccgccgccggggtgcgcgtgcacgtacaacgtcacgtacggcagcgggtggacgagtgtctttcaggggtccgagaccttcacgttcgggtccacgccggccggtcatgcccgcgtccctggcatcgccttcggctgcagcaccgccagcagcggcttcaacgcctcgtccgcgtccggcctcgtcgggctgggcagggggaggctgtcgctcgtctcccagctcggcgtccccaagttctcctactgcctcacgccgtaccaggacaccaacagcacgagcacgctcctcctcgggccgtcggcgtcgctcaacggcaccgccggcgtcagctccacgcctttcgtcgccagcccttccactgcgcccatgaacaccttctactatctcaacctgaccggcatatccctcggcacgacggcactgtccatcccgcccgacgccttctcgctcaacgcggacggcaccggcgggctcatcatcgactctggcaccaccatcacattactgggcaatacggcgtaccagcaggttcgggcagcggttgtctccctggtgacgctgcccaccacagacgggtcggcagacacggggctcgacctgtgcttcatgctgccctcctcaacatcggcgccgccggccatgccgagcatgacgctccacttcaacggcgcggacatggtgctcccggcggacagctacatgatgtcggacgactccggcttgtggtgcctggccatgcagaaccagaccgacggcgaggtaaacattctcggcaactaccagcagcaaaacatgcacatcctctacgacattgggcaggagacattgtcgtttgctccggccaaatgcagcgcgctctgatcagagctttacagaactgaaaatacgcgcgcgcaattgcataaggatcgtgattttttttaactatatattatgtaaaaatggcgtgttgctcgggttgggttgtaaagcaggagatatttttccttctcggatccatgtgctttattctttatttttagggtcttctttattcttcatttgaaatacacttctccatccagagcaaataaatatttgaagatcaagggcaatggctatgacaagtaaaataattttcaaaactaagtgaaactttacaaaatccgaaaattgtgctctctgctctaacgaaaatgaagaaacagatcaaacaaaaaaaaacaccacaaaac

SEQ ID NO: 144483 - DNA, 1225 bp, Zea Mays
ggaactgggtagtggtgacgaacagtgacggagagcacccttgcgccgcccgccagggacgcgccatgcctgcgacgggtacggccgcggactaccaccgcgacattctccgggtacagcttcgcgcaggtgctggcacagacattgcgccaattgaaccgagaatattctggccatcccaaaatctgatatttttggattcatttcactatccaagagaatgttacttgctttcaaatccctatggacaacgcataaccgtgaataattgtgaagaggcctttatgcaagtttgcacattgctcaaagcaggcctaatgcttgtgctaaagctttgaatgagcatttcaaacttaataggactgctgagcaaatttctaaccacttgaagacagtgaagaagaagtacgttaggattaatcaacttagggctgaaagtgggtccggttgggatgaagatttatttatggttacaatggaccatgagcagtacacaacccactttgcgaatgacaagaacaagggggatgatgagtacatcaacaaaccattaccttactatggcaatttagcaacaatatatggtaatagtacagcaacaggaaggtttgtgaagacctcaaatgaccctcttggagtagatgagttgaatacccaaaaagaaatggagaacattgggacaccaactaatggtttgaatgacaaggaaggcagcccacctaagagggacgaaggaggacctagtagaccatccaagagagctaagaaggatgaatgtggagcagatcctttggttcaagcctttcaaagtggtgctgaaactatagctaatgctattgaaaaggctgcagcaagtaaaggtttgccaaacggattgtttgaagcggtggacagccttcccggatttgagcttgagcacaagtctaggtactactctcatatgcttggtgatcctaatcttgcaaatggtttcatgaatgtgcccgtgctttacaagatcacaagatggccgatttcatgaacaagaatatgtaggcttcctaggtacttaagtagacctagttggatgattatattgagtagtcatggactcttgtggtatggatgattttgagacatgcatttgtatccatgaacaatgctctttggatattcttgcatgtcatggtggttgtattttgggatggtggttgctgccatattgaacattgattgtggctgctca

SEQ ID NO: 144484 - DNA, 674 bp, Zea Mays
ggaactgggtagtggtgacgaacagtgacggagagcacccttgcgccgcccgccagggacgcgccatgcctgcgacgggtacggccgcggactaccaccgcgacattctccgggtacagcttcgcgcaggtgctggcacagacattgcgccaattgaaccgagcgtgatactcatagtcatattaatgcttcgtgatgaaacttcttcctcactaggatttacatggaagtaagctggctgcataggcttggctcatctgattttccgtccgtccaaagttgccaagcctgccaaagtaacatgtttttgtgaaacaagtgagatagagaatattctggccatcccaaaatctgatatttttggattcatttcactatccaagagaatgttacttgctttcaaatccctatggacaacgcataaccgtgaataattgtgaagaggcctttatgcaagtttgcacattgctcaaagcaggcctaatgcttgtgctaaagctttgaatgagcatttcaaacttaataggactgctgagcaaatttctaaccacttgaagacagtgaagaagaagtacgttaggattaatcaacttagggctgaaagtgggtccggttgggatgaagatttatttatggttacaatggaccatgagcagtacacaacccactttgcg

SEQ ID NO: 144485 - DNA, 733 bp, Zea Mays
ggaactgggtagtggtgacgaacagtgacggagagcacccttgcgccgcccgccagggacgcgccatgcctgcgacgggtacggccgcggactaccaccgcgacattctccgggtacagcttcgcgcaggtgctggcacagacattgcgccaattgaaccgagcgtgatactcatagtcatattaatgcttcgtgatgaaacttcttcctcactaggatttacatggaagtaagctggctgcataggcttgggtaagtccacatccttactgtttagcattgtgacaactcgctccatatcaggtcgatgctccgcattttcttgaacacataagagtgccacctgaatgtgcctttctatctcttcacgtacattgcctggaggagaataaatcagctcatctgattttccgtccgtccaaagttgccaagcctgccaaagtaacatgtttttgtgaaacaagtgagatagagaatattctggccatcccaaaatctgatatttttggattcatttcactatccaagagaatgttacttgctttcaaatccctatggacaacgcataaccgtgaataattgtgaagaggcctttatgcaagtttgcacattgctcaaagcaggcctaatgcttgtgctaaagctttgaatgagcatttcaaacttaataggactgctgagcaaatttctaaccacttgaagacagtgaagaagaagtacgttaggattaatc

SEQ ID NO: 144486 - DNA, 118 bp, Zea Mays
aaagaactatgttttaggacagagaaaataattagtatcattgatagatcattaaatcaattttataataaatttatttaaaatgtaaatattactaatagttaatgcaagtctagtc

SEQ ID NO: 144487 - DNA, 2776 bp, Zea Mays
acagcctaaagattaccaaaaccaatggctgcgcggtgcagcggcggctgcgacgggcgcgaggacagcgccgtggaggcgctggtgcagtggcagaaggtgagcgacttcctgatcggggcgtcctacatgtccatcccgctggagctgctgcacttcgccacctgcgccgacctcgcgccgctgcggtgggtgctcctccagttcggcgccttcatcgtgctctgcggcctcgtccacctcgtcgccatcttcacctacgcccgcccggactcgcgccgcctcctgctggccatcaccgccgccaaggcgctggccgccgtcgccgcgtccgtcgccgccgtctccctccccaccttcgtcccgcagctgctccgcctcaagacccgcgaggcgctgctccgggacaaggcgcgccagctggaccgcgacgtcgccctcgtcaggcgccgcgaggagaccgccacgcgcatcgtccgcgccatcacgaagcacgtctgctgcggctgccacggcggagcctctctcgcgcccgacgtgctgcgcaccgctgtcttccacctctctgacgccctcggcctccacagctgcgccgtctggatgcccgcggctgcggcggcggccagtgatggtggccccagcttgctgcacctggtacatcggctgcctgaagatgaccaccaggacccgacgacgaggctggccatttgcagcactgaccctgacgtggccgccgtcatggctagcaagaacgccaaggtgctgaggccgggctcggcgctcaggaggacgacgtcgacgtctggtcatgggcacgcgggtgcggctgccatacggatgccgatgctcagagtgtccaacttcgtcgacgcatcatcctcattatccgatgggcagggagctggtgtcagctacgcgatcatggtcttggtccttccggctccagctccgaccactaagaatcacaggactagaggacccagaggagaaggaggaggaggagcacgagagtggagcaggcaggagctggagatcgtggaggttgcggcggaccagttagccgtggcgctgtcgcacgcggcagtgctgaaggagtggcagctgactcggcacaagctggccgagcggcagagggtcctggtgcatgcccggcatgacgcagcggtggccaccagggccagggacgcctcgcagagcgccatgcgcgacggcgtgctgaggccgatgcactccgtcgcggggctgctctccctgatgcaggcgcagcagcacgaggacgaggccttccgttgcaccgagcagagggtcgcggtgggtgccatggccaggatcagcgccctctccaccacgctgaccgacgacgtcatggcggcgctgctgacgccgacggctgccggcgtgagcttggcgcggaggccgttcgacccccgcgcgctggttaaggacgcggccggcgtggcggggtgcctcgcccgctgcagggggctcggcttctcgcatcgggcggagatgagctctctgcccgccggatgctgggtggtcggcgacgacaggcgagtgttccacctcctgctgcacatggttggcgttctgctggaccagtgcgaatgccattgccatgacctctgctttgccgtggacactgttccggtgggtgaccaagagaccatgtcaggctcaggccttcctgattggatcacccccaacttctctggctgcaacacggtgtgcgtcaggttccgatttgggatcacaagacacttcagaaacggcttactgctctcgtccagcccacgacctcaagaaagaatcacaagacgcaccagcgtcagcatcagttcagccagctccaagacgcggctaagcatcgctacgtgcaacaagatcgtgcaggtgagctctgtctgtctctatgtacgtacgaaacaatgtttgctctatgtatgtagttagaaacatagcaagagcttaaaattggctgaccgatgtcgtcagatgatgaacggcaagatgtggtgggaatccacgccagcgtccggaggccagcatgaagagcacatgagcctcatcctgcacttccagctcgtctatggagtggcatcaccctctgcctcctccccggcaggcggcggcggattctaccacatcggtggcagattcggagtgccctcgccgtccaccagtgctcctcctcagcacaacttcaacggcctgcgcgtcctgctcttgaacactgatgacaccagccgggaggtgacgcggaagctcctggagaggctcggctgccaggtgcttccagttccatcggccgcccgctgcctcagccttctactggggagcgccaccgccaccggcggcggcgatcagccgtcattccagtccccgtacttggtactgcaggcggtgcttgtagacctccacacacctgccgcagctatcgctgacgccgccactgcaatggatgatgggtttgaggttgccctcaggatccgggaggtcaccggcgacaggttcagctggctgctcatacttgtcgcgctgccactgccgccgagagcgagccgcatcgacgttcgcgacgtgtgcaagcggacgggagtgaatggcgtgatctacaaacccatcagtccatcacgctgccagcgctggcagctgagctttacagggttctccaaaacgacaactgaccggtgatagatcatagatccccatgtacttgcggcctgtttgaaacgcgtttgattcacatatttgtaacgtaataggtttttttttt

SEQ ID NO: 144488 - DNA, 78 bp, Zea Mays
gtccagctgcatgagcagtgttcgttatcgtgcttcgacttattgagtagctgtaacatgcgcccaaggattgaagac

SEQ ID NO: 144489 - DNA, 1377 bp, Zea Mays
atgagtgtccgaaaagcaaagcaacacaaagacatcagttatcctgatgtgcagatgccaatgtttacattattctacgttcctagtacgaggttaaaccgaacttgtcttgaatcctctagacttgactgttgttgtttcttgaatccaagctttcgacgggaggacgcacttcccaataatctttggcgcgtggtagaccacggaaccggctccggcgaagtcgcacgtcccgctgccccgccccttccgctggtagtagctgttgaacgcgtacgaggcgtgggcgaccacggtgttgggctcgaagcacgctccgccgggctgtatggcgccgcagtccgcgccgttggcacacgcgtagttcagcgctgccagcagccgcgcgtcgccggccgccgcattcgccacgcaccagctcacgttcgggtcacaggtgccagctggttcgtgatacacgacgtaggcggcgccgtcgaagtcgcacgccgccttggcccggccgttgcgctggtagtagctgttgaacgcatacgaggcgtgcgcgagcctggtgtcgggctcgaagcacggcgcgccgggctggatggcgccgcagtcggcgccgtggccgcacgcgtactccagcgccgcctgcagccgcgcgtccccggcggacgcgttcgccacgcaccagctggccaccagcgcgccgccccggaagtcgaactcgtacaccttcgtccggttcgggtagaacagcccgaagtgctgctcgacgtcgtccgccccgtcgcccttctggttctcgttgaagagggagaagatgtagacgtccatgtcggcgtcggggtggtacggggtgcccgtgtcaccggacagcacgcgcttgatcaggtagttgttgtacgcttgcgcgttggctaccgaagccgcttcacctccagcctgctccaactccaaacgcctcccgccgccgcgtgggcgtggccgcggcctgccgccgcgtttgggtttgccgccggaaggccacccgctctccgaaacgtgcgctgctggcgccacggattttggcccccgcgcactggatctggacgtccccagcttctccatcgcgaagtacgtggcgtcgagctgggcgtccaggaggctgtggtacacgagcccggtcacggggtcgcgcacgccggtggcgttggagttccccagggcgtagtcgagggagatcttgtctggctcctcggcgtacgcgaagaacgggtaggcgttcacggtgaggtacgacccggtccgctccaggaaatcgatcatgggcttcatcaccgaccgcgcgatgtcgtcccggaacctgcccgcggacggcgagcttgtcgttgggtagcattaccatcaccgtga

SEQ ID NO: 144490 - DNA, 2410 bp, Zea Mays
tcccccactccctacaacgacagtatgtgcagtgcatcgatcttccttcctcgatgccccaatacaatgtttcagaagaacctgctgcccctggccgcagtcctcgccgtcgtcgcatcgctcatggccgctgccgccggttacccgtggtcagtgtgcggtgacagcaccgacagcagcgactttatgcctaacggcagataccaggcccatctcgacttcatcgcagctgccttgcccaagaacgcctccaagtcgccatacctcttcgcaaccgtcgtcgccggcaccgtcccggaccaggtctgggccgtggggctctgccgcggcgacgccaagcccacggcgtgcttcacctgcctcaccctggccttccaggacctgcccggctactgcacctacgccaaggacgccagcatctactacgaccgctgcatggtccactactccgacgtgcacacactctccggcgacgacgacaccggcccgatgatggacaggtacgccatcggcgacacccaaaccatcgcatcggaccccggccggttcgtcctcctcgtggcggcgctcgtgaacgccaccgccgactacgccgcgtacggctccggctccgccgcccgccgggggtttgcgacaggcgaagccgacgcaggcttcgacccggagttccccaagctctacgccctggcccagtgcatgccgggccagacgccggcgctgtgccgggagtgcctctccaggctcatatcgcagtcgctggacggattccggaacagtatcggaggcagggtgctcgccgtcagctgcacctacaggtacgagagtgcgcctttctatgatggaccggcgatggtacggctggcaccaccaagctctggagcgccggcgccggcgccggctgtgaactttcgggttcctgcggcggacggacggaagtaccatgtgccctgggtggctcttgccgttgtgctaccggctctagcagccttgaaccttgtcgcctgcctctgtctccgcttccggaggcggcgccggcggcaaccaactgcaccacgggacaagcagcaaaaagatcccgtgcattccaccgaagcagaggacatcgagatggtggagtccatgatgatggacgtctccacccttcgagccgccacaggggatttcgacgagagcaacaagctcggcgaaggcggctttggtgctgtgtacaagggtgtcctcccggatggcgaggagatagcggtgaagcgtctgtctagcagctcgtcgcagggagtggaggagctgaagaacgagctcgcgctggtcgccaagctgaagcacaggaacctcgtcaggctcgtcggcgtctgcctggagcagcaggagcggctgctggtctacgagttcgtccccaaccggagcctcgacctggcactcttcggtgctgatggacgtgaacagccgccgctggagctggactgggggcagaggtacaggatcatcaacggcatcgctcggggcctgcagtacctccacgaggactcccggctcagggtggtgcaccgcgatctcaaggccagcaacgtcctccttgacaagaacatgaaccccaagatctcggacttcggcctggccaggatctttggccgagaccagacgcaggccgtcaccagccgcgtcgtgggcacctatgggtacatggcaccggagtacatgatgcgggggaactactccgtgaagtcggacgcgtttagcttcggcgtcatggtgctggagatcgtaacgggtcggaagaacagcaacgatggctgcgatctcttgaccacggtaagtacaacgataacacctgcagaagaatggatgctggctgcctcacgctcgctacaaatccatgagcaggtatggatgcactgggaggccgggacggtggcggagctggtcgaaccgacgagcatgggcggcagtttcccggagggcgacgtgctgaggtgcatccacatcggcctcttgtgcgtccagccagaccctgcggcccgaccagtgatgtcgtcggtcgtcacgatgctcggcagcgacacggtcaccctccaggctccgtccaagccgggattcttcgccaggaacaacagcgcctacacaaccgtgtcgacagtgccggtggatgcttagcctggccataggactgagagaccgtatccagtgcacatggtttgatggtgcacaaaatacacatattaaatcctgctctttcatgtaacatccaatggctcacacgtatctcacctctctctcactgctttttgctaaaatcccctcccatctctctcgtacctgctctctattagtttgctaaaaccccctctgctccatcctcgatggttcttcctggagaccaaacaaactgcaccgtcagtcagcttcccttgct

SEQ ID NO: 144491 - DNA, 2129 bp, Zea Mays
atgttcacctgccgctgtgccgtcgtcgttgtcgtcgccctcgccgtgcttctactgccggccgcggcgacccagttggtttactgcgacgattccacctatgccgacaacagcacgttccaggcgaacctgaatctccttagcgcggcgctccccgccaacgcctccgcctcgccggcagggttcgccactggcgcagtcggtacggcgccggaacaggtcaatgggatggcgctctgccgcggcgatacgaacgcttcctcctgttcctcctgcgtcgcggccgcgttccggtacgcgcaggcgcagcagggctgccccctcacgaagggcgccaccgtctacctggacgattgtacccttcgcttcgccggcatccgattcctcgacttccttagagaggaccagtggctcgtcccagaattggttcccgcgattgaacctgcctctgggagcgtcaacgccacagatgcctggttcggcgccgccgtcgcggggatcttcacggccctggtcgaccgcgcagcggcggcgagcaacgcgacgaggaagtacttcgccacggcggagatggatttcgaccctaagctctacggcctcgcgcagtgcgcgccggatctgacgccggcgcagtgccagggctgccttggagacctccagtcgagggtgacggcgcagttcctgagcggacggcccctcggcaacaacgctttcatggtgtggtgctccctgaggtatagtgtgtcgccgttctacgctggccgggcgatgctacagcttccggcgccgccggcacctccaccaacgtccacgcccacgcttcattcttcagggaggaaagtgaatgcagcaggaatctctgcaggcatagcctgtgttgttgtgttgatgttgattctttcggtctttttctttattcgcttcaggctaaggattaaagtgaagaaaaatgatcactcactaaagaagattgggagagctcaatgcacgatctttgatttattgacactggaagaggcgactgaacatttcgcagagaaaaataagcttggaaaaggtggtttcggtattgtgtacaaggggatactgtctgacgggcaagagatagcagtcaagaaacttttaggaagagccgggagtgggttggatcagctacaaaatgaggtgcaagtactggcagagcttcagcacaaaaatcttgttgggttacagggtttttgctcgcatcataatgatacactgctagtttatgaatacatcaagaacgggagccttgacactattctatttgatgatagggaaggaaatgcacttaactgggagcaacagtacaacatcatctttggaattgccaaggggattttgtatctccatgaggactcaagcatgaggatcatccatcgggacctgaaggcaaataacattcttcttgacgacaacatggaaccgaaaattgcagatttcgggttggcaaggcttctaggagaaggccacacacatactcagacaggcagagttgttgggacattcggttatatggcgccagagtatgcatcacatggtagtgtgtcgcctaagattgacatctttagcttcggcgtcttgatccttgagatcgtgaccaggagaagcaactgcagctctgatgaccacagcactgtgaatctcctaagtgatgtctgggatcactggaagaaagggacgatgccacaaatgcttcaccggtcactggatgagtttgctcgaagccaagcgctgcgatgcatccacattggtctgctgtgcgtccagccggaacctgacgataggcctgacatatcagccgtagtgttcatgttaaccagggatagcatagagctccagccgccggggcagcctgcgttcttcttcggtagagaatcaccttcagctttacgattagatggtcaaagcagctatgtatatcaccgtgatggtttcaaattgggacagggcgtctcggtgaatggggttacactcagtgaactgtatcctagataggatcaaagtctggatactgagcacatggaatacagttaacatgttgaactcgataggtttctttgatgattagggtcttgctaatcccctctaacctgtctccatccttt

SEQ ID NO: 144492 - DNA, 2217 bp, Zea Mays
ttccttggcgaaggagggaggagtagccgcccggcgatgttcacctgccgctgtgccgtcgtcgttgtcgtcgccctcgccgtgcttctactgccggccgcggcgacccagttggtttactgcgacgattccacctatgccgacaacagcacgttccaggcgaacctgaatctccttagcgcggcgctccccgccaacgcctccgcctcgccggcagggttcgccactggcgcagtcggtacggcgccggaacaggtcaatgggatggcgctctgccgcggcgatacgaacgcttcctcctgttcctcctgcgtcgcggccgcgttccggtacgcgcaggcgcagcagggctgccccctcacgaagggcgccaccgtctacctggacgattgtacccttcgcttcgccggcatccgattcctcgacttccttagagaggaccagtggctcgtcccagaattggtgtaaatatggctatgaactcaagattccaatttttgtacatcaataacccaacaaaatttctttccagctaagaggcgcgcgtgccttacaaatttgtgaacttgttacaagtcccgcgattgaacctgcctctgggagcgtcaacgccacagatgcctggttcggcgccgccgtcgcggggatcttcacggccctggtcgaccgcgcagcggcggcgagcaacgcgacgaggaagtacttcgccacggcggagatggatttcgaccctaagctctacggcctcgcgcagtgcgcgccggatctgacgccggcgcagtgccagggctgccttggagacctccagtcgagggtgacggcgcagttcctgagcggacggcccctcggcaacaacgctttcatggtgtggtgctccctgaggtatagtgtgtcgccgttctacgctggccgggcgatgctacagcttccggcgccgccggcacctccaccaacgtccacgcccacgcttcattcttcagggaggaaagtgaatgcagcaggaatctctgcaggcatagcctgtgttgttgtgttgatgttgattctttcggtctttttctttattcgcttcaggctaaggattaaagtgaagaaaaatgatcactcactaaagaagattgggagagctcaatgcacgatctttgatttattgacactggaagaggcgactgaacatttcgcagagaaaaataagcttggaaaaggtggtttcggtattgtgtacaaggggatactgtctgacgggcaagagatagcagtcaagaaacttttaggaagagccgggagtgggttggatcagctacaaaatgaggtgcaagtactggcagagcttcagcacaaaaatcttgttgggttacagggtttttgctcgcatcataatgatacactgctagtttatgaatacatcaagaacgggagccttgacactattctatttgatgatagggaaggaaatgcacttaactgggagcaacagtacaacatcatctttggaattgccaaggggattttgtatctccatgaggactcaagcatgaggatcatccatcgggacctgaaggcaaataacattcttcttgacgacaacatggaaccgaaaattgcagatttcgggttggcaaggcttctaggagaaggccacacacatactcagacaggcagagttgttgggacattcggttatatggcgccagagtatgcatcacatggtagtgtgtcgcctaagattgacatctttagcttcggcgtcttgatccttgagatcgtgaccaggagaagcaactgcagctctgatgaccacagcactgtgaatctcctaagtgatgtctgggatcactggaagaaagggacgatgccacaaatgcttcaccggtcactggatgagtttgctcgaagccaagcgctgcgatgcatccacattggtctgctgtgcgtccagccggaacctgacgataggcctgacatatcagccgtagtgttcatgttaaccagggatagcatagagctccagccgccggggcagcctgcgttcttcttcggtagagaatcaccttcagctttacgattagatggtcaaagcagctatgtatatcaccgtgatggtttcaaattgggacagggcgtctcggtgaatggggttacactcagtgaactgtatcctagataggatcaaagtctggatactgagcacatggaatacagttaacatgttgaact

SEQ ID NO: 144493 - DNA, 2012 bp, Zea Mays
ctagcctcgtcctgctcagcccaatcgccggcccagtgccccgcgccacagcagcggagcctaccatggtcatggcagcagccgtcgctctcgctcacttcctcggagcggcattgccgctactcctctgtggagcagcagaggcgggcgaggtgggcgtgaactacgggagggtggcgaacgacctgccggacccggcgtcggtggtgcagctgctcaagcagagcggcatcaccatggtgaggctgtacgacgcgaatcccaaggtgctgacgtcgctggccaacacgggcatcaaggtgatggtgatgctgcctaacgaggagctggccgccgcggcctcggacccgtcctacgcgctccagtgggcgcgggccaacgtggcggcgttctacccggccacgcacatccactgcgtcgcggtgggcaacgaggtgttcgactccaggccggacctgaactcgaacctcgtcccggccatggccaacgtgcacgacgcgctggcgcagctgggcctggccgacgccgtcaaggtgtccacgccggtcgccttctcggcggtccaggactcgtacccgccgtccgcgggcaggttccgggacgacatcgcgcagagcgtgatgaagcccatgctcggcttcctggacaggacaggctcctacctcaccatcaatatctatccgtacctggcgtacgccgagcacccggaccagatctcgctcgactacgccctggggaacccaaaccccggcgtgcgcgtcgacgacgacgacacgggcagcatcgcgctcgacgacgacaatggcgtaacgtaccacagcctcctggacgcccagctcgacgccacgtactacgccatggatgccatggggttcaccagtctgaaagcacatgttggggagactgggcatccgtctggaggaaggcccagacccggccggaggccgcctcgcggaggccggaggcatttggtggccggggacgacgacgggtaccccgtcgcctcgatagccaatgcccacgcatacgtcaacaacgtcatcaaccgcgtgctgtccggcaacacgggcaccccgcaccggcccgacgcggacatggacgtctacatcttcgcgcttttcaacgagaaccagaaaggcgacgggccggacgacatcgagcagaacttcgggctgttctacccgagcgagcagaaggtgtacgaattcgacttccaccacggcggcggcggcggcggcggcagtggcggcgcgaaggcgagctggtgcgtggcgaacgcggccgctggggactcacggctgcaggcggcgctggactacgcgtgcggccacggtgcggactgcagcgccatccagcccggcgcggcgtgctacgaacccaacaccaagctcgcgcatgcctcctatgcactcaacgactattaccagcggaaagggcgggccagcgggacttgtgacttcgccggtgccgccaacgtcgtctaccaggcgccagccgacacctgcagcgcggcaaaggcgagctggtgcgtggcgaacgcggccgtgggggactcaaggctgcaggcggcgctggactacgcatgcggacacggcgcggactgcggcgccatccagcccggcgcgacgtgcttcaagcccaacaccaaggccgcccacgcctcttacgcgttcaacgactactaccagcgcaatggccgggcaagcgggacgtgtgacttcgccggcgctgcttccgttgtctaccaggaaccagctggcgcctgcgatgccaagtcgagctggtgcgttgcgaacgcggccgttggggacgcgcggctgcaggccgcactggactacgcgtgcggccacggcgctgactgcagcaccatccagcccggtgccacgtgcttcgaacctaacactaaggtcgcgcacgcctcgcatgcgttcaacagctactaccagcgaaatggccgagccagcgggacctgcgacttcgccggcgccgcctccgtcgtctaccaagcgcca

SEQ ID NO: 144494 - DNA, 2381 bp, Zea Mays
attgtcacgcatgcatagctgatgatggtcggactctgagctcctctccgtgccaagtttctctgcacccatcgcttcagctcaccggttctcccccctgcactgcgctggctgtatggctcctcccttcgcgtgcgccatgcacggccgcgccctgctagcagcagcagcagcagcgctgctcgcgtcggccgtcacgctcacgcttctcccctccgccgccgcgcagccgtgggtgggcccgtggccgacgtgcgacgacaccaccggcaactactcggccggcagcgcctacgccaaaaacatcaagcagctcatcctcagcctccaggcaaacgcgtccaacacgcccgccctcttcgcgacgggctccgccggcgcgggcgccgacgccgtgtacgggctcatactctgccgcggcgacctcagccccaccgactgcttcgactgcggcaccaacgccggccaggacgtgtaccgggtctgcaacggcacccgggacgccgcgctcgtctacaaccagtgctacgtccgcctcgcccccacggacttcctcgccaccaccaacaacaccggcatgagagacctcatcaacggcaacagcgtccccgcgggagtcaacgtgacggcctacgacggcgccatcaccaggctgctcaacgccaccgcgcgctacgcggtggacagctccgccccgtccttgtctcccaggaagtacttcgccacgggccagatggcgggggtcgacccgcggttcccgaccggcatctggtccatggcgcagtgcgcgggggacatatcgccggtgcagtgccggagctgcctggacgacttgctggcgcagtggtggcagaagttcgacagcaaggagatcggcgcgaggctcgacggttcgcgatgcaacctcaggttcgaaacggggaacttctacaccggcagcccgatggtgaagctgcagatgaacggcgaggaggccgctccagctccggtgccttccacggatgttctacctggcaccacaggaggtaagaaaaattcagttggcaaacttctcggaattatattgccgatagtatttgttgctgcaatagctgccatagccctctgcatttggattgttcgtaagaagagaacataccaaggaacaaatcttccccaaacagacacaacttatatggccgaggacatcgaaagcatcaagtcgatattgttatcgttgccatcactacaagcagcaacaaataattttgatgaaagcaataaactaggcgaagggggatttggaacagtttacaagggcaatctttctggacaagaagtggctgtgaagaggctaccaaagggtttagatcaggggctagaggaactaaaaaatgagctaggtttgatggcaaaacttcatcacagaaatcttgttcgactggagggtttctgcttagaagagggagagaggttgctcgtctatgagtacatgcccaacaaaagccttgacaatattctttttgatcatgagaagaaaagacaactagattggaggaaacgattcaacataattgaaggagttgcacgtggattgcaatatcttcatgaagactctcaaaataagatagttcaccgtgacctaaaagcaagcaatattctgttggattcaaatatgaaccctaagattggtgactttggcctagccaggctctttttgcaagatcagactcgaggcatcacaaaccacatcgttgggacattcggctacatgtctcccgagtatgtgatgcgtggacaatactccataaaatcagatgtatttagtttcggcatccttgttatagagattgtaacaggacaaaagaacaatgggcattacttcgacgagcaaaacgaggatgttgtgagcattgtatggaagcactggagcgagggaacacttgcagagattatagatgattctttagggagaaactactcagagactgaggtgctaaaatgtgttaacattggcttgtggtgccttcaacagaatccaatggaccgacctacaatgtcagatgtcatggtgatgctcaatgatgatgatactagttctctacctgctgctgcaaaaccaacttttttcttggatgcaagctcaggctactcttacacctcgggcaccatttcacatccttctgcaaggtagtgtaggctaaggcctaatgcacacctttatatgaatatcgacatattgttgcttgtttgtttcttattgtgtattggttgaaataaacatggaattcatcctgaattgtaatagcttgtgctcattattagtttcttaccaaatcctcaaatataaattttctcttactatatgtcctacaagctttcagaaagtatggaaatgctta

SEQ ID NO: 144495 - DNA, 2057 bp, Zea Mays
cgcgccatgcacggccgcgtcaccgtcctgctagtagtagccgcagcagtgctgctgctcgcgtcgtcggccgtcgcgcagccgtggccgagctgcaacggcgccagcggcaactacctggccggcagcgcctacgccaacaacaccctgcagctcatcctgggcctccagacgaacgcgtccgactcgcccgcctacttcgcgtccggctccgtcggagcgggcgcggccgccgtccacgggctcatgatctgccgcggcgacgtcagcagcaacgactgcttcgactgcggcacccgcgcgtggcaggacgtgcaggctgtgcagccgctctgcaaccgcaccagggacgccgcgctcgccgacaaccagtgctacgtccgcgtcgccgccaccgacttcctcgcctcgcccaacaacaccggcctggtgagcgtcgtcggcggcgccagcatccccagcggcgtcgacgtcgcggcctacgacgccgcgctcaggcggctgctcaacgccaccgcgcggtacgcggtggacagctcggtcccgtcgtcgccgccgaggctgtacttcgcgacggggcagttcgtggggctcgacccgcgggtccccaacatctggtccctggcgcagtgtgcgggggacctggcgccggcacagtgccggaggtgcctggatgacctgatgacactgtggtggaacggaagtgggttcaagccggacggggaaagcgcgatgttcgctggctcgcggtgcaacctcaagtctgacctgggggacaagttctacaccagcagccccatggtgaagctgcagatgaacagcgaagtggtcgttccagcgcaagcgccttccatggcaggtaaaaataattcatcgggcaagcttcttggaatcatattgccaataatgtttgttgttgtagtaactgccatagtcctctttgtttgtaaaaagagaagatatcgaggaataaagctgccacacggaactcatatggccgaggactttgaaagcatcaagtcaactttattatcattgtcatcactacaagttgcaacaagtaactttgatgaaaacaataaacttggtgaagggggattcggtgtagtttataagggagatctttctggacaacaagtggctgtgaagaggttgtcaaaaggttcgggtcaggggctagaagaactaaaaaatgagttagttctggtcgccaaacttcaccataagaaccttgtccgcctagaagaccccgaggaaaaaatacgactagattggaggaaacggttcaacataataggaggagttgctagaggattacaatatctccatgaggaatctcaaaagaagattatacatcgtgacatgaaagcgagcaatgttttgttggatgaagacatgaaccctaagattggagactttggcctagctagactctttgggcaagatcagactcgagatgtcacaaaacacattgttgggacatttggctacatgtctcctgagtatgtgatgcgtggacagttttccacaaaatcagacgtgttcagttttgggatccttgttatagagatcataacagggcggagaaacattgggcactacttctttgatgagcaaaatgaagatattataagcctcgtatggagacactggactgagggaacaattgtagagatgatagatgattctcttgggagaaattactcggagagcgaggtgctaaaatgcgttaacattggtttgttgtgccttcaacatagtccaatggatcgacctacgatgtccgatgtcatggtgatgcttaatggtgatgatactagttctataccgtctgctgcgaggcccacatttttcttggatagaagcactccttactcctataattcatgtactattacacatatgtctcctaggtagcacaaacaattgttgatagtagcatattgttacttgttcgcatcttgatgtatagtagtttagatcaactagtttgatttatcacaaagtgtgatttgtagttgccatttgtaattgtggatttgaaagttgcctagaga

SEQ ID NO: 144496 - DNA, 862 bp, Zea Mays
caaataacatgggaataattattagtacacctgtcattctccctccagtttgtggtttagtttattttgggttgcttgcattagcaactttatatccacataatgcgtttttttttcttaaatggttaaaccctgcagctgtataacagtatggacatttgtcaattcttttctctactgtatacacttctttgctacgtgttccataaaatatatagaggtttatgattcagcatctcatgtgctgcaaaaggctttggccttcgattttgctggttgttcatcagaaaaacaatctcaccctgaaatactttccttttgcaggccgagaagaatgagctgcgagacgagaagcaaaggctgaaggccgagaaggagagcctggagcagcagatcaagttcctgaatgcccggccaagcctcgtaccacaccacccagtgatcccagcctctgcgttccctgctccccaggggccagcagccgccgccaggcacaagctgatgatgcctgtgattggctaccctggattcccgatgtggcagttcatgccgccttcagatgttgacacctctgatgaccctaggtcttgtcctcctgtggcgtagaagccgtgcgaaatcctgttggaaagaggcgatgctgccttccattgattcaaatcttgatcggtccgcagtgttgttggtgtagttgattccagaactgaaggggatgttacatgtgtcggacggtgacatggggtgatctgatgacccctttgtatattatatatggtatggtataaataaattccgcgaccagaagctaatgtggatcggtggattagcttatgtctattcttgcctgtttggttatgttcct

SEQ ID NO: 144497 - DNA, 1247 bp, Zea Mays
gagacccattcagcccaccggctacacggcccatattccgtactcgtgaacctcgtgctgacgtgctcacacagtcactccgtttagctcaaatccttatcggcgactcggcgtcggagctcacgaccacgaccgcttccacgccctcgaccccgaacccccaatcccggacgcgaccgctgaaccctagcatactccggccatctgctgccggccccggcgatcccccgccatggcctcccccgagggcacaacgtgggtcttcgactgtccccttatggacgacctcgcggtcgccgccgacttcgcggcagcccccgcgggaggatttttctgggcagcgccgccgtcgctgcagccgcaggcgccagtgcagtctgtcgttgccgcgtcggctcccaacccatgtatggaaatcagtagctctgtggactgtggtcaggaaaaagaacagccaacaaataaacgtccaaggtcagaaagtactacagaatcaagcacaaaagcatccagggagaaaattagaagggacaagctgaacgagagattcttggaattgggtgccattttggagccagggaaaactcctaaaatggacaaaacagctatattgagtgatgctattcgtgtagtaggtgaattgcgtagtgaagcaaaaaagctcaaggattcaaatgagaatctccaagagaagattaaagagctgaaggccgagaagaatgagctgcgagacgagaagcaaaggctgaaggccgagaaggagagcctggagcagcagatcaagttcctgaatgcccggccaagcctcgtaccacaccacccagtgatcccagcctctgcgttccctgctccccaggggccagcagccgccgccaggcacaagctgatgatgcctgtgattggctaccctggattcccgatgtggcagttcatgccgccttcagatgttgacacctctgatgaccctaggtcttgtcctcctgtggcgtagaagccgtgcgaaatcctgttggaaagaggcgatgctgccttccattgattcaaatcttgatcggtccgcagtgttgttggtgtagttgattccagaactgaaggggatgttacatgtgtcggacggtgacatggggtgatctgatgacccctttgtatattatatatggtatggtataaataaattccgcgaccagaagctaatgtggatcggtggattagcttatgtctattcttgcctgtttggttatgttcct

SEQ ID NO: 144498 - DNA, 942 bp, Zea Mays
gagacccattcagcccaccggctacacggcccatattccgtactcgtgaacctcgtgctgacgtgctcacacagtcactccgtttagctcaaatccttatcggcgactcggcgtcggagctcacgaccacgaccgcttccacgccctcgaccccgaacccccaatcccggacgcgaccgctgaaccctagcatactccggccatctgctgccggccccggcgatcccccgccatggcctcccccgagggcacaacgtgggtcttcgactgtccccttatggacgacctcgcggtcgccgccgacttcgcggcagcccccgcgggaggatttttctgggcagcgccgccgtcgctgcagccgcaggcgccagtgcagtctgtcgttgccgcgtcggctcccaacccatgtatggaaatcagtagctctgtggactgtggtcaggaaaaagaacagccaacaaataaacgtccaaggtcagaaagtactacagaatcaagcacaaaagcatccagggagaaaattagaagggacaagctgaacgagaggtatgttccctggtgagacaagacaatgattgcattttagtttgcagtttaatctttttttctcttcatattatcgtattcgtcaactaccactgtacttatgatattctttttgttagattcttggaattgggtgccattttggagccagggaaaactcctaaaatggacaaaacagctatattgagtgatgctattcgtgtagtaggtgaattgcgtagtgaagcaaaaaagctcaaggattcaaatgagaatctccaagagaagattaaagagctgaaggtctatactatttcatgtggccaagttataaatggtgctgttcagatgggaggtggcacgtgatgtgttgtttaggcacttcatactgttccattttcttgatttatgatcccc

SEQ ID NO: 144499 - DNA, 999 bp, Zea Mays
gagacccattcagcccaccggctacacggcccatattccgtactcgtgaacctcgtgctgacgtgctcacacagtcactccgtttagctcaaatccttatcggcgactcggcgtcggagctcacgaccacgaccgcttccacgccctcgaccccgaacccccaatcccggacgcgaccgctgaaccctagcatactccggccatctgctgccggccccggcgatcccccgccatggcctcccccgagggcacaacgtgggtcttcgactgtccccttatggacgacctcgcggtcgccgccgacttcgcggcagcccccgcgggaggatttttctgggcagcgccgccgtcgctgcagccgcaggcgccagtgcagtctgtcgttgccgcgtcggctcccaacccatggtaattgccggattacggtctcgatttgggctcggccgtggcggtggttggttggacttcgtggggttgggttgcatttggtcggggttcgttgccagcatatctgtagattctgtacgtatagtagttcgttatatggatcaatgacttgattggaattcggtgaagcggctgaactgtgggatttggaccgtgtccttggaatcgtgtttgcccaacattaatagtagaactgattatggttctttatgtttccaatttactataccagcgtcgtcctgtggaaggtgtgggctgtggactctgttggttctgccagtggagttgtgtgagaggactgaggaaatggttcacaggatgggtcagtggacctttactataagttctaagtagtatggcgtgaaaggactgttcccatcttatggtgtgcaagctggtaggtaggtgcatataggtagtctcatcaagcctagatgctttcctttgggcacacctttgtgtcatctatactcttgtcacaaaaacatattgtttattaaaacatttaataaagcattagaaactacaaacatcaataaccatcacattatt

SEQ ID NO: 144500 - DNA, 1160 bp, Zea Mays
gtagtatccggcagtgagctcagctgcatggtttggaacgttgtaccaccagtgtatgccagagacctgcaaacgaatactagtgcatctgtgatatctgcgtttttcacccgtagatcagttcttagtttgtgtcgtagcctatagtaaaccttgtacctttattatgttacaatatgcaaagacatctaccttgaaatgggggggggggggggggttaagctaggtgttattcaccatggtacttactttgattgccagctgcaccttgcatcccaggaagaccttgtttgcttcgtccaagatcttatcaccgtgcttgatcagtttgtttgagtaccatgtgaggaagaacttccccttgtcggtctggtatgttccgttatccgcgaagaactgggtcttctcaggagtgtcattgtacgtcccagcatcatcaggcaaatcccactcaggatgcccagcctcttctgctgctgctttgaagtctgcttgcaggtacaccaagagggcaggagtttcaagtcagctgacctgaatggcagttctcccatggaagagaggctggtcgtccactccaagcgtgagatactcgatgttcgtcagcccactccggttggtgtagaagatgtcggggttgcttttgccgacgtcccgcacccactgcgggatcgggatgttgacgacgtcgccgacgttgccgccgcactggtggcacgacatgatggcctgcagcttcagcccggcctcctgcaccagcttgaacacctgcctgtaggcgctccagtcgtagactcccggctccttcccttccaccagcccccaccagacgtcgatcatgaccccgtcggcgcccgcctccgtcagcttcttcagctgcgccctcgtctcgtcctccttctcgaacgtgttgtcgacagtgatgacatccagctgcatgttcgcaagccaagcagagttgacaaaaaaaggggggggggggggggggtgtaaatcattcagcttcatctttccttttttggaatggcacgattcgtttaggtcgatctctccttttttttgttcgttatacaaactggtagcagtatgctaataatgctgcagccgcacatgattcttaagcagcttaccgggagcatgacgtagacctggacatagtt

SEQ ID NO: 144501 - DNA, 1117 bp, Zea Mays
ctagcgctagcggccagctgagtggaagcatctccgcctctcgtccagcgccctgccgccctaggcaccaaaacctcgcaaggcaaccgcccgccggcgccgccgtcgtagcaagagagtcagctgaggatcagaggagggggaagatgtcgttccgggcgcgggagatgtacaagaaggtggtgcggcgcgtgggcggcgaggggaagctgccggcggagcttatgaagtcggtgaaggacatgcttcccgacagcaacgtcatcatggggcgggccaagcgcggcatcttcgctgggcgacacatccggttcgggaacaaggtctccgaggacggcggcaacaaatcaaggcgatcatggaagccaaatgttcaggagaagcgtcttttcagctatattcatgaccggcacattagagtcaaggttaccacacatgcgcttcggtgcattgacaaagctggtgggatagatgaatacctcctgaagacaccttacaataaaatggatactgagatggggatagtgtggaaagcaaaaatcgaaaagatgtattcagatttgggtgagatggaagtaggcttcttccctcctgaggaagaggctaaggttaaagagggctttgacgaggttcgtgctgccaagaaggactttcgtagggaagcaaaacgagctttggcaaagcaaaggcagctagaagcaagtagtgctggtgatgaccaagcgggtgaagtcacgcatacaaaggaaaaggtatcagctgctgctgctaaactctgagcttggcaatcattggatgtccctgggcaaataatgggaggcttgctgcttgatacaaactggggaaggtttctagtgcaataactataccccttttcagggagcaggcggtttatcttaagccagcgtattgtaaacacttgtcacgaggtcgaaattttgtacaatttgaaaattcaagagcctgaattgtggggcagtttgtattgtagaatctatcagagactcagagctaaattggctagaggtatgactcctagctcatttcagtttcatccctatgttgcttaaagattagcaaaaatgccaaaatgaattcatcggtagcttactatgtg

SEQ ID NO: 144502 - DNA, 1227 bp, Zea Mays
agcgctagcggccagctgagtggaagcatctccgcctctcgtccagcgccctgccgccctaggcaccaaaacctcgcaaggcaaccgcccgccggcgccgccgtcgtagcaagagagtcagctgaggatcagaggagggggaagatgtcgttccgggcgcgggagatgtacaagaaggtggtgcggcgcgtgggcggcgaggggaagctgccggcggagcttatgaagtcggtgaaggacatgcttcccgacagcaacgtcatcatggggcgggccaagcgcggcatcttcgctgggcgacacatccggttcgggaacaaggtctccgaggacggcggcaacaaaacagatcggagtctttcgttcctcccattcatccgcgtcttctttagcggcgcccattccttggaggagcatgtgcgtcggttcaacagaggagcgtgttgcggctagcctggaacatgagtccccatggctgcggtgacgcgtcgagagcaaagcccgttgcacctgcgagggcggtggagatgtatggttgcaagcgaaggccgttgcgcctgtgagggctaatcaggagctacaccttttgggagaagacatctgctttgatactgttggtgcttttgctagctcttgtatatgaagaaccgagtttagcttagcttagctcgctgctggttctttgcagacacctcaggtgtcagggaagaaatcaaagcaagggaagagaaggaagaagctagtcgtctggaatctaaaaaagagagattaattgtttctccttacagcgcgagatcaaggcgatcatggaagccaaatgttcaggagaagcgtcttttcagctatattcatgaccggcacattagagtcaaggttaccacacatgcgcttcggtgcattgacaaagctggtgggatagatgaatacctcctgaagacaccttacaataaaatggatactgagatggggatagtgtggaaagcaaaaatcgaaaagatgtattcagatttgggtgagatggaagtaggcttcttccctcctgaggaagaggctaaggttaaagagggctttgacgaggttcgtgctgccaagaaggactttcgtagggaagcaaaacgagctttggcaaagcaaaggcagctagaagcaagtagtgctggtgatgaccaagcgggtgaagtcacgcatacaaaggaaaaggtatcagctgctgctgctaaactctga

SEQ ID NO: 144503 - DNA, 780 bp, Zea Mays
atgtggcccagccaacactgatacaacggcccaaagcccaatattgcagccctagcgctagcggccagctgagtggaagcatctccgcctctcgtccagcgccctgccgccctaggcaccaaaacctcgcaaggcaaccgcccgccggcgccgccgtcgtagcaagagagtcagctgaggatcagaggagggggaagatgtcgttccgggcgcgggagatgtacaagaaggtggtgcggcgcgtgggcggcgaggggaagctgccggcggagcttatgaagtcggtgaaggacatgcttcccgacagcaacgtcatcatggggcgggccaagcgcggcatcttcgctgggcgacacatccggttcgggaacaaggtctccgaggacggcggcaacaagtgaggcatctatcctcttcacctccgtaattttcccctttgtcctgatccatgcgaggcgacgttgtctggagaaattaagatgcacattttccgaaacgaggatttagacttttgtgaatcgtgtttagagttagcgggttgggtgttgaagattccggttctagtcttgttcgggaaacttaggatgcatcgacctggatgcgaggctggagcaaataaccgaaagaattggtccttgaagaaaaatgcaacaaatttcatagaactagagattagagagggaatgtgcatgatcaagggtgaccactatctgggagagcagggatgcattgtccggtttcccccctcccatcaggtctaccatttttggaaattatact

SEQ ID NO: 144504 - DNA, 880 bp, Zea Mays
gccacgttcacatcccattcaaaaaaacagatactaatctaattctccttcccagcatacccgactcctccccgatcgaagacaacatcatcctattcctacaaaacaaggcggtggtcggatcatttctgcaggaagcagtctcagttgtcgtcgtcgtcgacactggccttggaggaggcagccttcttggggagcagatgctgatggatgttaggcataacacctccgctcgcgatggtggcaccacccaacagtttggtcagctcctcgtcgttgcgcacagcaagctggatgtggcgcggcacaatgcgggtcttcttgttgtccctcgcggcgttcccggcaagttcgagaacctgttccgcgaggtactcgaggacggcggcgaggtacacgggggcgccggcgccgacgcgctcagcgtacttgcccgccttgaggaacctagcaatcctgccgacggggaactggagtccggccttggagctcctcgacgttgccttcttcgcggcgccagcgccgatagccttgccacggcccgccatcccttctcacgaccggacgacgaggaggaggcagcttgcgcttgaaggattgattaaacagggagatagaggttgttcggtgcgagggcgaggatatataggggcgcgggcacgggcccgggcccgcgcagcgagccaataggagtcgatcacgcggatcgtgggttggggcgttcgggcggacggcggatgtgtggagtgggcccgggtcgcgggtccgcgatccggaaccggcgggaagcgctggaggtttcgtacatttgggcggttccgcgtcggcagacgcgcgcgcaaagcggaaatcggggcattggtcacgtgccacttggtgg

SEQ ID NO: 144505 - DNA, 996 bp, Zea Mays
atgaagcttcttccgacaatacggatacaagaaaaatcacagaaaatcacatcaaccatattcgactacctcgtatatgccaaactaatccccctgaaccatccgtgtgccttgaaccggaccaccaaatcgaactacacatatctgaggaaaaccaagcttctacgaaatgcactccacgataaagctgcagaaatcattcgttctgaaggtatccgtgctacaggggctgcaaaagagcaagatcgtagtgtacccagtgtggatgccaatgatactgacggtagttgtatgcaaactggagatgattacaaacaacttgggctgaaagctgcgtccaatttaggtgatgagctacaaaacgtcaggaaggcagcaacagcaatcctggatgcagatcaattgaggatgtcagtagcaagccttggccacaagctagccaaaactaaagagttccttaacacgaacgaagagaagaaaataaggttcttggtccggggcactgttgactattttccatgggatgagagcacagggaaggatgagggcctgcggttatttgtggtagtgcgaaattttcttgcaatgctggacaagatttgcgaagaggtgaaagaagcatcaaaagcagctccaaagagaacaaagacccctcatccgtcccaagcatctttcgatgatcccaggcgcaacctattcccagcaattcaagaccaaaggagtctgactaatactgttcttccgttcactgtgcacatgtaccattgtaccgaacacagagaaatgcagcgcaaacttgtgaatccgatgactttgtctgtaatctcacaatacccatgcaaacagaccgatctgaatggtcctcgactaggtcaggataaggattgtgataagcctctgatcagccttgttctgagagaaaatacggaacttgagagccttctctgggtgaaaaaacttcagagtactttgttgttggctttatccatctactag

SEQ ID NO: 144506 - DNA, 375 bp, Zea Mays
atgacttgcaggctggggctggctccactcagccccaggcgccaagccgccaggcgctacgtgcctgccttcctgcacccctgccagcatggggccagccggccaggctaccttgcagggacaggcagacagcacgctgcgagcagcgagccaaaatccaaggacagtgagaagccaccagccatgccaaacccaaacggcctgccactggtcaccaggtgcccgggttgccccctcgccatgtcaggttgtaaggagatcggggaatcgaattgtgggtcagaggaatggaggtggaaccatcaccgtgtcaggcatcacccggcggcgctcgctctgccatgtgatagcggagctgaacggatgcacagataa

SEQ ID NO: 144507 - DNA, 903 bp, Zea Mays
actcgaacggtaaagcaaaaacctgcaggcaagctagctagccacgcgcacgcagatcagcagatgaagctgttcgccttcgtgaggcgcgcgcgccggccgccgccgacggcgcccgacgacgacacagccacagccgccgccgctgcgaccacggagaagcggcgccggaggctgtcctcgtcttcgtcgtcggggtcggcgtggaagccgacgctgggcgccatctccgaggacgccgccatgacgtccgcgcccgtggcgcaggcgaaggcagcagcggcgccggccagggccaaggcgaggtcgcctcgccgtgccacccgggcggccggctacgacgacttccggcactacggccacccgacggtgctgccggccttcacgccgacggcgttcctgttctgagcggtggcgaaccgcaagcaacgcaaaacgtcggcggaccggcggcggtgtttgtacagctcatgtgtgtggtggtggtgcagctcgacgacgacgacggcttcctgctttgtttttgttcttccaaccttcatgcacagcaaagagctgatccctagcttagtgcttctgatctatatatgatgtgtatacacaactctgctgtttcggatccccccccccccccccccccaccaccaccaccatacttgggcagcgcttttgtgatttctctcgcagccataaatagtgctacataatttgctccgttttggctcgcaccgcggcgtggctactgatagggctactttcggagctacaaaatcggaatctgtacccacaactactggaatctgcacccagtttcacctctttccttaatcaattgggccagattcgaacaacgaatgtaattgtaactgcgacccaacgaaacgggagatcaagttaaggaag

SEQ ID NO: 144508 - DNA, 1373 bp, Zea Mays
actcgaacggtaaagcaaaaacctgcaggcaagctagctagccacgcgcacgcagatcagcagatgaagctgttcgccttcgtgaggcgcgcgcgccggccgccgccgacggcgcccgacgacgacacagccacagccgccgccgctgcgaccacggagaagcggcgccggaggctgtcctcgtcttcgtcgtcggggtcggcgtggaagccgacgctgggcgccatctccgaggacgccgccatgacgtccgcgcccgtggcgcaggcgaaggcagcagcggcgccggccagggccaaggcgaggtcgcctcgccgtgccacccgggcggccggctacgacgacttccgcaccagctttggccgtcgtagtcaaacactcaaagtagatgaagctggtgacccggtcaggcgtgccagtggccacccccagcaaaggcacaagcctgtgctgctgctgctgctgctgcatgagcatgactgaactgaacctgtggagtactgccgccatgatgacctagggcctgccactactacatgtccctggggatcatcgtacgtcgaaaagatcagcgcgcaatgcactgcagattgcgcaagaagaggacctgacccgcgcttcacaaggctcatctctagcttcaaatccaatccgatgatgctccagcgttattactatactgccgacttctgtatacagcgtcgaccctaccaaacccaacagttcctcgctcgctttcgtcagctgctagttaaagtatagtagcattcactgttgacgttgacgctgactcaggtgcatccatcttttctacctgcaggcactacggccacccgacggtgctgccggccttcacgccgacggcgttcctgttctgagcggtggcgaaccgcaagcaacgcaaaacgtcggcggaccggcggcggtgtttgtacagctcatgtgtgtggtggtggtgcagctcgacgacgacgacggcttcctgctttgtttttgttcttccaaccttcatgcacagcaaagagctgatccctagcttagtgcttctgatctatatatgatgtgtatacacaactctgctgtttcggatccccccccccccccccccccaccaccaccaccatacttgggcagcgcttttgtgatttctctcgcagccataaatagtgctacataatttgctccgttttggctcgcaccgcggcgtggctactgatagggctactttcggagctacaaaatcggaatctgtacccacaactactggaatctgcacccagtttcacctctttccttaatcaattgggccagattcgaacaacgaatgtaattgtaactgcgacccaacgaaacgggagatcaagttaaggaag

SEQ ID NO: 144509 - DNA, 1217 bp, Zea Mays
atgacgagggaatgcccatccgagcttgtatttgttttcttatttggccttgaagtaatcccaaactcttcttggtacaggtggaatttagatctactgagtagtggaaattttttatttcaatgcccgaccaaagcatcattcaataatcaatatacatgggcatgtgttgaacctggccatctagcaacaaaaaatgaccctcttctcaagactgttgaaggcactgatcatacaattatacttatgcttctggaaaccatcattcggcagcttaccaccaggaaaggacaggtcagagcgcatgtgcttcaagcaatggttcaaatggatgtccttgttcctactggagatatgactgctgtcagaagaaccgctcaatttttccttaatagctttcaagagcgcctaacagcacaaaggaaggagagagaaatgacaaccgcagaactgggattcaaaaagcaattaactaaggaggagaagtttgaaaggaggaagcagagacttgctgcaatcggagaggatcttttggcgattgctgctgatcaaccatttcgcttccttgccacatttacatttgtggtcagagcattctcagttctagatggtattgggaaaggccttgatcctaggtttcatattacagagattgctaagtcatatgccaaggaattgctaaggtttaatgacgctggtgttgaaatagttgtgaaggcaagtttcaacatttggtgtgtgaagagacatgtgtattcctcctatgatgaattcctcaggctccatgaaggtaagcctgtcttaatgggcttgattgttgaacctgacttagtacttttatccatgtcacggcattgaaccagacagtcactcatgtccttaggatattaatggtatacatcaacaattcattctattttaattgcttgcaaaacttttttggcccttcagatgagttccacgcatcaagaagtcaagaatccaggaggcctaaaataggagaggagggcgcagtttgattcaatccatgtcaagtcagaggctgctgcgaggtttgcacatgcaagtagaatttagatggtgatgttttgtctttgttcccatttttataacgactaggtgtttgaattcctaagattaaagtttatgtagattcttctttgtaattagatctctgttaggcatctaactgaataaatgatctccattatggactg

SEQ ID NO: 144510 - DNA, 895 bp, Zea Mays
atcatcatacacgggaggaagctaggcaaaaaaaaaaaagggacaagatgcagggaggaggacgatgctctgccgcctgcaccgcgccgcgccgcgcttcactgattcctcctagcacggcagtcgcgcgaggaggcgaggtggtggatcaggagcacatcctggggagcgacgacctgccggcgcggccgccaccgcctccgcgcctgggctgcttcatcttgctcatctgcgtcttcatccggctacacaccttctccagctccatcacccgccagtgcatcccgtccaggagcgaccgcaggttctggttctccagcgacaggtccagccgccccgcgtacaggaccacctgaccctcgtcgttctcgccgccgccgacgtcgcggtgcttacccgtggacgggggaggggacagcgacacgggcttcagctggcccgcgggctcgcgcagcacgatgctcttcagcaccgtgtgctgcgacgccagcgcctgcaccgccgccctcgtcgggaactcgccgttccgcgccaggtgcttgcagctctcgggcgacagcttctcgtagctcagccccctgcagatcttcatcttctcctcgtccgtcaggcggccgtgaacctgacacgatcaactcacatttttttatttaagcctcaaattataatactagcggtaaaaggtcgtccctgtttggctggccaatcagttggttcacagaacgtgcacaagttaataaccgcattccagacatactagtaggattcagaggaagcactgacatgctagcaattaatgcgcagcagtaactggtgtctaatctaactaagcagtaaaatgtgaaatgctgtcgaaacggaatgttacgttacaactcctccagtaataactagt

SEQ ID NO: 144511 - DNA, 2178 bp, Zea Mays
acctcccaccgccccaccaatccgcctctgctcgctcgcccgctcgcgggctcgtcgtccgccagacgccccagaccgccgcctccaaaagtcccagcaccgtgccaccgtctgctcgcgcgctcctcctccgtgcgcaaccgcatcacgcggcggcatggttgactgcccgcggctgcttctgccggcccctcgcgtcgctgccgctcaatacacgcgctgcgccgctggatgttggtcgaaccagggacgcgctcccttctccgtttctttcagccacctccgccgctggtggagctacgtttctgtgcgatcctcgtcctctggggccggaagccagtcaagcgttgcggatgaaccagaggctgcagaatgggccttgcaggatttctacattttgcggaaggatgttgagttggctcttgagcgtgtcaatgaagtcaggcagtctgccggtttgcaacagctcgaggaggatatcgcttcgcttgagaacaagtccagtgatagttccttatgggatgatccttccaaggcacaggggatacttgtttctctgacagaggtcaaagacaaagtgaagcttctcaacgatttcaagttacagattgaagaagcagagactattgtgaagcttacagaagaattagattctatagatactggtcttcttgaggaggcctcaaagattataaaggcattaaataaggcattagacaactttgagatgacacagcttctttctggaccatatgataaggaaggtgctgtaattaatatttctgctggcgctggtggcactgacgctcaggattgggctgacatgttactaaggatgtatgtaagatggggagagaagcagcgttataagacacgagtagttgagaaatcacctggtgaagaggccggtataaaatcagcaactgttgaactagagggaagatatgcttatggctatctctctggcgagaaagggacacacaggattgtccgtcaatcaccatttaatgctaaagggcttcggcagacaagctttgctggtgttgaggttatgcctcttctaccagaggaatccatggctgtggacatacctgaagaggacctggagataagcttcacaagagctggaggtaaaggaggccagaacgtgaacaaggtggaaacggctgttcgcatggttcatattccaactggaattgcagttcgttgctcaggtataatttcacaccagtttgcatttgtattgtgctgaacaaaaacatactcagtcttctctatgtacattgggtcttaggcaatcgattataaaaaaaagcaaaaaaaaaagtagtaaatgaattggtggtaagcaaaagatgtgaaaaactaattgatgccctcctgaaagtaccagaacttcctacccctgaattgtgaccatagttgataggtaaaatcttctcagcttttaccaatgctggattgccactcttgcagaaaagctatttcaactttgtgtagccaggatgtctgaaatatctttgaaaattgaaatcaagaagtcaaagtaactgcagttaatacgagataaatctggcatttgtttttaatgtccaactttgcagaggagaggagccagctggccaacaaaataaaggccctcagccggctcaaagcgaagctgctggtgatcgccctggagcagcgtgcatcagaaatcaagcagatccgtggagacattgtgaaggcagagtgggggcagcagatacgcaactacgtcttccacccctacaagctcgtcaaggatgtcaggacagggtgtgagacgtcggacatcactggcgtaatggatggagagctagatccctttatcagagcataccttaagtacaagctaactgcggcagctaccagctgattttgttggggagcatagcgatgagtgatacttacatccattgtattatgttgtagtatgagtttttcatctctctctctctcttgatttagtataatttcatagcactagcaatctagcattgtatttattgatctaggaatcgaagtggaaacatgggttttgcttcgagttctacaataagagtttgatcgaattgcatgacttgataaagacctcttgctagttccataaattgtattgaaatgaatatacgggttcttgttggtatgagatgtttg

SEQ ID NO: 144512 - DNA, 1776 bp, Zea Mays
acctcccaccgccccaccaatccgcctctgctcgctcgcccgctcgcgggctcgtcgtccgccagacgccccagaccgccgcctccaaaagtcccagcaccgtgccaccgtctgctcgcgcgctcctcctccgtgcgcaaccgcatcacgcggcggcatggttgactgcccgcggctgcttctgccggcccctcgcgtcgctgccgctcaatacacgcgctgcgccgctggatgttggtcgaaccagggacgcgctcccttctccgtttctttcagccacctccgccgctggtggagctacgtttctgtgcgatcctcgtcctctggggccggaagccagtcaagcgttgcggatgaaccagaggctgcagaatgggccttgcaggatttctacattttgcggaaggatgttgagttggctcttgagcgtgtcaatgaagtcaggcagtctgccggtttgcaacagctcgaggaggatatcgcttcgcttgagaacaagtccagtgatagttccttatgggatgatccttccaaggcacaggggatacttgtttctctgacagaggtcaaagacaaagtgaagcttctcaacgatttcaagttacagattgaagaagcagagactattgtgaagcttacagaagaattagattctatagatactggtcttcttgaggaggcctcaaagattataaaggcattaaataaggcattagacaactttgagatgacacagcttctttctggaccatatgataaggaaggtgctgtaattaatatttctgctggcgctggtggcactgacgctcaggattgggctgacatgttactaaggatgtatgtaagatggggagagaagcagcgttataagacacgagtagttgagaaatcacctggtgaagaggccggtataaaatcagcaactgttgaactagagggaagatatgcttatggctatctctctggcgagaaagggacacacaggattgtccgtcaatcaccatttaatgctaaagggcttcggcagacaagctttgctggtgttgaggttatgcctcttctaccagaggaatccatggctgtggacatacctgaagaggacctggagataagcttcacaagagctggaggtaaaggaggccagaacgtgaacaaggtggaaacggctgttcgcatggttcatattccaactggaattgcagttcgttgctcagaggagaggagccagctggccaacaaaataaaggccctcagccggctcaaagcgaagctgctggtgatcgccctggagcagcgtgcatcagaaatcaagcagatccgtggagacattgtgaaggcagagtgggggcagcagatacgcaactacgtcttccacccctacaagctcgtcaaggatgtcaggacagggtgtgagacgtcggacatcactggcgtaatggatggagagctagatccctttatcagagcataccttaagtacaagctaactgcggcagctaccagctgattttgttggggagcatagcgatgagtgatacttacatccattgtattatgttgtagtatgagtttttcatctctctctctctcttgatttagtataatttcatagcactagcaatctagcattgtatttattgatctaggaatcgaagtggaaacatgggttttgcttcgagttctacaataagagtttgatcgaattgcatgacttgataaagacctcttgctagttccataaattgtattgaaatgaatatacgggttcttgttggt

SEQ ID NO: 144513 - DNA, 1302 bp, Zea Mays
cccaccgccccaccaatccgcctctgctcgctcgcccgctcgcgggctcgtcgtccgccagacgccccagaccgccgcctccaaaagtcccagcaccgtgccaccgtctgctcgcgcgctcctcctccgtgcgcaaccgcatcacgcggcggcatggttgactgcccgcggctgcttctgccggcccctcgcgtcgctgccgctcaatacacgcgctgcgccgctggatgttggtcgaaccagggacgcgctcccttctccgtttctttcagccacctccgccgctggtggagctacgtttctgtgcgatcctcgtcctctggggccggaagccagtcaagcgttgcggatgaaccagaggctgcagaatgggccttgcaggatttctacattttgcggaaggatgttgagttggctcttgagcgtgtcaatgaagtcaggcagtctgccggtttgcaacagctcgaggaggatatcgcttcgcttgagaacaagtccagtgatagttccttatgggatgatccttccaaggcacaggggatacttgtttctctgacagaggtcaaagacaaagtgaagcttctcaacgatttcaagttacagattgaagaagcagagactattgtgaagcttacagaagaattagattctatagatactggtcttcttgaggaggcctcaaagattataaaggcattaaataaggcattagacaactttgagatgacacagcttctttctggaccatatgataaggaaggtgctgtaattaatatttctgctggcgctggtggcactgacgctcaggattgggctgacatgttactaaggatgtatgtaagatggggagagaagcagcgttataagacacgagtagttgagaaatcacctggtgaagaggccggtataaaatcagcaactgttgaactagagggaagatatgcttatggctatctctctggcgagaaagggacacacaggattgtccgtcaatcaccatttaatgctaaagggcttcggcagacaagctttgctggtgttgaggttatgcctcttctaccagaggaatccatggctgtggacatacctgaagaggacctggagataagcttcacaagagctggaggtaaaggaggccagaacgtgaacaaggtggaaacggctgttcgcatggttcatattccaactggaattgcagttcgttgctcaggtataatttcacaccagtttgcatttgtattgtgctgaacaaaaacatactcagtcttctctatgtacattgggtcttaggcaatcgattat

SEQ ID NO: 144514 - DNA, 1322 bp, Zea Mays
acctcccaccgccccaccaatccgcctctgctcgctcgcccgctcgcgggctcgtcgtccgccagacgccccagaccgccgcctccaaaagtcccagcaccgtgccaccgtctgctcgcgcgctcctcctccgtgcgcaaccgcatcacgcggcggcatggttgactgcccgcggctgcttctgccggcccctcgcgtcgctgccgctcaatacacgcgctgcgccgctggatgttggtcgaaccagggacgcgctcccttctccgtttctttcagccacctccgccgctggtggagctacgtttctgacttgggtcaacacagtgcgatcctcgtcctctggggccggaagccagtcaagcgttgcggatgaaccagaggctgcagaatgggccttgcaggatttctacattttgcggaaggatgttgagttggctcttgagcgtgtcaatgaagtcaggcagtctgccggtttgcaacagctcgaggaggatatcgcttcgcttgagaacaagtccagtgatagttccttatgggatgatccttccaaggcacaggggatacttgtttctctgacagaggtcaaagacaaagtgaagcttctcaacgatttcaagttacagattgaagaagcagagactattgtgaagcttacagaagaattagattctatagatactggtcttcttgaggaggcctcaaagattataaaggcattaaataaggcattagacaactttgagatgacacagcttctttctggaccatatgataaggaaggtgctgtaattaatatttctgctggcgctggtggcactgacgctcaggattgggctgacatgttactaaggatgtatgtaagatggggagagaagcagcgttataagacacgagtagttgagaaatcacctggtgaagaggccggtataaaatcagcaactgttgaactagagggaagatatgcttatggctatctctctggcgagaaagggacacacaggattgtccgtcaatcaccatttaatgctaaagggcttcggcagacaagctttgctggtgttgaggttatgcctcttctaccagaggaatccatggctgtggacatacctgaagaggacctggagataagcttcacaagagctggaggtaaaggaggccagaacgtgaacaaggtggaaacggctgttcgcatggttcatattccaactggaattgcagttcgttgctcaggtataatttcacaccagtttgcatttgtattgtgctgaacaaaaacatactcagtcttctctatgtacattgggtcttaggcaatcgattat

SEQ ID NO: 144515 - DNA, 2700 bp, Zea Mays
agaatgggtaaataccgcaaaaaccagataagcccggtgcgccgtctccttccttctcggcgctctctcgcccgcgcctccatcactcgctagtcgctccctccgcctccgtccaccatgcccgcctcactccttcctccgaccttcctcccccaccacctgcgccgcctcgctcccgccggttgcactacctcttccgtcacctcctcctcggtctccatcccagcgagccgctacgacttcgagcccctcttggcctacctctcgtccccctccgtatcggcctccctcacctcgccatccccaccggcatccgttccggcgcccgagcaccgcctcgccgcgtcttactcggctgtcccgtcgcacgagtggcatgcgttgctgcgtgacctcgccgctagtgacgcgtccctgccgctggccttcgcgttgctacctttcctccaccgccaccgtctctgcttcccgctcgacctcctcctctcgtctcttctgcactcgctctccgtgtccggccgccttctcccgcactccctccttctctccttcccgccgtcgctctccgacccgccgtccccactgctgctcaactccctcctcgctgcgtccgccgcggcctcgcgccccgccgtggccctccggttgctctcgctgctccgcgagcacgatttcctcccggacctcgcgtcctactcgcatctcctcgcttcgctgctcaacacgcgggacccgcccgacgccgcactgctcgagcgcctcctcggtgacctcagggagtcgcggctcgagcccgatgctccgctcttctcggacctcatctctgctttcgcgcgggcggcgctcccggacgctgcgctggagctcctcgcctccgcgcaggccattgggctcacgccgcggtctaacgcggtcaccgctctcatctccgccctaggcactgcagggcgcgtcgccgaggcggaggcgctgttcctcgagttcttcctcgctggggagatcaagccgcggacgcgtgcttacaacgcgctgctcaaaggttatgtcaggattgcttcgctcaagaacgcagagcaagttcttgacgaaatgtcacaatgcggagttgcgccagatgaggccacttacagcctgcttgtggacgcgtacacaagagctgggaggtgggaaagtgcgaggatactgctgaaggagatggaggccgatggagttaaaccaagctcgtacgtgttcagtcggatccttgcaggattccgtgacaggggggattggcaaaaagcttttgcagtgctccgagagatgcaagctagtggagtaaggccagatcggcatttctacaacgtcatgatcgatacatttgggaagtacaactgccttgggcatgctatggatgcctttaacaaaatgcgagaagaagggattgagccggatgttgtcacatggaatactctcattgatgcacattgtaaaggagggcggcatgaccgtgctgcggagctgtttgaggagatgcgtgaaagcaattgcccaccaggcacaaccacatacaacatcatgataaatttactcggagagcaagaacactgggagggtgtggaagcaatgctatcagagatgaaggagcagggactggtacccaacattatcacatatactactctcgtggatgtgtatggaaggtccggtaggtacaaggaggcaattgattgcattgaagcaatgaaagctgatggtctcaagccatcgcctactatgtaccatgccttagtcaatgcatatgctcaaaggggtttagcagatcatgcgttaaatgtggtcaaggctatgaaagcagatggcctggaggttagcatcttagtgttgaattcgttgattaatgcttttggtgaagatagaagggttgttgaagccttctctgtgctgcagttcatgagggagaatggtttgaggcctgacgttataacatacacgacattgatgaaagctttaatacgtgttgagcagtttgataaggttcctgttatctatgaagaaatgatcacatcaggatgtgcccctgatagaaaagctagagcaatgctgcggtcaggtttgaaatacataaaacacatgagggttgcataggaaactaaacacaattactgatagcatctgatggaatcatataccttctcctgatcttatagaacatttcaacagaaggtgaagcaccacatgctgacagacacgatctgcttttgcacaagatgatagaatcatcaatatagtcacttcgtcttcctaatcacctaggggaaggcgaatatataatacatcttgatcatttgcaatggaaggagattaaatacatgacaccaagaagtcaggatcttggtataggaaacaaatacatagtctgtccagacctcaaaatttgagttggaatcttggaattgacatttccttataactcaattccagtattttgctgagaaaatcaattgtaacatggaatccaattccagccttttcaaattgtatctaggcgtagacatttctagaatttgtctagggcgatacaaaaggaaatgtaatgcatttttattgcctaaaacaaactttggcattaggtcctgtttggatccttgaattgaattgtattctaacaatcataatttagacatagatcaattaagttaatatagttttacatggaacata

SEQ ID NO: 144516 - DNA, 495 bp, Zea Mays
atggcccaacgaccgacgacggccgctgtcaacatggccctctacgccctcctctctttcttcttcgccctctacttccaagcccaaggtgaaggtacgataacagatgcgttgggacccagccccggtggtccggcgcccgagacggcggcggagttcgtcgtgctgcgggagcccatggccatcccggagcgcctgctgcgggcggcggcgacggcggttggcgcggcgaacgcgacggatccggatacgcagatgacggagctcatgtgcttggaatgcgactgctgcctcaagcacaccagcccgcgggtgtgcctcacgacgtgctgctgccagagggtctgcggcgagtccgtctgctccattccggaggtggtctcctgcggatgcaaccactgcgtcccccctcctcctcatcacagccatcgccattctcctcctcctcatcacagccatcgccattctcctcctcctcctcctcctgctatctga

SEQ ID NO: 144517 - DNA, 1517 bp, Zea Mays
ctaatacgaaacgaacagttccaaaaatgattagtagtcattctactagtcatacagccctttagctttggcttgcatgtcaagaagcccaaggtcagatgggacaaaaaaaaaatcgcgccgagtaccagagcgacgctacgcggcgtgacttctcccgaaacctccacatacccaaacccaccgaccgccgcctaggcttccacctctcccgctcaaactccggccactgaggtcgaacccgagcccgcgccgcagcggcacgatggtgaacgacgccgcggcgatggccgtcgtgagggcggcgcgcccagccctccgtggcgcccacgatggcgtcgccttcgccgcccacgccgccttcctcgccgatgggtactcgctctgcgccgtcggccctgccgcgctcgccgacccctcgcccttaggtgatgaggaggtggggattgatggttggaacatcatggagaattgttacgcctttttgtatagcaaggaggagaagggcaagaagaaaagggtactagtgaaatgtctggtgatcggtgaagtacttgcaattgatgtcttggatcttgaggcacaagataaggcgccttataatatccagattaatgtgaaagacttctttgtcgaagagcagccaaagaattatggggatatgtacaagaattttacaagtctcattgagactgtgaactcaaatgtgttgtgcaaattggatggagacggttccggtgctgaggctgctaagagcactgccgccgctgctgctaagaactctgatgggagaagttcaccaatacagagctctggagatccaggtcctagaactgctgacccttccggcctaatttatcctccaatagcaccgattggttctgatgatctctaccctgggcctggtgcaggcttctaccctcacagtggcattgggagcggtggcagcatgcatgttggtcctaatgatccgcgcttctttccttctaatcccttctctgccccatttggtgggcttgggagtgttccaccaggtagtcgctatgatccaattggcccacctgacgtcccagggtttgagccatctagctttgttaggcgtccaaggcggcctccaggcgggagcacccaccccgacctcgagttcttccagcaaggcccagacttctgagagtcgcgcagaggccggccggagcctcgccctaccctcacgaaataacttcaaaatgctgagccctcgagctagatatctcgcttggtgtgattgcaactgctgtatcaagtatagtcctagtgcgctttggctgtaaagatggatgtgaacatcgtcctagtgtatttactcttaattccaaaccatcgcctgtcatagcctaatatactcttttgtgtataatatcgggtgtaccggagctgaaagcgaaacttgtcgacaagtatcgtgaaagcatgttgcgaagagagaaaaaaggagcgtcccctgtcgcttctggttgctgcatctggacacagggaat

SEQ ID NO: 144518 - DNA, 910 bp, Zea Mays
ctcatcccttattctgttgaggtttatttactcgtttaaattttcaattttatagcctcaagtgttaacatggtttcttatatgtagtgtgaaagacttctttgtcgaagagcagccaaagaattatggggatatgtacaagaattttacaagtctcattgagactgtgaactcaaatgtgttgtgcaaattggatggagacggttccggtgctgaggctgctaagagcactgccgccgctgctgctaagaactctgatgggagaagttcaccaatacagagctctggagatccaggtcctagaactgctgacccttccggcctaatttatcctccaatagcaccgattggttctgatgatctctaccctgggcctggtgcaggcttctaccctcacagtggcattgggagcggtggcagcatgcatgttggtcctaatgatccgcgcttctttccttctaatcccttctctgccccatttggtgggcttgggagtgttccaccaggtagtcgctatgatccaattggcccacctgacgtcccagggtttgagccatctagctttgttaggcgtccaaggcggcctccaggcgggagcacccaccccgacctcgagttcttccagcaaggcccagacttctgagagtcgcgcagaggccggccggagcctcgccctaccctcacgaaataacttcaaaatgctgagccctcgagctagatatctcgcttggtgtgattgcaactgctgtatcaagtatagtcctagtgcgctttggctgtaaagatggatgtgaacatcgtcctagtgtatttactcttaattccaaaccatcgcctgtcatagcctaatatactcttttgtgtataatatcgggtgtaccggagctgaaagcgaaacttgtcgacaagt

SEQ ID NO: 144519 - DNA, 696 bp, Zea Mays
atcatccacacgaccgcacccactactactgagtgagagagctcctgtgccacaggcccacagctctcctacacgtccaccgatcatctcgcttgagctccgatctccctcagaagtcagaacctatctgaagagagacgatgcctcggttattcctcttctgcctggtgtccagccagctggccgcgaccgccgtcacggcgcggcctttcgccaccgtcctcctgcacggcggcgcgatgagcagggtagctgcggacgctccttattccgctgccgccgtcgccctgcacgcgcactccctgctggaggagtccaggttcgccgggtcaccgctgagctcgcaccgcggcgggcacagacctttcgaccgggcgttcgccggcggcaagatcatcgtggcggggctcgccgcggccatcgtcgtcgccgtcttctgctacatccgcatcacgaggaagaagagcgtggagccaaaagtctgatgatgactatatagaccacctgactctttctctctgcacactctctgaaagactgaaaccctttctgctctacaaactgcagagtgaggatatacggccatacgggaagaaacaagtggaaccccccccccccctagatttgctgtactatactacatttgtgatgatggatagatgattcagctccttcacagttcagacccaatgttac

SEQ ID NO: 144520 - DNA, 185 bp, Zea Mays
ggttggcattgtcttctgtggcagacaatccccaggaggccacaatgttgtttgggggctctatgaggctatcaaggcccacaaccaaaacagcaaactcattggtttccttgtcagcatgaacaaggtcgaggcattgtacaggttgttcaagaagatctgcaacaccttcattgatgatgggc

SEQ ID NO: 144521 - DNA, 1782 bp, Zea Mays
gaatatctgtttgataaaagttggatgtgtcccataaaattttaggatatttgatttgatatcggatatttgttatattatatttgtatccggatatttttccttgcaccacacccgcaaaacccttggtccaccccatttcctctcattcggcggctatgacgtcgcggaatcaccggaccctgcctggcctcgaagccacggagccggagaggccggcggcggccctcagcatcgatctcatggaagagatcttcctccgcgttgcctcccctgcagacctcgcccgtgcctccactgcctgcgtctccttccgccgcatcatcagtgatccgtccttcctccgccggtaccgctctatccacccgccgctgctcctcggcttaatcggcgttgcaggtttcacacctgccgacccgccccatccctccgctgctctatcccgcgctgtcgcccgcgccgccgacatctccttcgacttcctacctcgcagtcgcaccgccaattggcgccactcgcatccgtggtatccgtgcgatgtccgcgacggccgtgtcctcgtcaagtgcattcgcgaggaacccgtcgtatacttggacctcgcggtgtgcgatcctttgtcccgtagatacctgctgctgcctcctttggccgaggacctagtactcgcctccgtcgggctccaaaaaccaagtgtggtccattctggggtctcgtttatcccttctggaggcgtggaggagacatcattcagagtgatcagctggaaatattccaagacaaggttagcggtgtttgtcttcacttcgtcttctggcagctggagcgtcggtacatctaccaccagggatgatctaggcttggaccacgagtttgtcaggctttattcggtccagtgtgtgtatggccactgctattggagattatgtggcacaagcaagttaatcaagctcgacatgaacagcatggagttctccactgttgacctcccacctgatcacgaaaagaggaatgtcatcattgtggagtcatggggaagcaatgttgcaatgtttagtatgattgatgaaggcgcatctgtggattattacacctcttcgcaaaatgacagcgagaagtcccatgagtggcatatgatgattagcatccctttgcctgcagactatattattggcccctgctttaagggtccagctgaagggtatattttcctagaaggcattcgaatagatcatgaggcgggacattcagggttattctcacttgagattaaatctttcaaaattgagagggtctgtatgtcaccctatcgcttttttggccgtccatattttggtttcccaccttctatgtcaccaacaagaatttaaggatatggagggggtaagttttcttcgttaagtgttgccttctgcattttggcagagctctaaatcattgccacgtgattatgatgtgggaataaattttacttgtactatgtaatttttgggttcatccaagtcttccatatatctttgtgttcaccacggagctcatgtggtatttgatagtttgcttccattagagacttgcaggctgttcttgttaacatgatcttttcttgtctgagtactctctggtgtatcaaaggtaaagcgtactgaggaagtcactcgtgatcgacttgctatttcctacaagtagtgatatataagagggttttactatgaaaaaacttttttttcttatggaggatccatcccacagtattcaaaaaatcatgaaataaaaaaaagataa

SEQ ID NO: 144522 - DNA, 1247 bp, Zea Mays
cgacgacgggctgttgctgcaaatccatgtgctaatctaatccggttccagctgggaggttccagagcgcgcagaggttcagctcgtttgactccagcgtccctcttaccccggtccaactccaagacaggagcaaggaggacgaagccggtcagagcagcgacctgaacgtcacgctctttgacatggacgccatcgctctctccactgacaacttcgcggcgtggaacaagctcggggaaggcggcttcggcgcggtgtacaaggggcaactggaaggagggcaggcggtggcggtgaagcggctgtccaagtactcgacgcagggactgggcgagttcaagaacgaggtgatgctcatcgccaagctgcagcacgtgaacctggtcaggctcctgggctgctgcgtccatggagaggagaggatgctggtgtacgagtacatggagaacaagagcctcgacaacttcatctttgacaagaaccgatccgcgcagctgcactggtccaagaggttcgacatcatcctgggcatcgcacgcgggctcctgtacctgcaccaggactcccggtacaaggtgatccaccgggatctcaaggccggcaacatcctcttggacaaggacatgaaccccaagatctccgacttcggcgtggccaggatcttcggcgacgacaccgactcgcacaccaggaaagtcgtcggaacatacgggtacatgtccccggagtacgccatggacggcgtcttctcggtgaagtccgacgtgttcagcttcggcgtgctggtgctggagatcgtcagcggcaggaagaaccggggcatgtacagcagcggcgagcagacgagcctcctcagccaggcgtggaggctgtggagggaaggcaacgcgctggcgctgctggacgaggcggtggtccgcgccggcacgcaccggagctccgaggtgctgcgctgcgtgcaggtggcgctgctgtgcgtgcaggagcggcccgacgaccggccgcacatggcggcggtgttcctggcgctgggcaacccgagcgcggtgctcccgcagcccaggcacccgggctactgcaccgaccggggctccgcctccaccgacggcgagtggtcgtccacatgcaccgtcaacgacgtcaccgtcaccatcgtggaaggacggtgacgccacgtggcggctctctcagccctgagccgtgctagctgccgggatactgccgcgccttcggtgatttgtgaa

SEQ ID NO: 144523 - DNA, 2502 bp, Zea Mays
gtcatagttgggtcgagggtcgtgtgcatagcttgtgctggccgagtagtcccgagagccatggcggccgcgggtgcgcgactaccattagctctgctgcttcccctgttcgttactttcttcgcctcccccgcctccgcgactgacaccatcaccgccaactcttccctcagcgatggccagacgctcgtttcagcgggcggggtgttccagctgggcttcttcaccccggccagctcgacggcgaggttcttgggcatctggtacatgggcctcgctccccagaccgttgtctgggtcgccaaccgggaagccccgatcaccggcaccacggcgagcctggccatcaacgccaccggcagcctggtgctcgccgacccctctgggcgggtgttctggtcgtcgccgcagtccaacatgagcagcactggctcccctgtcggggcgcagctgctggacagcggcaacttcgtgcttcaaggagggggtggcgccgtcctgtggcagagcttcgattacccttccgacaccctgctcccgggcatgaagctcgggtgggacctgaccacggggctcgaccggcacctgacgacgtggcggagcaccggcgacccgtcgccgggcgactacacgttcgggttcgacctccgcggcgtccccgaggggttcatacggcgcgacggcacggtgcccgtgtaccggaacgggccgtggaacgggctgcagttcagcggcgagccggagatggagcccaacaacagcaacttccagttcgagttcgtcgacaacgccagcgacgtgtactacacgttcctggtggacggcggcggcggcagcggcaacggcggtgtcgtgtcgcggttcgtgctgaaccagtcgagcgtgcagcgctacgtgtggccgccgggcgggcaggggtggagcctctactggtcgctgccgcgggaccagtgcgacaactacgcgcactgcggcgccttcggcgcctgcgacaccagcggcggctcggcggcgtgcgcctgcgtgcacgggttcacgccggcgtcgccgcgggactgggagctcagggacagctccgctgggtgcaggcgcctcacgcggctcaactgcaccggggacggcttcctgccgctgcgcggcgtgaagctgccggacacgacgaacgcgacggaggatgcgaccatcactgtcgaccagtgcaggcagaggtgcctcgccaactgctcctgcctggcctacgccgcttccagcatcaagggaggcgatagtggctgcatcatctggagctcgccgctcattgacatcaggcatttcccttccggtggccaggatctgttcgttcgcctggcggcatctgacctgctccaactccaagacaggagcaaggaggacgaagccggtcagagcagcgacctgaacgtcacgctctttgacatggacgccatcgctctctccactgacaacttcgcggcgtggaacaagctcggggaaggcggcttcggcgcggtgtacaaggggcaactggaaggagggcaggcggtggcggtgaagcggctgtccaagtactcgacgcagggactgggcgagttcaagaacgaggtgatgctcatcgccaagctgcagcacgtgaacctggtcaggctcctgggctgctgcgtccatggagaggagaggatgctggtgtacgagtacatggagaacaagagcctcgacaacttcatctttggtacagacaagaaccgatccgcgcagctgcactggtccaagaggttcgacatcatcctgggcatcgcacgcgggctcctgtacctgcaccaggactcccggtacaaggtgatccaccgggatctcaaggccggcaacatcctcttggacaaggacatgaaccccaagatctccgacttcggcgtggccaggatcttcggcgacgacaccgactcgcacaccaggaaagtcgtcggaacatacgggtacatgtccccggagtacgccatggacggcgtcttctcggtgaagtccgacgtgttcagcttcggcgtgctggtgctggagatcgtcagcggcaggaagaaccggggcatgtacagcagcggcgagcagacgagcctcctcagccaggcgtggaggctgtggagggaaggcaacgcgctggcgctgctggacgaggcggtggtccgcgccggcacgcaccggagctccgaggtgctgcgctgcgtgcaggtggcgctgctgtgcgtgcaggagcggcccgacgaccggccgcacatggcggcggtgttcctggcgctgggcaacccgagcgcggtgctcccgcagcccaggcacccgggctactgcaccgaccggggctccgcctccaccgacggcgagtggtcgtccacatgcaccgtcaacgacgtcaccgtcaccatcgtggaaggacggtgacgccacgtggcggctctctcagccctgagccgtgctagctgccgggatactgccgcgccttcggtgatttgtgaa

SEQ ID NO: 144524 - DNA, 2835 bp, Zea Mays
caaccgcacgccccccgcgcgcgcccacacagtccacttacgtgatatacacagcagcagcagctagacggccatctgatcaaccttctcgagctcttctcacatctcccgctcatttaccacaagctagccaagagggttcgctcgctatattagctatatccggccgccgacattatactgacgatggcccacgccgccgcggcagcgctcgcccttctcgtcttcttctgcgcgcaagcgcgggacgcggccgtccatgtcgtcgacgcggcggcgacgctgtcgcaggggcagtcgctgggcgccaccgacaagctggtgtcggccggcggcaccttcgagctggccttcttcacgccgacggggggcgacccgtcgcggcggtacctgggcgtcatgtacgcgcagtccaccgagcagaccgtgccgtgggtggccaaccgcgacgtgcccgtgagcgcgggctccgcgtactcggcgaccgtcacggccgccggggagctgcaggtactggagggcgaccgcgtggtctggcgcaccgacaactccgcgacgacgacgtcgccgggaacagcgggaggcgaacaagcagcgaacgtgacgctcaccgtgctcgacaccgggaacctccagctggccgcgggcgacgggggccccgtcatctggcagagcttcgaccaccccgcggacaccttcctccccgggatgagcatcaccctggaccggcgcggcggcggggccgtccgccggacgctgttcacgtcgtggcggagccccgcggaccccggcaccggggacttcacgctggggcaggacccgctcggctccgcgcagctctacatctggcagacgaccggcggccagaacaccacctactggcggtccgggcagtgggccaacaccaacttcgtcggcgtgccctggcgctcgctctacgtgtacggcttcaagctcaacggcgaccccaacaacggctccggggtcatgtcctacgtcttcaacacgtacaacagctccgagtaccggttcatgctccactccaacggcaccgagacgtgctacatgctcctcgccaccggcgactgggagaccgtctggtcgcagccgaccatcccgtgccaggcctacaacatgtgcggcgccaacgcccagtgcgccgccgccgccgacggcggccaggcagtctgcacctgcctgacaggtttcgagccgaggaacgtatcggagtacagcaacgggaactggacgcaggggtgcgtcaggagctccccgctgccctgcggcggcgagccgaacgtgagcggcgctggcgccggcgccggcgtaggcgttggcttcgccgacctcccgggcgtgaagctgcccaacttcgcggcctggggatccactgtgggcgacgcggccgcgtgcgagcagtcgtgcctgggcaactgctcgtgcggcgcgtacagctacagcactggcaccggctgcctcacctggggccaggacctgctggacatctaccgcttcccggatggagaaggatacgatctgcagatcaaggtccccgcgtacttacttgagacgggctccaaaaggaggcgatggacgacagttgtcgtcgccgtagtcgtcgccgtggctgtattggcaggatgcggccttctcctgtggaaatgcaggagaaggatcaaagagaaacttggcatcgttgttggcagtgaggagacgaaggcgacgcagccgtctctgcttcctttgagggaagcaaggcaggatttctcagggccgaagcagactgatcaagaggaagcagagggcggcaagaagttcgagctgcctatcttctccttggagacggtagcggcggccaccggcgacttcagtgccgacaacaagcttggggagggaggctttggccatgtctacaagggaagacttcccggggccgaagaggttgcggtgaagaggctgtcccggggctcagtgcaggggatggaggagtttaagaacgaggtcatcctgatcgccaagctgcagcaccgcaaccttgtcaagttgttaggctgctgcatccagggggaggagaagatcttggtgtacgagtacatgcccaacaagagcctggacggcttccttttcgatccggcgcggcgaggcctgctggactggaagacgaggttccacatcatcgagggcatcgcccgagggctcctgtacctccacagggactcgcgtctccgcgtggtgcaccgcgacctcaaggccagcaacatcctgctagaccacgacatgatccccaagatctccgacttcggcatggcgcgcatcttcggcggcgaccagaaccaggtgaacacgaaccgcgtcgtgggcacgctggggtacatgtcacccgagtacgccatggagggcctcttctccgtgcgctccgacgtgtacagcttcggcatcctcatcctggagatcgtctccgggcagaagaacagcagcttccaccacatggagggctccctcaacatcgtcggctacgcgtggcagctgtggaacgccgacaggggggagcgcctgatcgacccggccatcctgccggcgtgctccgtgcgggaggcgctgcgctgcgtgcacatggcgctgctgtgcgtgcaggaccacgcgtgcgaccgcccggacatcccctacgtcgtcatggcgctcggcagcgacagctccgtgctgccgatgcccaagccgcccacgttcacgctgcagtgcacgtcgtcgtcggacagggacgggatcttcccggacaaggtcgacgagtcctactccgcctgcgatctcaccgttaccatgctgcatgggaggtag

SEQ ID NO: 144525 - DNA, 2930 bp, Zea Mays
tccagagtggagtggttggtgctctcagtcccaggacccagggtggccgtggcctctgccaatagggccgggccggggctccaccgcacaccgggagggagagatggtgggaacgagcccagggggaggagtgttctgtttctcctccatggtctcctctcctcggctcctcttcctgctcctcgccggcgcctcgctatgctgtgtggcggcgcagaagacggacacgctgcggcagggggagtcgctgtccggggcggcgacgctggtgtcctcgccggagggggtgttcgaggcgggcttcttcgcgccggaccccaagcagccttctcgccagtacctcggcatctggtaccacagcatctcgccgcggaccgtcgtctgggtcgccaaccgcgtcgcgccggccacctcggcctcgccgtcgctcacgctcaccgtcaccggcgagctccgcgtcctcgacggcacggcggccaacggcaccgccgacgcgccgctgctctggtcctccaacaccacctcgcgcgcgggcccgcggggcggctactcggcggtgctccaggacactggcagcctcgaggtgcgcagcgaggatggggtgctctgggacagcttctggcacccgacggacaccatcctgtccgggatgcgcatcaccttgcaggcgccagggaggggccctaaggagcggatgctgttcacgtcctgggccagcgagacggacccttcgccggggcgatacgcgctcggcctcgacccgggcaactccggtcaggcctacatctggaaagatggcaacgttacgtactggaggtcgggacagtggaatggggtgaattttataggcattccatggaggccactctacaggagtgggttcacaccggcaattgatccagtgcttggaaattattacacatacactgcaacaaacacttctttgcagaggtttgttgttttgccaaatggcacagacatctgctacatggttagaaaatcttcacaagattgggagcttgtctggtaccaaccatcaaatgagtgtgaatactatgctacatgtggtccaaatgcaaaatgcactgcatcgcaagatggcaaggcaaaatgcacctgcctaaaaggttttcatccgaagttgcaggagcagtggaatgcaggaaattggagtcaaggttgcatcaggagcccacctctgggttgtgagaccaatcagtctggggatggatttcttccaatgggaaacataaagtggcctgatttctcatattgggtatctacagtgggagatgagcctggatgcagaactgtctgccttaacaactgctcatgcggtgcttatgtttacacagctacaacagggtgcctagcctggggtaacgaactaattgacatgcatgagttgcaaacaggggcatatactctaaacctgaagcttcctgcttctgaattgcgaggacatcacccaatttggaaaatagccacgataatatcagccatagtgttatttgttttggctgcttgccttcttctgtggtggaagcatggtagaaatattaaagatgcagtgcacggaagttggagatcaaggcattcgtctacccaatcccagcagaatagtgctatgctggacatctcgcagtcaattcgttttgatgatgatgtggaggatggaaaaagtcatgaactcaaagtgtactcgctggaccgtataagaactgctacaagtaattttagtgactctaacaagcttggagaaggaggatttggtcctgtctatatgggaactttacctgggggagaagaagtagctgtgaagaggctttgtaggaattcaggtcaaggccttgaagaattcaagaatgaggtcatacttattgcaaagttgcagcaccgcaatcttgtaagactactagggtgctgcatacagagggaagagaagatcctggtgtatgagtacatgcctaacaaaagtctagatgcattcctctttaatcctgaaaagcaacggcttctagactggaagaaacggtttgatataatcgaaggcattgctagagggctgctatatctccaccgggattcgaggctgcgagttgttcaccgtgatctcaaggccagcaacattctcctggacgcggacatgaaacccaagatatcagattttggaatggcaaggatgtttggaggggaccaaaaccaattcaacacgaatcgggtcgtcggtacatttggctacatgtctcctgaatacgcaatggaaggcattttttcagtcaagtctgacgtctatggcttcggagtcctgatcttggagatcatcacaggaaagagggctgtgagcttccactgtcacgaggactccttgaacatcgctggatatgcgtggcggcaatggaacgaagacaatgctgcggagctgatcgatccagtgataagagcatcgtgctcagttcggcaggtgctgagatgcatccatattgcgttgctgtgcgtgcaagatcacgcagatgagcgacctgacatccccactgtcatccttatgctgagcaacgacagctcgagccttcctaatccgaggccgcctacgctgatgcttcgaggccgtgagatcgaatccagcaagtcaagcgagaaggaccggagccactccattggcactgtgacaatgacacagttgcatggaagatgaagtataacacgaaaaatatactgaatttgtgatatatttggttttttttgttctcccttcctgatgttgataatttgccatttgtcgcggattagtttcctctttttctccttttcatgacggcgaccgcgaagttgtatgaaaatcacattagcgtcatacattaagtgacaattaattttgcaaaggtgagatatttaccatgtggttcttcgtaactttaggtgttgttcgg

SEQ ID NO: 144526 - DNA, 1493 bp, Zea Mays
ggcaaactaggcaaagggtcctcgtggcctcctcctctccagactccagagtccagaccgtgacaagttcatcatccagccccgcttgcgcttgaccccttcaagtccaagcattccattccatccagtaccttccttgtcaccttgaccttccccctcccttcctagtcccctactcgccagtccacaggacctcgaccccgctaagcaagctccaagagcgatcgccgcagaagatcccgcgatgcaggccccgccggcgccctcctccgtcgacctgccgctggcggtggcgccgccgccggtgaaggcgccgaccccgcggcccccgccgccggcctcgctgcagcccgagtccccgggggtcttcttctccgccgccgccgccgccgcgcccctgggcaccgcccaccgccgcatcgccatcgccgtcgacctctccgacgagtccgcctacgccgtgcgctgggccgtcgccaactacctccgccccggggacgccgtcatcctgctccacgtgcgccccacctccgtgctctacggcgccgactggggcgccgtcgacgtctccctccccaaccctagcgccaccgccgcctccgaggacggcgacggcgactgcgagaccgccgctgccgcgcgcaggatggaggacgactacgacgccttcacggccaccaaggccgacgacttcgccagcccgctcaaggacgccggcatcccctacaagatccacatcgtcagggaccacgacatgaaggagcgcctctgcctcgaggtcgagcgcctctcgctcagcgccgtcatcatggggagcaagggcttcggcgccgcgcggaggaccagcaagggcaggctcggcagcgtcagcgactactgcgtgcaccactgtgtctgccccgttgtggtggtgcgcttccctgatgacggctctgccgagggtggggaggccgctggtttgtccgccgcggttggtgctgaggatgtgctgcaccccgtgccggaggaagaaggcgagtaccatgacgctgcggaggagcacaaggatgcttgacctcgttgatgcattgtgaagtcctcttggattcagcatgtagaggttctagcattcgactgttggctgggtgctaagctgggatttgtacttgagtgcatgtgatgtttatgaactcccattaccggtgtctatccgtgctttcgctttgtttgtatcctccgttacctttgttcatgtagcttgtctgacttccactgcgtggtggatatatgtctgaacatttgtagctactttgcgttgcactgtgtttctgatgaaagttacaggttactggtcacttctatagaacccaaaaaaaacaaggatgcaaattcgtcctgatttttattttctttattttagtataaagtagaagggcaggcatgatgtcggtgtgtcgagtaagccaaaagatcccgagttcgacgcagtattgtaatgcttgcctcggttattt

SEQ ID NO: 144527 - DNA, 1269 bp, Zea Mays
ggcaaactaggcaaagggtcctcgtggcctcctcctctccagactccagagtccagaccgtgacaagttcatcatccagccccgcttgcgcttgaccccttcaagtccaagcattccattccatccagtaccttccttgtcaccttgaccttccccctcccttcctagtcccctactcgccagtccacaggacctcgaccccgctaagcaagctccaagagcgatcgccgcagaagatcccgcgatgcaggccccgccggcgccctcctccgtcgacctgccgctggcggtggcgccgccgccggtgaaggcgccgaccccgcggcccccgccgccggcctcgctgcagcccgagtccccgggggtcttcttctccgccgccgccgccgccgcgcccctgggcaccgcccaccgccgcatcgccatcgccgtcgacctctccgacgagtccgcctacgccgtgcgctgggccgtcgccaactacctccgccccggggacgccgtcatcctgctccacgtgcgccccacctccgtgctctacggcgccgactggggcgccgtcgacgtctccctccccaaccctagcgccaccgccgcctccgaggacggcgacggcgactgcgagaccgccgctgccgcgcgcaggatggaggacgactacgacgccttcacggccaccaaggccgacgacttcgccagcccgctcaaggacgccggcatcccctacaagatccacatcgtcagggaccacgacatgaaggagcgcctctgcctcgaggtcgagcgcctctcgctcagcgccgtcatcatggggagcaagggcttcggcgccgcgcggaggaccagcaagggcaggctcggcagcgtcagcgactactgcgtgcaccactgtgtctgccccgttgtggtggtgcgcttccctgatgacggctctgccgagggtggggaggccgctggtttgtccgccgcggttggtgctgaggatgtgctgcaccccgtgccggaggaagaaggcgagtaccatgacgctgcggaggagcacaaggatgcttgacctcgttgatgcattgtgaagtcctcttggattcaggttagcatggaattaaaatcttccacttgggttgtattattgttatacgatgggcatcatctatcgaactttttttttctcaatagtacgtcctgtacctgttcggtctttggctaaggcatcagtgctgcacatttctgctgtatgtgttgcacatcatatgtggtagttttttagaa

SEQ ID NO: 144528 - DNA, 3008 bp, Zea Mays
agtgctgcatgcaccgagcaagtgagctatagctaccgaccagcagcccagctaattcagtctctactagcagagctagtagccagctgcctgccactgactgatcatcgcgtcgaccagagcatggctcctaaggcgccggcgaataatggcgctgtcgtcgttgccggcggccatcacgggggcagcaccgacgtcggcggcgttgccgggggcgcgacgacgacgactgtgccgacgtctgtggcggcgaacggcaacggcaagcagcacggcacgaggaagcagaggaggcctgcagcggtagtcgtcagcccgatggacaagtactggacgcccgtcgacgacaaggaggcggcggaggccgtcgacgacggcggcgaggacgggcggcgcccgctcctgttccggacgtacaaggtcaagggaatcctcctgcacccctataggttgttgaccttgctgagattgattgcaatcatcctattcttcatatggcgtatccggcatccgcatgccgacggaatgtggctctggtggatatccattgtcggagatttctggtttggtgtcacttggttgctaaaccaagttgcgaagctcaaccctaccaagcgtgtcccagacctttccctcttgagacaacagttcgatctccctgatggcaactctaatctccctaggcttgatgtttttatcaacaccgtcgatcccataaacgagcctatgatatacaccatgaactctatcctgtccattcttgccgtagactacccaatcgataggactgctacctacctctcggatgatggagggtccataatccattacgagggcttgcttgagacagcaaatttcgcgacactctgggttccattttgccgaaaacatagcattgagccgagagcccctgagagctattttgctgtgaagtcgcgcccatacactggaaatgtaccagatgagtttgctgatgatcatagacgcatgtctaaggagtatgatgagttcaaggtgcgtttggatgcactttttactaaaatccctgaacgctcagatgcacacaatgcagaggccaaggaaggtgtaaaggcaacctggatggcagacggaacacagtggccaggaacatggtttgaccctgctgaaaaccacaagaaagggcaacatgctggaattgttaaggttatgttgaatcacccgggcgatgaacctcggtttggtggaccagcaagtgctgaaacccctctggacttcagtgccgttgacgtgcggctcccaatgctcgtctatatctcccgtgagaagagtccaagccatgaccaccaaaagaaagcaggcgccatgaacgtgcagctgcggatctctgcgcttctgaccaacgctcccttcatcatcaattttgatggtgaccactacgtcaacaactcacaggccttccgagctgcgatgtgcttcatgctggaccggcgggatggcgagaacaccgcttttgttcagttcccgcaacgctttgacgatgtcgacccaacagacaggtactgcaatcacaaccgtgtcttctttgatgccaccttgctcggcctaaatggcatccagggaccctcctatgttggcaccggttgcatgttccgccggatcgctgtctatggtattgatccacctcgttggagaactgatgccttcaagcttgtggacaaccccagcaagtttggcagctcaatgctcttcatcaactccataccatcggctgcgaaccaagaatggtccatggcgtcaccaccggcacatgaggagtcggtcatggaagagctgaataatgtcatgaagtgcgcatatgaagagggcactgagttcggaaaggaaatcggctgggtgtacaacattgctacggaggacgtggtgaccggcttccgagtacaccggacagggtggcgatctatgtactgccgcatggagccggatgccttccgtggcactgcaccaatcaacctcacggagcgcctctgccagatcctgcgctggtcgggcggctcccttgaaatgttcttctcacactgcccgctccttgctggccgtcgactgaacttgatgcaacggatcgcctacaccaacatgacagcctacccaatctcatcggtcttccttgtgttctacctcctcttccccgtcatatggatcttccgtggcgagttctacatccagaagccgttcccgacatacgtgctgtacctcgtcgtcatcatagcaatgacagagctgatcggcatggtggagatcaagtgggcaggcctcacgctgctggactggatccgcaacgagcagttctacatcatcggggcgacagccgtgtacccgttagcgacgctgcacatcgtgctgaagctagtccttcgcgggaacggcgtttcgttcaagctgacggcgaagcaggctacgagcgccgtgaacgagaagtacgctgagatgtacgtggtgcagtggacgccactgctgatccccacaatagcggtgatcgccgtgaacgtcggcgcgatcggggcggcgatcggcaaggcggtcgtcggggggtggtcgctcctgcagatggccgacgcgtcccttggactggtgttcaacgcgtggatcctgctgctgatctacccgttcgcgctcggggtgatggggcggtggagcaagaggccctatatcctgttcgtcctgttcatgattgggttcgctgtagtggcggcggtggttgttgccatccatgctgcgcgcactggttctgttcggttccattccggacattcaggcggtgctagcttccctacaagctgggggttttagatcgcgttcatcattggttagtggcattggttgcaggttgttccattagctgagagcttcttcgctgtggagttcctacttgatgtaaatcgtgcattgattgtacatgtttgttcagtggatggtttgtaaggaacaaaaaatggtggtaaagtgaaagcacatttctgcctcgattt

SEQ ID NO: 144529 - DNA, 2763 bp, Zea Mays
ctagaactaggcgtggctcaccgttcgagatggccgcggcagtgactcgccgggtcggtctccacgtcgaggcgaccaatggcggcgccgacgacgagagcaggcgcaatagctcggcagctgaccactcgccagtggccaagcggatcaacgacgccgccgccaacgccaagcgcaacgacgtctgggtggccgcccaggagggagaaatgcctgcagctgcaggcaactccagccagccgcccctgctgttccggaccatgaaggtcaagggcagcatcctgcacccttacaggtttgttattcttctgcggctggtcgccatcgtcgcattcttcatatggcgcatccggaaccggaaccgcgacggcgtgtggctctgggccatgtccatggtcggcgacgtctggttcggcttctcgtgggtcctcaaccagctcccgaagctgaaccccatcaagcgtgtcccggacctcgccgccatcagagaccagtacgagcagccttccgcctccggcggcgagtccaacaacaagctgcccggcatcgacgtcttcgtcaccaccgtcgaccccgtagacgagcccatactgtacacggtgaactccgtgctctccatcctcgccaccgactacccggtcgagaagtacgcctgctacctctcggacgacggcggcacgctggtccactacgaagcgatgctcgaggttgcgagtttcgccaggctatgggcgcccttctgccggaagcatagcgtcgagccgagagctccggagagctactttggagtgaagaggcgccaaccgtacacgggaagcgtgcagggagagttcacaagcgatcacaggcgcatgcgcagggaatacgaagagttcaaggtgaggatcgactctcttttcagcaccgtctgccaaagatctcaagcgtacaacagaaagcatgccaaggacgacgaagctggtatggtgatgaaggcgacgtggatggctgacggtacgcagtggcctgggacatggattgagcaagctgagaaccatagaaaaggacaccacgctggaattgttaaggtcgtactaaaccatcccggccataaaccagagctcgggtcgccagcaagcatcgacaatccatttgacttcagcaacactgacacgcgcctccccatgctcgtctacatgtcccgcgagaagcgcaccggctacaaccaccagaagaaagccggcgccatgaacgcgatgctccgggtgtccgccttgctctccaacgcgccgttcctcatcaacttcgactgcgaccactacgtcaacaactcgcaggctttccgcgccagcatgtgcttcatgctggacccacgcgacggccggaacacggctttcgtccagttcccgcagcgcttcgacggcgtggacccgacggaccggtacgcgaaccacaaccgcgtcttcttcgacggcaccatgctctccctcaacggcctgcaggggccttcctacctcggcaccggaaccatgttccgccgtgccgcgctgtacggcatggagccaccgcggtggagaacgactggcagcgtcaaggtgatagacgacgacgacgaccacaagggcaaggagtacggcagatcgacattgttcagaaacgcagtactagacgacgccgcgaaccaagaacgatctatcacgccagtgttcctcgatgacgacgagacgacgacgatcagcagcgaggtggcgtcgctgatgacgtgcgcttacgaggacgggacaacatgggggagagacgtcgggtgggtgtacaacatcgcgacggaggacgtggtgaccgggttccgcatgcaccggcagggctggcgctccatgtactgctccgtggagccggccgcgttccgcggcaccgctccgatcaacctcaccgagcggctcctccaggtgctccgctggtccggcggctccctcgagatgttcttctcccacagcaacgcgttcctcgccggcgctcggatgcacccgctgcagcgcgtggcgtacctgaacatgtccacctacccggtcgtcaccgtcttcatcctggcctacaacctgtttcccctgatgtggctcgtctccgagcggtactacatccagagacccttcggcacgtacgtcctgtacctcgtggcgaccatcgccatgatccacgtgatcggcatgttcgaggtgaggtgggcgggcatcacgctgctggactggtgccgcaacgagcagttctacatgatcggcgcgaccggtgtgtacccgacggcggtgctgtacatggcgctgaagctcgtcacggggaaaagcatccacttcaggctcacgtcgaagcagacggaggcctgctccggcggtgacaagttcgccgacctgtacgtcgtgaggtgggtgccgttgctggtcccgaccatcgcggttctggccgtgaacgtcgcggcggtgggcgtggcggtaggcaaggccgcgacctgggggctgctcacgcagcaggcgcagcacgcgctgcttgggatggtgttcaacgtgtggatccttgtgcttctgtacccgtttgcgctcggcgtcatgggacggtgggggaagagacctgccatcctgttcggtgtgctggtgatggccattggtgcggtcgctgtcgtgtacatcagcttccgtgccacgtactacccaacaggatggtcagaaatggaaactacttctgctcttggtaaggcggaatcattcttttaatgcactactctatacttggtgt

SEQ ID NO: 144530 - DNA, 1418 bp, Zea Mays
accaagtggttgatgagcaaaggacaggtgctgacatggacaacatatgatacacttctgctcgcacttcttatggataaacgggtagatgaagctgagtcagtttggaacactgtaatacagactcatacccgctcagtgcccaagaggttgttctctcggatgatcttgatctacgacattcaccagcgtccagataaagttttggaggtatatcttacccatctacaccttcttgtaggattaagcgacgttatccccgcctcccctcccctcactgtcattgaatatgtggctcagtactggctttctttatatcccaactatattcgctgaccgggacatgaataattctatggcaataaattatgagtcaaaagaaataattcgatgataataaattacgagtcaatctttccactggaaccaaaattatgagttgactgatgcttaatttctgaaaatcacgcaaagtcatgtgctgttcaatgttcaaggctaagcagcattcatgtggtcaccgtcaccgtcacccatccagtactgttcatggagcctaaccataagcgacaggttattcatcataactaacaggccatatgggaacaagatgggaagcggttccttgtatgtggtctagcgggcctgtttccattacacttgtctagctggctgctcagatttgtagcttaccttttttctgttcagaaacagatgcctggaagcctttactgtgttcttgttgccaatttcagatattcgcggatatggaggaattaggtgtgcgtccggacgaggatacaacgagacggatcggaaaggcattcgtggcttccggccaagaagaaaaagagaagcatgtcctagagaaatacttgaagaagtggaagtacatccatttcaacggcgagcgcgttcgcgtgcggagggacggaccattggtgtagtgcccgttttctgaaaaatgctcgaacctatcagagtatcgtgccggtaggcggtagggcaggggcgaagctgttactgccgatgtgacagtcaggcacatggatatcggcactagtccctatcctatgtggaatggaacagaaactggagattggttccatggctctagcctgtggaggagacgagcggatagggggtggctggctactaccggcgagatagtgatttaataggcactacataggcgtccagtgattttgatggctttaacttgcgtatgtgtccgcggaatggtcccgtgctattttggtgatttgtgcttgtgaaattgtgaacacccactggaaagtgtgtatcatgagagggacaatacctgacggctgggtccatgtcttgctgatttcacgcaacgaaccattttctgtttgttgcggtgccccggggtttacgtacttcttctattcttttga

SEQ ID NO: 144531 - DNA, 120 bp, Zea Mays
gtcgatattgtcagattgggagtgagttccttagttgctgtaggcttaaagataataaagcttccgagttactcctgaaaggaaaacgaatacctaggttccccagtttgtaggtcagga

SEQ ID NO: 144532 - DNA, 2874 bp, Zea Mays
tcattaggccacgaagtggagccttgctgtccataaagacttctgtacccaactaccaccgcaaccaattactccagaagtccaaatccctctctcctccctcccagcaccagccctggctgctccaccgagctcccatccatggctcctgtcttcttccttctacctctcctactcggccagatccttctctgcgcagccggcgacaccatcaactcgtccacacccttgtccggcgcgcagaagattgtgtccaagggcaacaagttcaccttgggcttctacaccccaccccaaggtaccaacacctcctccaaccagggtaactactacatcgccatatggtacagcaacataccactgcagacgacggtgtggatggccaaccccgatctgccggtggctgacccgaccaccgccgccttgaccatcggcagcgacggcaacctcgtcctccttgatcaatccaagaatcggcaggtgctgtggtcgacgaacataagtactagctccaattccaccatcgctgtcctccaggacggcggtagcctcgacctcagagatgccaccaattcatccatggtttattggcgaagcatcgatcatcccaccaatacctggcttcctgggggcaagcttgggctgaacaagaccactggtgtgagccagcggcttgttccatggactaacaccgccaacccctctcctgggctgttctcactggagttggatccaagaggcacgacgcaatacttaattcagtggaatgattccataacatactggagcagtggtccttggaataataacatctttagccttgtgccagagatgacctctggttacaactatgacttccagttcatcaacaatgccaccgagagctacttcatctactcaatgaaggacaacagcatcatctcgaggttcatcatcgatgtggatgggcagatcaagcagctgacatgggtgcctgcctcccagtcatggatcttgttctggtcccagccaaggacacagtgtgaggtgtacgcactgtgtggggcctatggtagctgcaacctcaatgcactgccattctgcaactgcatcagggggttcagccagaaggttcagagtgattgggacctccaggattacagtagcgggtgcaaaaggagagtaccattgcagtgccagaccaattcgagctcttcacaggctcagcctgataagttctataccatggcaaatgtgaggctacctgataatgctcagactgctgtggctgcgagctctcaagactgtcaagtggcttgtctgaacaattgctcctgtaatgcatatacttataatagtagtggctgctttgtttggcatggggatctgattaaccttcaggatcaatacagcgggaatggaggaggcacactcttcctcaggcttgcggcttctgaactgccaggctccaaaaggagcaaggcagtgatcattggtgcagttgttggcggagttgctgcagttttaattgtcctttctattgtggcatacttcctatttcagaaataccgccgagagaggactctcaggatacccaagactgctgggggcacactgatcgcctttagatacagtgatctgcagcatgtcactaataacttctcggagaggctgggtggaggtgcctttggctcggtgttcaaagggaagctcccagattcaacagccattgctgtgaagaggctcgatggagttcaccaaggggagaagcaatttcgtgctgaggtgagcaccattggcaccgtacagcatgttaatttggtccgcctccttggattttgctcagaaggatcacggaggctgcttgtgtatgagttcatgccaaagggctccctggacctgcagctattccttggtgagacaacagcactcagctgggctaccaggtaccaaatagcacttggaacagcaaggggcttaaattacctgcatgaaaaatgtagggattgcattatacactgtgatgtcaagccagaaaacatactcttggatgagtcatttgtgcctaaggtggctgattttggtctagcaaagctcttaggcagagacttcagccgtgtattgacaacaatgagaggaacaaggggttaccttgcgcctgaatggatcagtggtgtggcaattacagcaaaggcagatgtctttagctatggcatgatgctcttcgaactcatatcaggcaggagaaattctgaccacggagaacagcatggatccacctttttcccaacctttgctgccagcaagcttcatgaaggagatgtgcggaccttgttggaccccaagctgaatggagatgcaaatgctgacgaactcacaagagcttgtaaggttgcctgttggtgcatccaagatgacgaaagtgctagacctacaactggtcagattgttcaaatcctcgagggattccttgacgttaacatgcctcctgttccaaggtcattgagagttcttggtgaaagccctgatgttataaacttcttttcagatatatcttcaaaccagacttcccagacacagaacagcacaacttcccagacacgcagtactacttcaggcagttcacatctccaaagtccatagatcagataacctgcaatttattagggcaatacttgaagagcatgagtaaatctgtacatgattagaacctaatatactcagtttttgtatcactatgcttcagtactgtaaatttagtgcagaatgtcataaccaaaacaaggaaggtactactgttgcatttacattacacatgcaagattccccattttctcttactaaatgtaaaaaatcaagatgatatcatcgaagttgattgattgagatgcttaa

SEQ ID NO: 144533 - DNA, 95 bp, Zea Mays
attaatgcaaaacattataatttatacacattgtcagatgtaagaagttattatgtgtacatcaaaatgaacacaattgtacaatgaatgatctc

SEQ ID NO: 144534 - DNA, 1305 bp, Zea Mays
attagacgttaaaaacccgacgcgatacggaacccctgcaactaagcggaaagcttcaaagggagggagggagggagggacagggagagccagagaggagggagaagaaaatggtcgcggcggcggcggaggtgtcgacggcggcgacggctagcagtagccccccggcggaggagggggagcggcgggacgagagcgagagcgacggggagatggcggggctggcggccgtgctggacttcgacatgctgtgcgcgtccgtggcgctgtcggcggagaggaggaaggccggcgcggcgctggcgggcgcggccggcgactgcggcggtggaggcggaggggtgcagaggatgtgggagggcgacgtcgtgctggattgcctagacgaccggcgaatcgcgctcgagacgtcctgctgcccatgctaccggtttggtaagaacatgcggagagccaatctcggatcttgcttccttcagggaatggtttactgcattctgttggctgctgtcctaatcagcctaattgccttttctgtaacaaggcatcatatatatttatatatgggaatcggctctgtcctcttgatagccatctatactggttatttccggagaagaatcaggaagcaattcaacattcggggtactgagagcagtctggacgattgtgttctccatctcatatgtccttgctgtacgctgtgccaggaggctagaactttggagatgaataatgtccagtgtggtgtctggcatggccgaggtgataccatttgtttagggagcaacggtgcaggaaacaaggctttcgctgccctgaacaaggcctctctcgtgcctgtaaagtccccggggctgtgtggcatggatagatcgtcaagcgcagctgacgagcagcagccgcttgtcccaccggaccaactggagcaggtttaggtattctctgtcgccacgacctctgcactttcctagaagggcttggacagcgccgacggaaaaaaaaaatcgtcctctgccggattattaggcgcctgcatctgcatccattggtcccgagaactggactttgcagctaccgtacatgggtgatgggcgcagtcgacctgctgctggctgctgctgttgtaaaattcagtgatagattttctcttgcagtcgaattgtttaggtcgaagactgtatcttcataatgtcacgacacgtgctcaggccttttgcctgaatccaactgtaaatttcagatccaatctagcagttcgagttacatagacaggaatgagatggtaatgttcttttcaccggc

SEQ ID NO: 144535 - DNA, 1364 bp, Zea Mays
attagacgttaaaaacccgacgcgatacggaacccctgcaactaagcggaaagcttcaaagggagggagggagggagggacagggagagccagagaggagggagaagaaaatggtcgcggcggcggcggaggtgtcgacggcggcgacggctagcagtagccccccggcggaggagggggagcggcgggacgagagcgagagcgacggggagatggcggggctggcggccgtgctggacttcgacatgctgtgcgcgtccgtggcgctgtcggcggagaggaggaaggccggcgcggcgctggcgggcgcggccggcgactgcggcggtggaggcggaggggtgcagaggatgtgggagggcgacgtcgtgctggattgcctagacgaccggcgaatcgcgctcgagacgtcctgctgcccatgctaccggtttggtaagaacatgcggagagccaatctcggatcttgcttccttcagggaatggtttactgcattctgttggctgctgtcctaatcagcctaattgccttttctgtaacaaggcatcatatatatttatatatgggaatcggctctgtcctcttgatagccatctatactggttatttccggagaagaatcaggaagcaattcaacattcggggtactgagagcagtctggacgattgtgttctccatctcatatgtccttgctgtacgctgtgccaggttatatctgcaaaagcccctatctgcatcccaatattgctaccttcctatgtttggccattgtaaaactcaactgtaatgtcttatgaattcaggaggctagaactttggagatgaataatgtccagtgtggtgtctggcatggccgaggtgataccatttgtttagggagcaacggtgcaggaaacaaggctttcgctgccctgaacaaggcctctctcgtgcctgtaaagtccccggggctgtgtggcatggatagatcgtcaagcgcagctgacgagcagcagccgcttgtcccaccggaccaactggagcaggtttaggtattctctgtcgccacgacctctgcactttcctagaagggcttggacagcgccgacggaaaaaaaaaatcgtcctctgccggattattaggcgcctgcatctgcatccattggtcccgagaactggactttgcagctaccgtacatgggtgatgggcgcagtcgacctgctgctggctgctgctgttgtaaaattcagtgatagattttctcttgcagtcgaattgtttaggtcgaagactgtatcttcataatgtcacgacacgtgctcaggccttttgcctgaatccaactgtaaatttcagatccaatctagcagttcgagttacat

SEQ ID NO: 144536 - DNA, 849 bp, Zea Mays
attagacgttaaaaacccgacgcgatacggaacccctgcaactaagcggaaagcttcaaagggagggagggagggagggacagggagagccagagaggagggagaagaaaatggtcgcggcggcggcggaggtgtcgacggcggcgacggctagcagtagccccccggcggaggagggggagcggcgggacgagagcgagagcgacggggagatggcggggctggcggccgtgctggacttcgacatgctgtgcgcgtccgtggcgctgtcggcggagaggaggaaggccggcgcggcgctggcgggcgcggccggcgactgcggcggtggaggcggaggggtgcagaggatgtgggagggcgacgtcgtgctggattgcctagacgaccggcgaatcgcgctcgagacgtcctgctgcccatgctaccggtttggtaagaacatgcggagagccaatctcggatcttgcttccttcaggtacagataacctattataacctattcaccagagaacgagcgtatttagtgcattttctgctgttactttagtgtccaaaagttgtagtcttattgctgtacaggtatgttgtgtaagcttcaagtgactacgtttcttgttgccttcctaataaggcgtgaaatgcaagcagccaccatgttatttggacagcctaggaaagctgctattttcagccttgtgcagttgtgcctataccatgtagtgcttggtgtgtagcttgtttgagttgacctggcattttgaacagcattttggataatcccttattcctgtggtatgtcttagacctggtctaacttagtgacctgtcttttttatttgacgctg

SEQ ID NO: 144537 - DNA, 1355 bp, Zea Mays
aggaaaaatagcaaattacagcaaaatttaagcaacatcaacatattcagaccatcacgagaaacattggctatcacgaaaatgccgctaagttaaccgactaccaattctgatcacaaaggagtatttggtcagaagcccgcaggaggcattaagttcaacctacagttcccccaactaccaactaatattggttagcagacttctccctgtgatcgcaaaaatattccctgatcctcttatgggggcctagctagctgcttcccacccatgacccttcattgacagtagtttacaaccagcatcaactctgaaaaaatgggtgacccatcgccttccatcttataaatagtgcacgatcaggtacagcaagtaggagtagcatcagaggaatttttcacagtacatcaaaaaggccgatgggtatttgcgtgcgaacaaagtaaactgcttggcggccgcacccattggtaataataactcatgtagctacatgaaggcatccaactttgatcgcttaagatgatgtggtctgaaatcaaccaattttaaactcgaagttgacttaacctcattcaagaatgaatcccctttgtctgattttatggaatccagaacagcaccaaggatgtcagcggcgatgccatctcgtattagataccctggttcttctccaacttcttgaatcaatttacctacctcttccaagagcaatatgctttcctccacaaaccttgcaaaaagtcgtccaaggtactcggtggcccttggagcatcacttagagtatcttccaataaggtaagaacagatgaaaggctaaaataataatcatttagtcagtaatggtacaatacggacagagtgacgatatactagaaagtgtgagaaagcacctacccatcactgagttgttgcttgctcaacaaattatgtcgaccactgcaaaggctgacgagaagtttagccaacaactctctttccatgtcttttctctcgaaggaatcatttacccaaagtgatacaacagaaggatagaaactcggagcattcagctcctcaatacacaaagcaacctccttttcatcttttgcactgcccaaacagaagcatataatgttagaaacaaaattggacagtgcgggggtgccaaaactagctctttatgacatagcaggagaattagaactatagaatgtacaggcaaaacaaacagtacaaggaaagcatcaatccataatattagtttcaaaaacatagtttgcagatatctctggagtaaaactctctgggagtaataacatgtttcctcagctatttctaaatgtgtacactccaatacataagaacaatatgc

SEQ ID NO: 144538 - DNA, 360 bp, Zea Mays
tctaaaatatcaaggccctgttgcgttgcggcccatcatacatgaatacatgatcggatccatggtccttgtacatgcatgcatgcatggtccagggcgacgtgcgcgcgcgtgctactccactggtaatacatgtacgtctgcgcgtggcgaatggcagtagcagcaggcccgtcacgagtcggcgcgaaatcggatcgccgtgcacccatcaggcggtcggacggtgcgacactgcgactgcgacgggccggccggctggtcgagcgagatctgccgtgcgattactacaatactactggaggggactcctctaccccgaggaccgccggagcgagcgatggagggaggcccgccgaa

SEQ ID NO: 144539 - DNA, 1635 bp, Zea Mays
attaaaggccgtctcccaaccagacaaagctagtactagcagtagcactgcgccgcagcaatggtggtttccctcgccgaataaatctcaccggtcgcgcttcttggcgtgttcctccgctcgcctgggcttcgatctccagccctcgcgtgagcgcgggtgcggccgcggcgccgtggtcatggcgacggaggagtgggagctgcgggaggaggacgcctacgcctacgagttcgagttcgacctcgagaaccccttcaccagccccgccgacgagccgatcgccagtctcctcgacgccgagggccaccacgcgccctctatctccgccgcggcctcggccacccgccgcgccgccgccgccttcatctccaaggtgcgtttcggcggcgagctcgccgtgcacccgcgcgtcgcctacctcgcgctcaactacgtggatcgcttcctctccaagaggcaattggcgtgcgagcagcagccgtgggcgccgcgcctgctcgccatcagctgcctctccctcgccgccaagatgcagcgcgtcgcaacattctccaccgccgacattcagagggacgaagacttcatgttcgacgcggtgaccatccgtcgcatggagcgggtggtgcttggcgcgcttgagtggcgcgcgcgctccgtcacgccgctcgccttcctcggcttcttcctctccgcatgctatccgccgccgcagcaccccccacaggtagccgctgtcaaggcgcgcgccgtcgacctccttctccacgctcagcctgaggtgaagatggcggagttctcaccctccgtggtggcggcggcagcgctgctggccgccgccggagaggtcgccgccgcgaacctccacgcgttccaagccagcttggccgcctgtccctttgtaaatagcgagaagctgcgggagtgcggtgaggtgctggcagcggcgggcggcgtcgggcgggggcgagccgctccgagcgcggacacgcctgtgacggtgctcggtcaccagcgcagcgccagctccgcctcggagaccgactggattaacggcggcgacgcgaagaaacgctgcatgggcccaccatcgcaatgggggtaggcggcaggccgcaggccgagtcaagcgggtattgtcgcagctggatcgaagagtcggagattttactgcagccctgctcctttttttccaaattgtttttaccctttttcttttcccaattctttccttctactttaatgctctcgaggtaaagtgacgaggagtggtggtggtggctgtcatttactagtattcctttttcctagcatgtctttattttagcctagttatggtaatttttgcggcggtgctttggaaggtgaggacggtggatgaacatactgggatggaagagggggatgatgtgaaatggtaaaaaaaataaaaccaaaaggctggcatgttgctttgtcacctctgccgatctggtttctcttgcgtctgctttcgatgatgatttctcattatgcggtcgaatttctggcatgatatttctgttttgccattttcttgccgtgtttctatttcatagcccactgtagtaaaagttttaaccgttctaaaaacaattctttcaaaaccacaacgac

SEQ ID NO: 144540 - DNA, 1626 bp, Zea Mays
attaaaggccgtctcccaaccagacaaagctagtactagcagtagcactgcgccgcagcaatggtggtttccctcgccgaataaatctcaccggtcgcgcttcttggcgtgttcctccgctcgcctgggcttcgatctccagccctcgcgtgagcgcgggtgcggccgcggcgccgtggtcatggcgacggaggagtgggagctgcgggaggaggacgcctacgcctacgagttcgagttcgacctcgagaaccccttcaccagccccgccgacgagccgatcgccagtctcctcgacgccgagggccaccacgcgccctctatctccgccgcggcctcggccacccgccgcgccgccgccgccttcatctccaaggtgcgtttcggcggcgagctcgccgtgcacccgcgcgtcgcctacctcgcgctcaactacgtggatcgcttcctctccaagaggcaattggcgtgcgagcagcagccgtgggcgccgcgcctgctcgccatcagctgcctctccctcgccgccaagatgcagcgcgtcgcaacattctccaccgccgacattcagagggacgaagacttcatgttcgacgcggtgaccatccgtcgcatggagcgggtggtgcttggcgcgcttgagtggcgcgcgcgctccgtcacgccgctcgccttcctcggcttcttcctctccgcatgctatccgccgccgcagcaccccccacaggtagccgctgtcaaggcgcgcgccgtcgacctccttctccacgctcagcctgaggtgaagatggcggagttctcaccctccgtggtggcggcggcagcgctgctggccgccgccggagaggtcgccgccgcgaacctccacgcgttccaagccagcttggccgcctgtccctttgagaagctgcgggagtgcggtgaggtgctggcagcggcgggcggcgtcgggcgggggcgagccgctccgagcgcggacacgcctgtgacggtgctcggtcaccagcgcagcgccagctccgcctcggagaccgactggattaacggcggcgacgcgaagaaacgctgcatgggcccaccatcgcaatgggggtaggcggcaggccgcaggccgagtcaagcgggtattgtcgcagctggatcgaagagtcggagattttactgcagccctgctcctttttttccaaattgtttttaccctttttcttttcccaattctttccttctactttaatgctctcgaggtaaagtgacgaggagtggtggtggtggctgtcatttactagtattcctttttcctagcatgtctttattttagcctagttatggtaatttttgcggcggtgctttggaaggtgaggacggtggatgaacatactgggatggaagagggggatgatgtgaaatggtaaaaaaaataaaaccaaaaggctggcatgttgctttgtcacctctgccgatctggtttctcttgcgtctgctttcgatgatgatttctcattatgcggtcgaatttctggcatgatatttctgttttgccattttcttgccgtgtttctatttcatagcccactgtagtaaaagttttaaccgttctaaaaacaattctttcaaaaccacaacgac

SEQ ID NO: 144541 - DNA, 1379 bp, Zea Mays
attaaaggccgtctcccaaccagacaaagctagtactagcagtagcactgcgccgcagcaatggtggtttccctcgccgaataaatctcaccggtcgcgcttcttggcgtgttcctccgctcgcctgggcttcgatctccagccctcgcgtgagcgcgggtgcggccgcggcgccgtggtcatggcgacggaggagtgggagctgcgggaggaggacgcctacgcctacgagttcgagttcgacctcgagaaccccttcaccagccccgccgacgagccgatcgccagtctcctcgacgccgagggccaccacgcgccctctatctccgccgcggcctcggccacccgccgcgccgccgccgccttcatctccaaggtgcgtttcggcggcgagctcgccgtgcacccgcgcgtcgcctacctcgcgctcaactacgtggatcgcttcctctccaagaggcaattggcggtaaggactcgtcactcgcgagctatgggtctgttatctgtaaaggtttgttggggatttcggtctgatctaataatatcccctttggttccatcaagtgcgagcagcagccgtgggcgccgcgcctgctcgccatcagctgcctctccctcgccgccaagatgcagcgcgtcgcaacattctccaccgccgacattcagagggacgaagacttcatgttcgacgcggtgaccatccgtcgcatggagcgggtggtgcttggcgcgcttgagtggcgcgcgcgctccgtcacgccgctcgccttcctcggcttcttcctctccgcatgctatccgccgccgcagcaccccccacaggtagccgctgtcaaggcgcgcgccgtcgacctccttctccacgctcagcctgaggtgaagatggcggagttctcaccctccgtggtggcggcggcagcgctgctggccgccgccggagaggtcgccgccgcgaacctccacgcgttccaagccagcttggccgcctgtccctttgtaaatagcgagaagctgcgggagtgcggtgaggtgctggcagcggcgggcggcgtcgggcgggggcgagccgctccgagcgcggacacgcctgtgacggtgctcggtcaccagcgcagcgccagctccgcctcggagaccgactggattaacggcggcgacgcgaagaaacgctgcatgggcccaccatcgcaatgggggtaggcggcaggccgcaggccgagtcaagcgggtattgtcgcagctggatcgaagagtcggagattttactgcagccctgctcctttttttccaaattgtttttaccctttttcttttcccaattctttccttctactttaatgctctcgaggtaaagtgacgaggagtggtggtggtgg

SEQ ID NO: 144542 - DNA, 905 bp, Zea Mays
attaaaggccgtctcccaaccagacaaagctagtactagcagtagcactgcgccgcagcaatggtggtttccctcgccgaataaatctcaccggtcgcgcttcttggcgtgttcctccgctcgcctgggcttcgatctccagccctcgcgtgagcgcgggtgcggccgcggcgccgtggtcatggcgacggaggagtgggagctgcgggaggaggacgcctacgcctacgagttcgagttcgacctcgagaaccccttcaccagccccgccgacgagccgatcgccagtctcctcgacgccgagggccaccacgcgccctctatctccgccgcggcctcggccacccgccgcgccgccgccgccttcatctccaaggtacggggtgcccgcacgcgccgccgcattcgctctcgctgctctctcggttctctgtttgggatttccgctgtttcctgacccgatcggcctcgatcggtacaggtgcgtttcggcggcgagctcgccgtgcacccgcgcgtcgcctacctcgcgctcaactacgtggatcgcttcctctccaagaggcaattggcggtaaggactcgtcactcgcgagctatgggtctgttatctgtaaaggtttgttggggatttcggtctgatctaataatatcccctttggttccatcaagtgcgagcagcagccgtgggcgccgcgcctgctcgccatcagctgcctctccctcgccgccaagatgcagcgcgtcgcaacattctccaccgccgacattcaggtactagatttcggtgcctactgcttgcgatttggtgagcgattgctctggagattaaagcccattgcggtgtttttgtgttgcggttgccttgttgcagagggacgaagacttcatgttcgacgcggtga

SEQ ID NO: 144543 - DNA, 1633 bp, Zea Mays
cttgcgattcccaaatcccgatgcgccctcacaactagcacctccgcctcgcggctcgctccatcccttccaccaccaccgcctcaccactcaccagtcaccactcccctatcacgggacgggaccaccgccgccgcgtcctatgacgtcgccgtcctcgcaccacccggactccacctcggcgtcctcgacccctcgcgccggtgtcgggaacggcggcatccaccacctccatccgccatctctgcacccggcgcccgcgcctaccccggctgctccccccgcgcaggcgcaggcggcgcacgggggcccgcaagtgcgcctcatgtgcagcttcggcggccgcatcttaccgcgccctggggaccgccagctgcgctacgtcggcggggagacccgcatcgtctccttcccgcgcgccgtgacttccttcgccgccctcgtcgccgcgctcgccaaggtcgcgcccgtgctcttcgccccgggggcgcccaggccgtcgctcaagtaccagctgccccaggacgacctcgactcgctcgtctccatcacctccgacgacgacgtcgaccacctcatggacgagcttgaccgcatccaagacctctccgccaacgtcgccaggccaccccgcctccgcgtcttcctcttcgcgcccgcgcctgacgccgccttcggctccgtcttctccggcaccaccagtgaggccgcctccaccgaccagtggtttgtcgacgcgctaaacgcccccgcgccgcagccgcaccccaccgagcgcggccgatccgaggcctcctcgatcgtctccgaggttcccgactacctcttcggcctcgaaaccacgtccggtgagcccagccccggccccgcggcggcccgcgccaagtccgacgccacggagactccgcgccaccacgacgacgacgaatgcgacgtgccaccttccgcgcgccagatgccctacgtcgtagagggagcgtcatcgtggcccgccccgccgccgccgtacatggcgcagcctgtgtactacttccccgtgccgccgccggtccactatctcgaaccgtctgcgcagggcggctacatgcctcgcccggtctaccacattgtcggtggcggaggaagcgaggcgcctggcggagatcttcacgcggccggcggcgtctacggcgtcccgcagcacatgcaggcgttcccgccgatgatgtacgcgccgccgcgcgcggtcgtctacaactacaactcggaggggatgccatcgctgcctcccgaaggtggggcacactcttcctaggcgcatcggcttcacatctctggttcctgattattattgcagatgcctgagttctgcgtgcgtattagatttttatcgattcgtcttggttggtgtatagatgagggaggcggatgatggatagatattattgcagttttcgtctagtggaaatatattcgtgaaatggatctatgagcatgatataatactaagtagtatagtatttggtgtgattaatcagtaccgagttaatgtaatgttggattcatatattctaggtggctctggtcttcttcctctggaagccaattttgggtattttatatttacataaactggatgttgggtgaatgttct

SEQ ID NO: 144544 - DNA, 110 bp, Zea Mays
cctatttctattgtatgtttgataatttgcacttccactccatccacaattttggttaattcagttaatatgagtttataactgggaatgtcattcagtagtataattta

SEQ ID NO: 144545 - DNA, 113 bp, Zea Mays
aaattttttagccgatacaaatatttttttagtgttatctccggccctaccgttagaagtatcctggctccgccactggatccatctattctcctcaagtccccttttgatca

SEQ ID NO: 144546 - DNA, 225 bp, Zea Mays
atgcagccagtgcgattggaagcggaatcttcggcgcaagatgaaccaaatgctgctaggcgcttgatcgcgaccagaccacacatcagactccaaaaaggacagggagacttcgcggtacaagtcgagaacggccccgcagaagatgccacccaggaggcgaagcccaagcaagttgcccaaagcgttttgttctggtccctcgagggcatcgcaccatcgtga

SEQ ID NO: 144547 - DNA, 730 bp, Zea Mays
cataaaaccagaaatttcggcttccctgctccaactataatataataatataatataataaccgaagcacttgtcagtatgttaatcttgtcctttcttccttgccggccactttggagtttggacgagtagttttgcgcctttacgtcatccgtttgcttccaagtcgcagcttttccggcgcgctttccgactttccgtagtcaaaacgctgtgaacctgtgaatgtgatgttccacatgtcagcaagaatcctattattattttttacacacacgtggttgtggtcccagctcccaaaccatactagtatctccctgccgatcaaagattagaatgggtctctgcactcgccagcagctgatccagccatccagggacatgtcagcaacgatgctgacagcatgtagagctagctgtacatggtccgatggtcgtatcggataccttcaattgtgggcattgtgccatataatttcagcggaactgctcttcgatcagtcagaaagaaaaaaacttttcccaccaaaatacaccgtccgtgattcagtttctagcctctctttgcatttcctgaacatttgcagcttttgtcctactgaactggaggaagaaaaatatacagattggtacacaagaacgtcgcagcattatatgctcacaaaactgtagaattcagttcagttcagttcagttcagctcagcgtgccttttcgctttccatcggttc

SEQ ID NO: 144548 - DNA, 565 bp, Zea Mays
taaccatatgtacaacgatgttcgctccctggtcaaagatgaacaatacaacaattgggattatccccaggtcacaggcctaaaatcaatggccatataggctggcaacctcctaaatcaagcaacctaatcaggcaacctaccctctaccgatttttgaccatatcatacactatcttcaggcttcaatgtaatataaacgcttgcgctcccacctgaaagatgagccaacaagaattgcatcttctgagactatgtggacattgtttctgcctgggaagctgctgctaatcttccattactctcaggtacaggtgatccgtgaacttcagcatccttcactccagaatgattgcctgcagcatccagctcacattctgaactgagctcttcagactggctcgatggagatgcatatatcaggttcagcatggcgtcaccgcagccacccagctcaatcgaagggcaagtaatgctgccatcctcatggacagactcttgttgaagcaaccggttcttgaacttatcttcagggttgctgttcgacatgtttccttgacgtatc

SEQ ID NO: 144549 - DNA, 1941 bp, Zea Mays
tataaacgagtgaacaagtcacgggagactgggagaggaaaggaacgaaccacacggcgtgcgtccctaggctccaccccccccccccccccccccactccatctccatctccatctagtcttcttccccgaaagggagaaagcacttgcctccgatccagcaccaccagtatgcaagccatcaagaagacgatcgttctgtaccccggtctcttcgtcagccacttcgtcccgatgatgcaactcgctgacgtcctcctggaggagggctacgctgttgcggtcgcgctcatcgacctcaccatggaccaggacgtcactttggcagccgccgtcgaccgcgtcgcctccgccaagccgtcggtcaccatccacaggctccctcggatccagaaccctcccgcgatcacggactgcggtggcgacggactcctctggtacttcaagaccgtgaaacgctacaacgatcccctccgtgagttcctctgctccctgcagcagcagcagcctgcccgaagcgtcgtccacgcggtgatcctggacgggccctccgccgacgcgctcgacgtcaccaaggagctcgggatcccggcctacaccttctacgccaccaacgcctccgccgtcgcggtgttcctccagcttccttggacccacgcggaaggccagccaagcttcaaggagctcggagacacccctctcagcatctccggcgtcccacccatgccggcgtcgtacctcatgccaccgatgctcgacgacccggccagcgagacgtacaagacgatgatgcgtgtgtcgcgccggaacccggagcccgaaggcatcttggtgaacacgttcgcgtcgctggagggccgggtgctgagagctctcagggacccactgttcctccccatcggcgacgacgggtgcaggaggatgcctccggtgtactgtgttgggccgttggttgtgggagccggtgacggcgacggcgtcggcgtcggcgaggcgaaagaaaagcacgagtgcctcgcgtggctcgacgagcaaccggagcgcagcgtcgtgttcctctgcttcggaagcttaggcgccgccgcccactcggaggagcagctcaaggagattgccgtcggcctggagaggtccgggcaccggttcctgtgggtggtgcgggctcctctccccaccgagggcgtggacccagggaggctgttcgacccgcgcgccgacttcgacctctgtgcgctcctgccggccgggttcttggagaggaccagagctcgcggcctcgttgtcaagctatgggcgccgcaggtgaacgtgctcaaccacagggccacaggtgccttcgtgacgcactgcgggtggaactcggtgatggaggcggtcacggccggagtgcctatgctttgctggcctatgtacgcggagcagaagatgaactcggtggtcatggtggaggaggccgggatcggtgtggatctggttggatggcagcagggactggtcaacgccgaggaggtcgagcgcaaggtaaagatggtaatggagttcaaggaaggggagcagctcagagcacgtgtgacggcgcacagggatgccgcggccgtggcctggaaggatggcggctcatcgcgcgcggcatttggtctgttcttgtcggacgtggacaaccatgtacacaaggccaagacatggagtagcgctaatggtcgcgatggcaaattgggtcaaagctgaaatgacttgtaagatgtggtatgtagaataacttgttaagatccatggaatgatcactgggaacgatcgttgtgtaagcaggcgcaggccttagctgtaagcgtgcgagtgagttttatggtctttctagattacgatacaatcgtaatttgttaggattttttttataaagtcgtatgagctggcagtggaaattgaaaaggtttaaacgtt

SEQ ID NO: 144550 - DNA, 1511 bp, Zea Mays
aggagaactcgaacagacatccgctccccgctcccgagtcccgagtaccgacctcgcggtctcggttcggctacgcccggtccctagagaaaggccacacacactgacacacccggacaccccccacttcttggctctcgcagtgtcgctcactcctgccgccaccatctggatcacgtcgccggcgccaatgtcggcgcacctcaccgtcgcgctgttgctcgcagtagccgccgcgtcggcccgcggctccgacgtgccgtcgttcccgctctcccaggcgcagtccccgtccaactcctcgtccccgtcgaacgcctcctcgccgccgtgtcacctcgacctctccgccgagctcttcggtggcgtggcagcggcgtgcggcgccagcggggggccgggctcgctcgaccgcggccgctgctgtcctgtcctcgcggcctggctcttcgcggcgcacgcgcgcaccgcgctgtccgtgcccccggcacccgcgccctcggcggtcgccggggaggaggggctggggcccggcgacgacgggcccatggtgccgtacgacaaccagaggtgcgtggacgcgctgggcgccgctttggagaagcgcggggtggcgctgccccggcccaacgcaacttgcgacactgtgctctgcttctgcggcatccggctccaccagatcggctcgctccgctgccccgccgcgttcgccgtcggtgctggcgctggcgccgcggccaagaacgccacgcccaccgccgccgtgaagggcctggagaagagctgccgcaacgcctcctacgccggctgctctcgatgcgtgcagtccctgcaaaagctgaaggggaacgtgagccgcgaggtctccggtgccggcggcgaccgcgcgcggcggatgctggggcgggactgccagcttatgggcctcacgtggctgctggccaagaacaagacggcgtacatccccaccgtctccgccgtgctgcgcgccatgctctacaccgcgcgcccgacggaggccgccggcgcggcgccgcggtgcagccccgaccaggagaacatgccgctggccgtggactcgctgcagttcgagcgcgccggcagcaccacggggtccgcggctgccaacgcgacgccgcgcggcgccctcctcctcagcctcgcgctcggcctgacgatcggccggtgggatgatgcgttcttgtgaaccaacgcaaagaggtctggaccgctgcagggcgtagggtcggtggtggaaccttgtcgatacacgtatcttgtagtgctagtcgttagcaggaggtactgtagcttattttgcatagcgaggatttggcagacatgacggcatgcatggctgtgaaggcgatcgtggtgctgcagatggctggcctctgcaaggggaatgttgatgtggcttttgacatttctaatctcggtggtttctaatcgtgtgcgattgaccacttctgtttttgtggatgaagaagtgctaatgcaccatttggatg

SEQ ID NO: 144551 - DNA, 192 bp, Zea Mays
atgggaatagtcattgaggccgagttgaactacattgccacgtttcgggtttcatgtcgaccatggaggttttccggtggactaaagccgaccgataaaaaagccgggaggcgggagatgcacatgcacgtgcagctctctgtcataaacaccaaatataagagcaagttagaccacgaagacaaggcataa

SEQ ID NO: 144552 - DNA, 1254 bp, Zea Mays
cattcattaccgatggggcgcgcgccgtgctgcgagaagagcgggctgaagaaagggccgtggatgcccgaggaggacgagaagctcgtcgcctacatcaagaagcacggccagggcaactggcgcaccctccccaagaatgccgggctcgcacggtgcgggaagagctgccggctacggtggactaactatctgaggccggacatcaagcgcggccgcttctccttcgacgaggaggagacaatcatccagctccacagcatcctcggcaacaagtggtcagcgatcgcggcgcggctgcccgggcggacggacaacgagatcaagaactactggaacacgcacatccgcaagcgcctgctccgcatgggcatcgaccccgtcacccacgcgccgcgcctcgacctcctcgacctctccgcgctcttcaagcccgccgccgccgccgcgtactaccccacgcaggccgacctcgacacgctccgagccttggagccgctcgccaactacccggacctcctccgcctcgcctccgccctgctctctggcccgccggcggcgcccgcgatcggcgaccagcaaccgcggcagcttctgccgtggattctgcaggcgcagatggcgcagcaggcggccgccgccgtggcgcaggcgcagctgcaggtggcgccgcaggccgaacagttcgtgcagcagcggcaggcggctggagccgcgtgccaaatgccggacctggtccacacgagcccgacggtgcagcagcaccagcagggccaggacgacatggccgcggcttgccacagcatgcagccgcagccgcctacgggcggctacgccgtcgacaccctcgacatcccagcgctgatgcagatggtgcaggccgacgacgcgtcgaacctgcagcagtggagcagcatgatcacaagcagcaccaacaacaacaacgtcggctccggcgtgtccacaccgtcgtccagcccggtgccgcgcttgaatcactccaccaccgccaccacgacgtacggcggcgcgagcgatgccgacgccgccgcgctgttcaacatgcagctatctgagctccttgatgtgaccgactacatgtaacaacgagctaggaacaaaaatcacgggagcacggacccgatccgtcgaaactgtgtgctaggtcctacacttcatcacgtgtaccgcaaggggcaaacgaaaatccatctcaggacggacgacgacgacgcatttttgtacaggatcatt

SEQ ID NO: 144553 - DNA, 95 bp, Zea Mays
cacgaacttaaacaaatgggcgggagcaagtacgcgcgcgccctgggctggcgtgtgcatgggccatgcactcgatcgattgcatttagggatgg

SEQ ID NO: 144554 - DNA, 3251 bp, Zea Mays
gcagtcgttgccgtcggtcccgccacacacccccatgccgcttctccacctctcgctcccgtcgcaccgcctcctcgtcggcggccgaggtcggctgttcttcccgtcgtctccccgtcgtatctgcctatctgtcagggcggctggggatgcggcggtgtcagttgcggcgggggcttacggactccccttccggccggagggagccgctcaccaccgcgagctctccgcggcagtggccgtcgtcgagcgcgcctgctgcctctgcgttgacgtgaagagatcactgttttcacgtcgcagcagtattcttgagaagaatgaccaaagtcctgttacagttgcagatttcggagtgcaggcccttattagtttgggtaatccatagcaaaatttcaaagttcagatttgtgactttgtctaatgccatattttgccatgttgctattgaaagagctccagagattgttcccatcgatacctctggtggccgaagaggattcagcttctctaagatcatccaaagctgatgataatagcagtgatatacttgttgagtcgatttttagcgcagttgtagacaaagtgagtaataacggttcacatttaactcaagatgatgtcttgagagcaattgatagaggaggcaaggacgctgtctcatttgattcaaaccctgctacttattgggtaagaagtaagttgctgtgttttggttatcataaatcgagatctgtgaagttgattcataatttcatacattgggtatctgccaagtcatatcataaactttatgctttggtttgaaggtgcttgatccaattgatggcaccaaaggtttcttgagagggaatgatgctctgtatgtggtatgattatctattctgatattgtccttacatactatattactgttgatcaaggaccgatatgctttattcaggaatttttacaagatgttctttaattgcacaaatatttatttgctgcgtgttttgacactttaaaaaagtcattccacaagcatggtgtgtcttgtactttttagtgccacatttatgccagacatgtccactatcttggggattttttatattgatatcatcaaccttgttttatcttgtacttcttagtgccacatttatgccagacattccattttttatattgttctctactattaatttatctcaaaattgtgaaattccaatgtatgtgatttgaggatttccagaaagactctcattgctgcagaacattcataaagttgtccgcaacaaatcgtgtaaaataggagatttgcacggtagattacattgtttgcagagtgaagtttgaaatatgggatgagctaccttatctcatcccttgtctcatcactatctcaaacttcactctacaaacagtataatctacagtgtaaatcccctattttacacgatctgccgcggacagccttatgaggcaccttttgtccttagttcatgaacctttatgatgcaccttctgcagcactttgttctttggtagcaaaattcatgcatctgaatgccaagcttgtttgcccctatatggttgtcattcagcatggactggttaatccatgatcagcaaattacatattattgacctcagttgcctattttcatgatccttttcttataagttctagcctacattttttgtccatttttaaggtgggtctggcacttgtggtgaatggaaaggtaacagttggagtgatgggatgtccaaattggaccaacgatgacatagtcaacaagaaagatgatagcgttgctgcatgtaatggtcgtggtattcttatggtctcccatattggctgtggcacatggtctaggcgtctgtctgctgatattggtcagttgaatacagctcaggatatttggaaaagatgttttgtggacacttgttcgatcgcacacatggcacactattgcattccagatagccaaacatgggatatgataccgttatctgctacctacgattcaacaacagatgcaactgatcctagaaatgagaatgaaatccttctcctgtccgttttttgtggcaggtttgttgcactctccaatctccattaatggtttgatacttgcacattaattcacgccactagtcagttgatatatgatgctaacaatgattgattttctccaacatatggcattcacggttagcaaaaggcatttaaagcaacgattgatatattctccccatccacaagttagctctggatactagtttgtttgctgtaagactttttcagcattatctgaaacgttaaatgtctttctatattcttgtgctgtcttgctatcatactgtttgtggatttcctacaaaaaaatatctggctgaggttgataatgagtactatctcgaatatttgtcgtccaatagttcatctttgaactaaaacgcgacaaataaaaaagaacggagggagtatattacagccattagtgattaccgattggtcttccgcacatgagttcatgatgatgtgctcttgttgctattctatagcttgtgcaagtatctcacaattgcttccgggagagcctcggtttttgtccttcaagcacggccgacaactcagatcaagtcttgggatcacgctgttggggtgatctgcgtgcaggaggccggtggtcagaccagtgactggagtggagaaccgttggatcttgcagctgacctaacatcgcgcagaatcatctaccctcggggcggtgttctggtgacaaatggtgcgctgcatgacaagcttgtcgaaatgatctcagcaagttacaagtagctgcatagcttcacaggccaacacaccttgtctttttgaatttgaatcattttaccttatctattcgatcttcagtgaaattgtatttgatcttcggtgaaattgtattcgatctgcacattcagtatagaaaccacaagcatgttcacttgttcagatggcttccattgccacaggagttattatacgaatgaaaacacactgtttccttgttgtaccgtgatgaactattgcttaagcaacttcattcagaagcaatacatgcaagggaaggtcgttttccaaatttttttcacaaaactccagaacctttttttttttggcttcccaatgtgtgaatttgttgcgcagccctgatgctctactctcatggtcgtacgacgcccacgcacgcacacctgaatcctgcaaaaaagaaaaaaaa

SEQ ID NO: 144555 - DNA, 1982 bp, Zea Mays
tagtacatacgtatttccgctgcgcatctcagactctcggttacgtaatctttataaaaaactcctaacaaatcatagttgtatctatggttagatcgtaatctaatgaaccagatcttttgtttgcacgctttcaaataagcactgcatagcagtcgttgccgtcggtcccgccacacacccccatgccgcttctccacctctcgctcccgtcgcaccgcctcctcgtcggcggccgaggtcggctgttcttcccgtcgtctccccgtcgtatctgcctatctgtcagggcggctggggatgcggcggtgtcagttgcggcgggggcttacggactccccttccggccggagggagccgctcaccaccgcgagctctccgcggcagtggccgtcgtcgagcgcgcctgctgcctctgcgttgacgtgaagagatcactgttttcacgtcgcagcagtattcttgagaagaatgaccaaagtcctgttacagttgcagatttcggagtgcaggcccttattagtttgggtaatccatagcaaaatttcaaagttcagatttgtgactttgtctaatgccatattttgccatgttgctattgaaagagctccagagattgttcccatcgatacctctggtggccgaagaggattcagcttctctaagatcatccaaagctgatgataatagcagtgatatacttgttgagtcgatttttagcgcagttgtagacaaagtgagtaataacggttcacatttaactcaagatgatgtcttgagagcaattgatagaggaggcaaggacgctgtctcatttgattcaaaccctgctacttattgggtgcttgatccaattgatggcaccaaaggtttcttgagagggaatgatgctctgtatgtggtgggtctggcacttgtggtgaatggaaaggtaacagttggagtgatgggatgtccaaattggaccaacgatgacatagtcaacaagaaagatgatagcgttgctgcatgtaatggtcgtggtattcttatggtctcccatattggctgtggcacatggtctaggcgtctgtctgctgatattggtcagttgaatacagctcaggatatttggaaaagatgttttgtggacacttgttcgatcgcacacatggcacactattgcattccagatagccaaacatgggatatgataccgttatctgctacctacgattcaacaacagatgcaactgatcctagaaatgagaatgaaatccttctcctgtccgttttttgtggcagcttgtgcaagtatctcacaattgcttccgggagagcctcggtttttgtccttcaagcacggccgacaactcagatcaagtcttgggatcacgctgttggggtgatctgcgtgcaggaggccggtggtcagaccagtgactggagtggagaaccgttggatcttgcagctgacctaacatcgcgcagaatcatctaccctcggggcggtgttctggtgacaaatggtgcgctgcatgacaagcttgtcgaaatgatctcagcaagttacaagtagctgcatagcttcacaggccaacacaccttgtctttttgaatttgaatcattttaccttatctattcgatcttcagtgaaattgtatttgatcttcggtgaaattgtattcgatctgcacattcagtatagaaaccacaagcatgttcacttgttcagatggcttccattgccacaggagttattatacgaatgaaaacacactgtttccttgttgtaccgtgatgaactattgcttaagcaacttcattcagaagcaatacatgcaagggaaggtcgttttccaaatttttttcacaaaactccagaacctttttttttttggcttcccaatgtgtgaatttgttgcgcagccctgatgctctactctcatggtcgtacgacgcccacgcacgcacacctgaatcctgcaaaaaagaaaaaaaa

SEQ ID NO: 144556 - DNA, 1905 bp, Zea Mays
tagtacatacgtatttccgctgcgcatctcagactctcggttacgtaatctttataaaaaactcctaacaaatcatagttgtatctatggttagatcgtaatctaatgaaccagatcttttgtttgcacgctttcaaataagcactgcatagcagtcgttgccgtcggtcccgccacacacccccatgccgcttctccacctctcgctcccgtcgcaccgcctcctcgtcggcggccgaggtcggctgttcttcccgtcgtctccccgtcgtatctgcctatctgtcagggcggctggggatgcggcggtgtcagttgcggcgggggcttacggactccccttccggccggagggagccgctcaccaccgcgagctctccgcggcagtggccgtcgtcgagcgcgcctgctgcctctgcgttgacgtgaagagatcactgttttcacgtcgcagcagtattcttgagaagaatgaccaaagtcctgttacagttgcagatttcggagtgcaggcccttattagtttggagctccagagattgttcccatcgatacctctggtggccgaagaggattcagcttctctaagatcatccaaagctgatgataatagcagtgatatacttgttgagtcgatttttagcgcagttgtagacaaagtgagtaataacggttcacatttaactcaagatgatgtcttgagagcaattgatagaggaggcaaggacgctgtctcatttgattcaaaccctgctacttattgggtgcttgatccaattgatggcaccaaaggtttcttgagagggaatgatgctctgtatgtggtgggtctggcacttgtggtgaatggaaaggtaacagttggagtgatgggatgtccaaattggaccaacgatgacatagtcaacaagaaagatgatagcgttgctgcatgtaatggtcgtggtattcttatggtctcccatattggctgtggcacatggtctaggcgtctgtctgctgatattggtcagttgaatacagctcaggatatttggaaaagatgttttgtggacacttgttcgatcgcacacatggcacactattgcattccagatagccaaacatgggatatgataccgttatctgctacctacgattcaacaacagatgcaactgatcctagaaatgagaatgaaatccttctcctgtccgttttttgtggcagcttgtgcaagtatctcacaattgcttccgggagagcctcggtttttgtccttcaagcacggccgacaactcagatcaagtcttgggatcacgctgttggggtgatctgcgtgcaggaggccggtggtcagaccagtgactggagtggagaaccgttggatcttgcagctgacctaacatcgcgcagaatcatctaccctcggggcggtgttctggtgacaaatggtgcgctgcatgacaagcttgtcgaaatgatctcagcaagttacaagtagctgcatagcttcacaggccaacacaccttgtctttttgaatttgaatcattttaccttatctattcgatcttcagtgaaattgtatttgatcttcggtgaaattgtattcgatctgcacattcagtatagaaaccacaagcatgttcacttgttcagatggcttccattgccacaggagttattatacgaatgaaaacacactgtttccttgttgtaccgtgatgaactattgcttaagcaacttcattcagaagcaatacatgcaagggaaggtcgttttccaaatttttttcacaaaactccagaacctttttttttttggcttcccaatgtgtgaatttgttgcgcagccctgatgctctactctcatggtcgtacgacgcccacgcacgcacacctgaatcctgcaaaaaagaaaaaaaa

SEQ ID NO: 144557 - DNA, 3341 bp, Zea Mays
gcagtcgttgccgtcggtcccgccacacacccccatgccgcttctccacctctcgctcccgtcgcaccgcctcctcgtcggcggccgaggtcggctgttcttcccgtcgtctccccgtcgtatctgcctatctgtcagggcggctggggatgcggcggtgtcagttgcggcgggggcttacggactccccttccggccggagggagccgctcaccaccgcgagctctccgcggcagtggccgtcgtcgagcgcgcctgctgcctctgcgttgacgtgaagagatcactgttttcacgtcgcagcagtattcttgagaagaatgaccaaagtcctgttacagttgcagatttcggagtgcaggcccttattagtttgggtaatccatagcaaaatttcaaagttcagatttgtgactttgtctaatgccatattttgccatgttgctattgaaagagctccagagattgttcccatcgatacctctggtggccgaagaggattcagcttctctaagatcatccaaagctgatgataatagcagtgatatacttgttgagtcgatttttagcgcagttgtagacaaagtgagtaataacggttcacatttaactcaagatgatgtcttgagagcaattgatagaggaggcaaggacgctgtctcatttgattcaaaccctgctacttattgggtaagaagtaagttgctgtgttttggttatcataaatcgagatctgtgaagttgattcataatttcatacattgggtatctgccaagtcatatcataaactttatgctttggtttgaaggtgcttgatccaattgatggcaccaaaggtttcttgagagggaatgatgctctgtatgtggtatgattatctattctgatattgtccttacatactatattactgttgatcaaggaccgatatgctttattcaggaatttttacaagatgttctttaattgcacaaatatttatttgctgcgtgttttgacactttaaaaaagtcattccacaagcatggtgtgtcttgtactttttagtgccacatttatgccagacatgtccactatcttggggattttttatattgatatcatcaaccttgttttatcttgtacttcttagtgccacatttatgccagacattccattttttatattgttctctactattaatttatctcaaaattgtgaaattccaatgtatgtgatttgaggatttccagaaagactctcattgctgcagaacattcataaagttgtccgcaacaaatcgtgtaaaataggagatttgcacggtagattacattgtttgcagagtgaagtttgaaatatgggatgagctaccttatctcatcccttgtctcatcactatctcaaacttcactctacaaacagtataatctacagtgtaaatcccctattttacacgatctgccgcggacagccttatgaggcaccttttgtccttagttcatgaacctttatgatgcaccttctgcagcactttgttctttggtagcaaaattcatgcatctgaatgccaagcttgtttgcccctatatggttgtcattcagcatggactggttaatccatgatcagcaaattacatattattgacctcagttgcctattttcatgatccttttcttataagttctagcctacattttttgtccatttttaaggtgggtctggcacttgtggtgaatggaaaggtaacagttggagtgatgggatgtccaaattggaccaacgatgacatagtcaacaagaaagatgatagcgttgctgcatgtaatggtcgtggtattcttatggtctcccatattggctgtggcacatggtctaggcgtctgtctgctgatattggtcagttgaatacagctcaggatatttggaaaagatgttttgtggacacttgttcgatcgcacacatggcacactattgcattccagatagccaaacatgggatatgataccgttatctgctacctacgattcaacaacagatgcaactgatcctagaaatgagaatgaaatccttctcctgtccgttttttgtggcaggtttgttgcactctccaatctccattaatggtttgatacttgcacattaattcacgccactagtcagttgatatatgatgctaacaatgattgattttctccaacatatggcattcacggttagcaaaaggcatttaaagcaacgattgatatattctccccatccacaagttagctctggatactagtttgtttgctgtaagactttttcagcattatctgaaacgttaaatgtctttctatattcttgtgctgtcttgctatcatactgtttgtggatttcctacaaaaaaatatctggctgaggttgataatgagtactatctcgaatatttgtcgtccaatagttcatctttgaactaaaacgcgacaaataaaaaagaacggagggagtatattacagccattagtgattaccgattggtcttccgcacatgagttcatgatgatgtgctcttgttgctattctatagcttgtgcaagtatctcacaattgcttccgggagagcctcggtttttgtccttcaagcacggccgacaactcagatcaagtcttgggatcacgctgttggggtgatctgcgtgcaggaggccggtggtcaggtatttaccttgcttgctaaaacagacaaactccaactctgttccatcagttcatctctcttagcactatagcacggtgatcttctaactctctgaaaccgacagaccagtgactggagtggagaaccgttggatcttgcagctgacctaacatcgcgcagaatcatctaccctcggggcggtgttctggtgacaaatggtgcgctgcatgacaagcttgtcgaaatgatctcagcaagttacaagtagctgcatagcttcacaggccaacacaccttgtctttttgaatttgaatcattttaccttatctattcgatcttcagtgaaattgtatttgatcttcggtgaaattgtattcgatctgcacattcagtatagaaaccacaagcatgttcacttgttcagatggcttccattgccacaggagttattatacgaatgaaaacacactgtttccttgttgtaccgtgatgaactattgcttaagcaacttcattcagaagcaatacatgcaagggaaggtcgttttccaaatttttttcacaaaactccagaacctttttttttttggcttcccaatgtgtgaatttgttgcgcagccctgatgctctactctcatggtcgtacgacgcccacgcacgcacacctgaatcctgc

SEQ ID NO: 144558 - DNA, 1320 bp, Zea Mays
cccgtgacgagcccagcgccacacaccaacctcagcacaccaaggagagtacgtggaggagcagccatggcttcatcggtggccgccgcggcgagcacattcctgggcacccgcctggcggacccggcgccacagaacgggcgcatcgtggcccggttcgggttcgggttgggcggcaaggcgaagcctgctccgaagaaggtggcgaagacatcgacctcctctgaccggccgctgtggttccccggcgccgtggcgcccgactacctggacggctcgctggtcggcgactacgggttcgacccgttcggtctcgggaagcccgtggagtacctgcagttcgagttggactcgctggaccagaacctggccaagaatgaggccggcggcatcatcggcacccggttcgagtcctccgaagtcaagtccaccccgttgcagccctacagcgaggtgttcggcctccagcggttccgcgagtgcgagctcatccacggccgctgggccatgctcgccaccctcggcgccctctccgtcgagtggctcaccggcgtcacctggcaggacgccggcaaggtggagctggtggacgggtcctcctacctgggccagccgctgccgttctccatctcgacgctcatctggatcgaggtgctcgtgatcggctacatcgagttccagcgcaacgccgagctcgacccggagaagaggctgtaccccggcggctcctacttcgacccgctcggcctggcggccgaccctgagaagaaggagcggctgcagctggcggagatcaagcacgcgcgcctcgccatggtcgccttcctcggcttcgccgtgcaggccgccgccaccggcaaggggccgctcaacaactgggccacccacctgagcgacccgctccacactaccatcttcgacacgttcggagggtcctcttaagcccgccattgctccgccccgtccatcgaccggaacgtgttcttggattaattaactacgatctctatgagcctggggatggatcaacccgtcgtgcgtggtctcgttttgtgatgagtgggagagagaggatgacaagatcgatcctttgttaatggagatctcgttaattaggagagctaccgctgggacttggtggtttgtaatatatgatccaaccagtgatgaatcaatgcattcacttgtgtacacatatacatatctaccttgcagattgagatgaccgaggatacatgatgcactatggttagtttttgttagatcgtgcgtgcgtgtgtggcctaaatgaatgcacgtagtgacgatgggagtttttag

SEQ ID NO: 144559 - DNA, 1190 bp, Zea Mays
gcacaccaaggagagtacgtggaggagcagccatggcttcatcggtggccgccgcggcgagcacattcctgggcacccgcctggcggacccggcgccacagaacgggcgcatcgtggcccggttcgggttcgggttgggcggcaaggcgaagcctgctccgaagaaggtggcgaagacatcgacctcctctgaccggccgctgtggttccccggcgccgtggcgcccgactacctggacggctcgctggtcggcgactacgggttcgacccgttcggtctcgggaagcccgtggagtacctgcagttcgagttggactcgctggaccagaacctggccaagaatgaggccggcggcatcatcggcacccggttcgagtcctccgaagtcaagtccaccccgttgcagccctacagcgaggtgttcggcctccagcggttccgcgagtgcgagctcatccacggccgctgggccatgctcgccaccctcggcgccctctccgtcgagtggctcaccggcgtcacctggcaggacgccggcaaggtggagctggtggacgggtcctcctacctgggccagccgctgccgttctccatctcgacgctcatctggatcgaggtgctcgtgatcggctacatcgagttccagcgcaacgccgagctcgacccggagaagaggctgtaccccggcggctcctacttcgacccgctcggcctggcggccgaccctgagaagaaggagcggctgcagctggcggagatcaagcacgcgcgcctcgccatggtcgccttcctcggcttcgccgtgcaggccgccgccaccggcaaggggccgctcaacaactgggccacccacctgagcgacccgctccacactaccatcttcgacacgttcggagggtcctcttaagcccgccattgctccgccccgtccatcgaccggaacgtgttcttggattaattaactacgatctctatgagcctggggatggatcaacccgtcgtgcgtggtctcgttttgtgatgagtgggagagagaggatgacaagatcgatcctttgttaatggagatctcgttaattaggagagctaccgctgggacttggtggtttgtaatatatgatccaaccagtgatgaatcaatgcattcacttgtgtacacatatacatatctaccttgcagattgagatg

SEQ ID NO: 144560 - DNA, 1347 bp, Zea Mays
ccgtgacgagcccagcgccacacaccaacctcagcacaccaaggagagtacgtggaggagcagccatggcttcatcggtggccgccgcggcgagcacattcctgggcacccgcctggcggacccggcgccacagaacgggcgcatcgtggcccggttcgggttcgggttgggcggcaaggcgaagcctgctccgaagaaggtggcgaagacatcgacctcctctgaccggccgctgtggttccccggcgccgtggcgcccgactacctggacggctcgctggtcggcgactacgggttcgacccgttcggtctcgggaagcccgtggagtacctgcagttcgagttggactcgctggaccagaacctggccaagaatgaggccggcggcatcatcggcacccggttcgagtcctccgaagtcaagtccaccccgttgcagccctacagcgaggtgttcggcctccagcggttccgcgagtgcgagctcatccacggccgctgggccatgctcgccaccctcggcgccctctccgtcgagtggctcaccggcgtcacctggcaggacgccggcaaggtacgtgaatagctagctattaagctatgcatgcatgaatccatggagttcgttctcgatctgctctcagacgatctaaccaacctgcgaattaatgtgacggccggcgtacacgtacgtgcaggtggagctggtggacgggtcctcctacctgggccagccgctgccgttctccatctcgacgctcatctggatcgaggtgctcgtgatcggctacatcgagttccagcgcaacgccgagctcgacccggagaagaggctgtaccccggcggctcctacttcgacccgctcggcctggcggccgaccctgagaagaaggagcggctgcagctggcggagatcaagcacgcgcgcctcgccatggtcgccttcctcggcttcgccgtgcaggccgccgccaccggcaaggggccgctcaacaactgggccacccacctgagcgacccgctccacactaccatcttcgacacgttcggagggtcctcttaagcccgccattgctccgccccgtccatcgaccggaacgtgttcttggattaattaactacgatctctatgagcctggggatggatcaacccgtcgtgcgtggtctcgttttgtgatgagtgggagagagaggatgacaagatcgatcctttgttaatggagatctcgttaattaggagagctaccgctgggacttggtggtttgtaatatatgatccaaccagtgatgaatcaatgcattcacttgtgtacacatatacatatctaccttgcagattgagatg

SEQ ID NO: 144561 - DNA, 1536 bp, Zea Mays
aacaaaaatgtcaaaacaaaattaaatctccaatcaaaagaactccatgccacgtggcaacgtggtattggccaagaaaccttcgtaggcctactggataagaaagatcccatccctccgctacccagacgaacaaggaacaatagcctttcctctcactcgcccctctgcatttaccactttgccctcgtcggcggcgctgaccacccgccgccgagtccggcgaaacaaccgcctgtagttccagagtagtacctcatggcggccatatcgtcacttcccttcgcggcgctgcgcggagccgccgagtggaggccttcgtcgacggcggcggccgtctccggcgccgtcgtgctcagcgcgaggtctcgccggggctcgcgctcggtggtgcgatgtgtcgccacgacgggtgatgtcccacccactgtcgcagaaacaaaactgaacttccttaagtcatacaaacgcccaatcccaagcatttacagtgcagtcttacaagaacttttggtgcagcaacacctgatgagatacaaaaaaacctatcagtatgatgctgtgtttgctcttggcttcgtcactgtctatgatcagctcatggaagggtaccccagcaatgaggacagggattccatcttcaaggcatatataacagcattaaatgaagatcctgatcaatacagagctgatgcactaaagatggaagagtgggcacgttcccagaacggtagttccttagttgatttttcttccagagatggagaaatcgaggctattctgaaagatatatcagaaagggccaagggtaagggaaacttcagctacagccgattctttgcagttggcttgttccgtttgcttgagctctcaaatgcaacggagccaacaatactagacaagctttgcgctgcactaaacgtcagtaaaagaagtgtggatagggaccttgatgtttaccgcaacatactctcaaagttggttcaagccaaggaacttctcaaggaatacgtggatagggaaaagaagaagagagaagaaagatcggaagccccgaagccgaacgaagctgtcacaaaatttgatggaaacctttattccacaaggcattagaatcagccctttgcagaggagagtttcccaggataacagaattaacagtaacatctggaccgtgttgagaaaccaccaaatgttcccctttcatcacagacgtctttggctgctcgtcttgtgatgtagcattctgccgtacaaaaggatccagattattcttactactggacagatatttgtattttctcatatgtcttgaaatcaaatgtatacattttctgtgtgtaggggtcaatgttactcaagcagagaaatatagttttctcttttgtatttaaattcaggtaatttgggaggccgtgttcacttatatataatatagtgtggcaaccatgaaaacaattggtgaagttctttatgtgagtttgtatgtaccgggctcagcactgaaaaatatctgaggttgaaaagtcttaacag

SEQ ID NO: 144562 - DNA, 1499 bp, Zea Mays
aacaaaaatgtcaaaacaaaattaaatctccaatcaaaagaactccatgccacgtggcaacgtggtattggccaagaaaccttcgtaggcctactggataagaaagatcccatccctccgctacccagacgaacaaggaacaatagcctttcctctcactcgcccctctgcatttaccactttgccctcgtcggcggcgctgaccacccgccgccgagtccggcgaaacaaccgcctgtagttccagagtagtacctcatggcggccatatcgtcacttcccttcgcggcgctgcgcggagccgccgagtggaggccttcgtcgacggcggcggccgtctccggcgccgtcgtgctcagcgcgaggtctcgccggggctcgcgctcggtggtgcgatgtgtcgccacgacgggtgatgtcccacccactgtcgcagaaacaaaactgaacttccttaagtcatacaaacgcccaatcccaagcatttacagtgcagtcttacaagaacttttggtgcagcaacacctgatgagatacaaaaaaacctatcagtatgatgctgtgtttgctcttggcttcgtcactgtctatgatcagctcatggaagggtaccccagcaatgaggacagggattccatcttcaaggcatatataacagcattaaatgaagatcctgatcaatacagagctgatgcactaaagatggaagagtgggcacgttcccagaacggtagttccttagttgatttttcttccagagatggagaaatcgaggctattctgaaagatatatcagaaagggccaagggtaagggaaacttcagctacagccgattctttgcagttggcttgttccgtttgcttgactttgcgctgcactaaacgtcagtaaaagaagtgtggatagggaccttgatgtttaccgcaacatactctcaaagttggttcaagccaaggaacttctcaaggaatacgtggatagggaaaagaagaagagagaagaaagatcggaagccccgaagccgaacgaagctgtcacaaaatttgatggaaacctttattccacaaggcattagaatcagccctttgcagaggagagtttcccaggataacagaattaacagtaacatctggaccgtgttgagaaaccaccaaatgttcccctttcatcacagacgtctttggctgctcgtcttgtgatgtagcattctgccgtacaaaaggatccagattattcttactactggacagatatttgtattttctcatatgtcttgaaatcaaatgtatacattttctgtgtgtaggggtcaatgttactcaagcagagaaatatagttttctcttttgtatttaaattcaggtaatttgggaggccgtgttcacttatatataatatagtgtggcaaccatgaaaacaattggtgaagttctttatgtgagtttgtatgtaccgggctcagcactgaaaaatatctgaggttgaaaagtcttaacag

SEQ ID NO: 144563 - DNA, 649 bp, Zea Mays
gatttggataagaaaaacgaaacaatgtattgtttaatatgataataatatagattagataaaaataaatatcaataccttcactttctacaatcagttttctatttttctttttatatggctggaaagcaactgaagatttttcaatttatattccacagtatcatttactgaacgtcatgctgacgtgttcgttatttccagaacaaggccatctcagataaaagtagatgtagctttcataggacttaattccagcaaagcaaaggttggcagtgcaccaaacaatagcgtttatacttcattcttatggattggagaagcctatgcaacatgtcaagccagatgacatgcagatgagaaggttctgcatcaatagaaaccagagaaaaatctgtatgtgtctgtatgacatctcagataaagcctgatgatcagcatgatgaaaggtggggagttctatagctggtttaagctggagctagcttctgaagtccggtcaggtgtctgtatgtgttgcccctttttatttcatttcatgagaaaagattgttatttgttccttgaactgtacttggtcgtacttgtgaataaatattttagcatggttgttcgacttctcataatgtttattcgacatcagttcatg

SEQ ID NO: 144564 - DNA, 1851 bp, Zea Mays
gccgtcgccgcagacgcagccggccacccaccactcgcgcctcccccaccgcgtcgcgtgtgggccacagctacagctgcctcctcgagcaacccacactcctttcttcccctgcctgtcgtctctcttccaccttccaccacaagcgccgtcgcagccggtgcctgctccttcccgatccccgaggcaaagctgcgactccgcaactgccgccatggcgttcgagaagatcaaggtctccaacccaatcatcgagatggacggcgatgagatgaccagggtattctggcagtctatcaaggacaagcttatcttcccatttctggacctggacatcaagtactatgatttggggatactgcacggtgaagcaactgatgacaaggtcacagtggaggctgcagaggctactctcaagtacaatgtggctattaagtgtgcgaccattactccaggtgaaactagaagaacgtatgaagctagacttgttgcaatttatagacatgtaagagaggatggagttgagggacaacctatttctgtttcaacagaacaatttgcaccttgttgataacaataattgatctgggcctcttccaccagaattagtagatacacgtagtcttcttgctatcttgacttcaggctgataataacaacttcagtggaagctccatcctgctgaatacaacaacatacaaacacttctaaagctgatattagttgtcaaatattttagtactaatattgagggggatggcggagggcattgcgctgcggggttacatcgccgtcaccttcgacatgcgcgacataggtgggtccacagggcgggtgtcgctcacgtgctccatcaagaacatcgagtgaggtggtgtgctgctgctctaaagaagggaggagaggaagtagcgacaatgtcgccaagaccacctggcgcgatgtctcctaccagatcaccaagatcaacatgtacaaggatggtcggcatgtacaagatatgcttaaggaatgagccacaaaatctgagagaacttatgctcttggtgctgctgacaacacaactgttgctattagaaagggatttgccattggttcaggtgctcttgtgtccctggtgctgtttggtgccttcgttagcagagctggagtgaagagtgttggaagtgtcgccctaaagatggtggaggaggttcgcaggcagttcaacaccattcttgggttgatggagtgaacaagcaagcctgactatgcaacctatgtgaagatttgcactgatgcttcttccatcaaggagatgattccttggggtgctctggtcatgctgactccctcattgatggaacctctttggcatcgagactctctctggcgtttttgctggtgccctggtttttggagtgcagaacaaggccatctcagataaaagtagatgtagctttcataggacttaattccagcaaagcaaaggttggcagtgcaccaaacaatagcgtttatacttcattcttatggattggagaagcctatgcaacatgtcaagccagatgacatgcagatgagaaggttctgcatcaatagaaaccagagaaaaatctgtatgtgtctgtatgacatctcagataaagcctgatgatcagcatgatgaaaggtggggagttctatagctggtttaagctggagctagcttctgaagtccggtcaggtgtctgtatgtgttgcccctttttatttcatttcatgagaaaagattgttatttgttccttgaactgtacttggtcgtacttgtgaataaatattttagcatggttgttcgacttctcataatgtttattcgacatcagttcatg

SEQ ID NO: 144565 - DNA, 2102 bp, Zea Mays
gccgtcgccgcagacgcagccggccacccaccactcgcgcctcccccaccgcgtcgcgtgtgggccacagctacagctgcctcctcgagcaacccacactcctttcttcccctgcctgtcgtctctcttccaccttccaccacaagcgccgtcgcagccggtgcctgctccttcccgatccccgaggcaaagctgcgactccgcaactgccgccatggcgttcgagaagatcaaggtctccaacccaatcatcgagatggacggcgatgagatgaccagggtattctggcagtctatcaaggacaagcttatcttcccatttctggacctggacatcaagtactatgatttggggatactgcacggtgaagcaactgatgacaaggtcacagtggaggctgcagaggctactctcaagtacaatgtggctattaagtgtgcgaccattactccaggtgaaactagaagaacgtatgaagctagacttgttgcaatttatagacatgtaagagaggatggagttgagggacaacctatttctgtttcaacagaacaatttgcaccttgttgataacaataattgatctgggcctcttccaccagaattagtagatacacgtagtcttcttgctatcttgacttcaggctgataataacaacttcagtggaagctccatcctgctgaatacaacaacatacaaacacttctaaagctgtgggtccacagggcgggtgtcgctcacgtgctccatcaagaacatcgagtgaggtggtgtgctgctgctctaaagaagggaggagaggaagtagcgacaatgtcgccaagaccacctggcgcgatgtctcctaccagatcaccaagatcaacatgtacaaggatggtcggcatgtacaagatatgcttaagcatcagaggctccataaagcagctctgctagaattaactgattcactgtcaaggtcaaacatcactatgatattgctgagatggtccaatcagtgacaatgctggtggtattgttgagatggcaggaatgagccacaaaatctgagagaacttatgctcttggtgctgctgacaacacaactgttgctattagaaagggatttgccattggttcaggtgctcttgtgtccctggtgctgtttggtgccttcgttagcagagctggagtgaaggttgtcgatgttctctcctgaaggttttcattggtttgattgttggagacatgtttttgtactggttctctgtcatgaccatgaagagtgttggaagtgtcgccctaaagatggtggaggaggttcgcaggcagttcaacaccattcttgggttgatggagtgaacaagcaagcctgactatgcaacctatgtgaagatttgcactgatgcttcttccatcaaggagatgattccttggggtgctctggtcatgctgactccctcattgatggaacctctttggcatcgagactctctctggcgtttttgctggtgccctggtttttggagtgcaggtgcgcactttgccttctactctctctgtgcacttcaatgtgtttgcttgttctagggtttatggagatttctgctttggacaaattgccatctctacttccaacactgtgctgcataggataacgcaagaagtatattaagaacaaggccatctcagataaaagtagatgtagctttcataggacttaattccagcaaagcaaaggttggcagtgcaccaaacaatagcgtttatacttcattcttatggattggagaagcctatgcaacatgtcaagccagatgacatgcagatgagaaggttctgcatcaatagaaaccagagaaaaatctgtatgtgtctgtatgacatctcagataaagcctgatgatcagcatgatgaaaggtggggagttctatagctggtttaagctggagctagcttctgaagtccggtcaggtgtctgtatgtgttgcccctttttatttcatttcatgagaaaagattgttatttgttccttgaactgtacttggtcgtacttgtgaataaatattttagcatggttgttcgacttctcataatgtttattcgacatcagttcatg

SEQ ID NO: 144566 - DNA, 805 bp, Zea Mays
gccgtcgccgcagacgcagccggccacccaccactcgcgcctcccccaccgcgtcgcgtgtgggccacagctacagctgcctcctcgagcaacccacactcctttcttcccctgcctgtcgtctctcttccaccttccaccacaagcgccgtcgcagccggtgcctgctccttcccgatccccgaggcaaagctgcgactccgcaactgccgccatggcgttcgagaagatcaaggtctccaacccaatcatcgagatggacggcgatgagatgaccagggtattctggcagtctatcaaggacaagcttatcttcccatttctggacctggacatcaagtactatgatttggggatactgcacggtgaagcaactgatgacaaggtcacagtggaggctgcagaggctactctcaagtacaatgtggctattaagtgtgcgaccattactccaggtgaaactagaagaacgtatgaagctagacttgttgcaatttatagacatgtaagagaggatggagttgagggacaacctatttctgtttcaacagaacaatttgcagtaagtcaaatcacctcttgtactataatcttgcaattgtttctttctctctcttttctaagaataactattgcattagcatattttactaacttgtataaattgttattttcaagagattttatgtaccgtttctttacaaacaatgctaatgccacatccacaatcttgcagaactttgaatggcaaccagttatctggatctttgcctgatgagattggttaccagatgaactttaacag

SEQ ID NO: 144567 - DNA, 1576 bp, Zea Mays
tgtatactagtagcagtcatggagtatattgcatctcagatcgcactgaaccagtggaaactaaatgtagcaaaagtcagcagcaggaaaagatagatgaaaaaaaaacaaagagggctgcctggaggttaggcgtgggcgcgtaacacacacatggcagctagccggcgacgatccaagagcgggtgcgtggcgacaggctggtaccctgttgccgtcgcctccgccatgttacgttccaccacctctcctctccactccacccacccaacagctgcccccaccaatcacatcacacccagacacctcctacttatcttgcgcgccaagggccagcgcgcgagcgacctcacttgatccgctcccttcgccgcgacgacgttcctacgcagctgcggtcgacgcgcgcacggcagctcgctcgctagctgatcacgacagctcgctcggctcgaccgaatggcgccgcggctgctggcgtgcttcgggcgcggcgtcgcggcggcgccggacgacgcgactggcgagggccagctggaggcgccccccgctggcccggtgctggtggagctgttcgggtcgcaggggtgcggggcgtcgcccgaggcggacgccgtggcggcgcggctggcgcaggactccgggtccggggacggcgccgtcgtggtgctggcgttccacgtcgactactgggactaccgcgggtggaaggaccccttcgcgtccagcgcctggaccgtgcgccagaaggcctacgtggaggcgctccgcctcgacacgctcttcacgccgcaggtcgtcctgcagggccgcgcgcactgcgtcggcaccgaccaggacgcgctcgcgctggccgtccgcgacgccccgcgctaccccgcgcccgccatcaagcgattcagatctgccgtaaccggatcgcccgtagacgctgggggcctggggtgtcactgtcactgtagactgatgagcgtgattgcgtgaagccacgacctgaccggatcggatgcgcgcgcgcaggtcacgttccagcggccgagccccgcaacactgcaggcgtcgttcacgggcaccctgcgcagccgcgtggagggcccaggcggcgcgagcgtgctggtggcgctgtacgagagcgggctggtgaccgactgcgggcgcggcgagaacaagggcaagtcgctgctcaacgaccacgtggtgcgccgtctcgagaaggtggccgccgtgcgggagggcgcctcgccgaagaagaccgtgtcgggcaccgtccagttcccgctctgggacggctttcgcgccaccaagtgcggcctcgtgctcttcgtccagaacgccgcgctgcaggtgctcggcgtccagcacttcgacctgcctgacaacgtctgagctcgtgacgcggtggggcgcgcgcgcgttccgcgttggctgcctccctgcggcgggcgtcacattctttgtatcactgtatgtagtacatcactggatggtatttagatggaaaacctgagtattctttatctccacgtatgttcttgttctgcattatggcaatggatcttctgttttgcacactaaa

SEQ ID NO: 144568 - DNA, 1450 bp, Zea Mays
tgtatactagtagcagtcatggagtatattgcatctcagatcgcactgaaccagtggaaactaaatgtagcaaaagtcagcagcaggaaaagatagatgaaaaaaaaacaaagagggctgcctggaggttaggcgtgggcgcgtaacacacacatggcagctagccggcgacgatccaagagcgggtgcgtggcgacaggctggtaccctgttgccgtcgcctccgccatgttacgttccaccacctctcctctccactccacccacccaacagctgcccccaccaatcacatcacacccagacacctcctacttatcttgcgcgccaagggccagcgcgcgagcgacctcacttgatccgctcccttcgccgcgacgacgttcctacgcagctgcggtcgacgcgcgcacggcagctcgctcgctagctgatcacgacagctcgctcggctcgaccgaatggcgccgcggctgctggcgtgcttcgggcgcggcgtcgcggcggcgccggacgacgcgactggcgagggccagctggaggcgccccccgctggcccggtgctggtggagctgttcgggtcgcaggggtgcggggcgtcgcccgaggcggacgccgtggcggcgcggctggcgcaggactccgggtccggggacggcgccgtcgtggtgctggcgttccacgtcgactactgggactaccgcgggtggaaggaccccttcgcgtccagcgcctggaccgtgcgccagaaggcctacgtggaggcgctccgcctcgacacgctcttcacgccgcaggtcgtcctgcagggccgcgcgcactgcgtcggcaccgaccaggacgcgctcgcgctggccgtccgcgacgccccgcgctaccccgcgcccgccatcaaggtcacgttccagcggccgagccccgcaacactgcaggcgtcgttcacgggcaccctgcgcagccgcgtggagggcccaggcggcgcgagcgtgctggtggcgctgtacgagagcgggctggtgaccgactgcgggcgcggcgagaacaagggcaagtcgctgctcaacgaccacgtggtgcgccgtctcgagaaggtggccgccgtgcgggagggcgcctcgccgaagaagaccgtgtcgggcaccgtccagttcccgctctgggacggctttcgcgccaccaagtgcggcctcgtgctcttcgtccagaacgccgcgctgcaggtgctcggcgtccagcacttcgacctgcctgacaacgtctgagctcgtgacgcggtggggcgcgcgcgcgttccgcgttggctgcctccctgcggcgggcgtcacattctttgtatcactgtatgtagtacatcactggatggtatttagatggaaaacctgagtattctttatctccacgtatgttcttgttctgcattatggcaatggatcttctgttttgcacactaaa

SEQ ID NO: 144569 - DNA, 1750 bp, Zea Mays
tgtatactagtagcagtcatggagtatattgcatctcagatcgcactgaaccagtggaaactaaatgtagcaaaagtcagcagcaggaaaagatagatgaaaaaaaaacaaagagggctgcctggaggttaggcgtgggcgcgtaacacacacatggcagctagccggcgacgatccaagagcgggtgcgtggcgacaggctggtaccctgttgccgtcgcctccgccatgttacgttccaccacctctcctctccactccacccacccaacagctgcccccaccaatcacatcacacccagacacctcctacttatcttgcgcgccaagggccagcgcgcgagcgacctcacttgatccgctcccttcgccgcgacgacgttcctacgcagctgcggtcgacgcgcgcacggcagctcgctcgctagctgatcacgacagctcgctcggctcgaccgaatggcgccgcggctgctggcgtgcttcgggcgcggcgtcgcggcggcgccggacgacgcgactggcgagggccagctggaggcgccccccgctggcccggtgctggtggagctgttcgggtcgcaggggtgcggggcgtcgcccgaggcggacgccgtggcggcgcggctggcgcaggactccgggtccggggacggcgccgtcgtggtgctggcgttccacgtcgactactgggactaccgcgggtggaaggaccccttcgcgtccagcgcctggaccgtgcgccagaaggcctacgtggaggcgctccgcctcgacacgctcttcacgccgcaggtcgtcctgcagggccgcgcgcactgcgtcggcaccgaccaggacgcgctcgcgctggccgtccgcgacgccccgcgctaccccgcgcccgccatcaaggtacgtacgtacgtatgctgcgtaaaattgcatacttcttgcacaaactgtttagctaactgctctgcaaatttaagaaccaagacaaaaaaaaaaccctggatattccaaatgctgttgctgtagagcgtctcatgatcgccactactatgcttacgctggatcggcaaccaacagcgattcagatctgccgtaaccggatcgcccgtagacgctgggggcctggggtgtcactgtcactgtagactgatgagcgtgattgcgtgaagccacgacctgaccggatcggatgcgcgcgcgcaggtcacgttccagcggccgagccccgcaacactgcaggcgtcgttcacgggcaccctgcgcagccgcgtggagggcccaggcggcgcgagcgtgctggtggcgctgtacgagagcgggctggtgaccgactgcgggcgcggcgagaacaagggcaagtcgctgctcaacgaccacgtggtgcgccgtctcgagaaggtggccgccgtgcgggagggcgcctcgccgaagaagaccgtgtcgggcaccgtccagttcccgctctgggacggctttcgcgccaccaagtgcggcctcgtgctcttcgtccagaacgccgcgctgcaggtgctcggcgtccagcacttcgacctgcctgacaacgtctgagctcgtgacgcggtggggcgcgcgcgcgttccgcgttggctgcctccctgcggcgggcgtcacattctttgtatcactgtatgtagtacatcactggatggtatttagatggaaaacctgagtattctttatctccacgtatgttcttgttctgcattatggcaatggatcttctgttttgcacact

SEQ ID NO: 144570 - DNA, 1894 bp, Zea Mays
ttcatccgttcgcctctgtgcctctttgagctcgcactcgctcgtgaacgctccccgacctccgtgttgtccagctcactttagcagttcagcctaggactctctgcgagtagcatagcagcagcttcttgcgaagcagaggcagagccttgtgttgcgttgcgtcttccttcctgcttgagcttattagttggctcgcgatggccggcggcgtggtggtgagctccggtgggggcaaggactaccccggcaagctcaccatgttcgtgctcttcgcctgcatcgtcgccgccaccggcggcctcatctttggatacgacatcggcatctctggtggcgtgacgtcgatgaacccgttcctgatgaagttcttcccgtcggtgtaccgcaaggagcaggaggcggagcggaaccagagcaaccagtactgcaagttcgacagccagctgctcaccatgttcacctcctcgctctacctggcggcgctcgtggcctccttcttcgccgccaccgtcacccgcgtggccggccgcaagtggtccatgttcggcggcggcgtcacgttcctggtcggcgccgcgctcaacggcgccgccaaggacgtgggcatgctcatcctcggccgcgtcctcctcggcgtcggcgtcggcttcgccaaccagtccgtgcccgtctacctctcggagatggcgccggcgcgcctccgcgggatgctcaacatcggcttccagctcatggtcaccatcggcatcctctgcgccaacctcatcaactacggcaccgccaagatcaggggcggctggggctggcgcgtcagcctcgcgctcgcggccgtgccggcggccatcatcgccgtgggcgcgctcttcctgcccgacacacccaactccctcatcgaccgcggctacaccgacgccgccaagcggatgctcaagcgcgtccggggcaccgacgacgtggaggaggagtacagcgacctggtggccgccagcgacgagtccaagctggtggcgcacccctggcgcaacatcctgctgccgcgctaccgcccgcagctcgtcatggccatcgccatccccatgttccagcagctcacgggcatcaacgtcatcatgttctacgccccggtcctcttcaagacgctgggcttcgcggacgacgcctccctcatgtccgccgtcatcacgggcctcgtcaacgtcttcgccaccttcgtgtccatcgtcaccgtcgaccgcctcggccgccgcaagctgttcctgcagggcggcacccagatgctcgcgtgccagatcgtcgtgggcagcctcatcggcgccaagttcggcttctccggcgtcgcggagatccccaaggggtacgccgccatcgtcgtgctcttcatctgcgcctacgtggccggcttcgcctggtcctggggccccctcggctggctggtgcccagcgagatcttcccgctggagatccgctcggcggggcagagcatcaacgtgtccgtcaacatgttctgcaccttcatcatcgcgcaggccttcctccccatgctctgccgcttcaagttcatcctcttcttcttcttcggcgcctgggtcgtcgtcatgaccatctttgtcgcgctcttcctgccggagaccaagaacgtgcccatcgaggagatggtgctcgtgtggaaggcgcactggtactggggccgcttcatccgcgacgaggacgtgcacgtcggcgccgacctcgagatgccctccgccaacgccaagctcggcggcatgcagtagccatggccgtccctcgctgctcatgttgttgggcaataatctacccatacagtattattcttggggctttaccgggaaatttgaaactcatcatcaatgtgtattataatcgtctcatt

SEQ ID NO: 144571 - DNA, 893 bp, Zea Mays
ttcatccgttcgcctctgtgcctctttgagctcgcactcgctcgtgaacgctccccgacctccgtgttgtccagctcactttagcagttcagcctaggactctctgcgagtagcatagcagcagcttcttgcgaagcagaggcagagccttgtgttgcgttgcgtcttccttcctgcttgagcttattagttggctcgcgatggccggcggcgtggtggtgagctccggtgggggcaaggactaccccggcaagctcaccatgttcgtgctcttcgcctgcatcgtcgccgccaccggcggcctcatctttggatacgacatcggcatctctggtacggcgccaagcactgtccccgcccctctatctatctgatcgcgatgttttcggtttttgttttttacccatggctgctgtggttggaaagagagaagaaaaatggcagtcctcgtctgcaccgcatctctcgcacagacccacgcagccacgctgctctgttctcgcgttttgcgaatcaggcagggtattttctcgggcgcggttcacctaccgtccggtcgggagactgggcgcgcatggttcaagagcgtctttttgcgcatgcatacagaactgcgatattccccctcgttttcttattttcctcttgccagattcttgcaagcccgggaagaagaatctttccatgcatcacctcgtcatcttacagtttttgacactattagtggttgtttacgttaacgataaagaaaaaatatatatatatccaagaccattccaaaagaaaaaaaataactcttcaatcaagtaacaaagaagaaaataggttgctgttgctgacgtgtttgtgcaatgctgtgtggtcgagcaggtggcgtgacgtcgatgaacccg

SEQ ID NO: 144572 - DNA, 1795 bp, Zea Mays
gccggcggaggtgagccgacaagcggagctggatgagcagcgatgcctggcggaggcgctggacgccctcagttcgttggtctccgcttccttgtccgcgacgctgttcccgctcaagtggcagctcaccagggaccggctccacgcctgcctcgccgacaccaccgtccccgcgggggacgagagcggcgaggacaggcgcgacgcgttcgtgaacctcctgcgggacgtcgcggcgaccgctcgggaggcgcgagagctggtgccgcgtagccaggggcggcagtacggcggcggcaagctgcggctgcgcagcgacctcgacgtcctggccgcagccctcgacgcgcacgtggcgcggctggacgaggtgcacgcgtcgggcgcgctgacgcgggcgcgggcgctggtggtgccgcgccccggcgccggggccacccgcgacgacgtgcggttctacgtgcgcgacctcttcgcccggctcagggccggcggcgccgagatgcggagggaggccgcgaccgcgctcagcgaggtgctgcgcgacgacgagaagtgcgtccgcgtcgtggcgtccgacgtcgcggacggcgtcggcgtgctcgtcgcgctgctcgagtgccccgacgcccgcgtccgggaggacgtcctggaggcggtctcggtgatcgccgggtccgacgcgcacaggggagacctggtcgtcggcggcgtcatcgcgcctgtggtccgcgtcctcgacgccgccgccagcgccagcagcgaggcggccaaggagagggcggcgcgggtgctctgcaaactcacggagaactcggacaacgcgtgggccgtcgccgctcacggcggcgtcacggcgctgctcgacctgtgcacggaccacggagcgagcggcggcgagctcgtgtgcgcggcgtgccgggtgctgcggagcctcgcgggcgtcgacgagatcaggaagtacatggtggccgacgctggggccgtcccggtgctcgtgtctctctcgcagagggccacggacgacgcggcgcgaatccaggcaatggagctcgtcgtcgccatcggctctggggacagctcagccagggaggccgtggtccaggaaggtgccatcgaggtcctcgttcgcgcgctcgacgcctcctcctcctcgaaggtgcgggaggtggccctccgtgccatcgacgggctctgcctctcgccgcccacatccaccgaccgtctcctcgccgccgggttcctcgacagcgtcctctccctcctccgcaccggagacaccacgctgcagcactgcgccctgaaggcggcgcaccgtctgtgcccggtgtcggaggagatcaggaaggcgatgggcgacgccggattcatgctggagctggtgagcgtcctcggcgcgtcgtccaagtcccccgaggcgcgggagatggcggccgagtcgctctgcgccttggtgtccgtgcaccgcaaccggaagcggttcgtccaggaggaccgcgacgacgtggcgcgggtgctgcagctgctgggctccggcgacgaggagaagctcacgccggcgaagcggttcctgctgtccacggtgacgcgtctcgcggacagcagctccggccggaggaagatcctgacctcggagcacgaatctggagaagcttgcggagaccgatgtcccggacgccaaacggatcgtgaagaggcttggcgggagcaggctgaggagcattttccatggcatttggagcctgtaatgtaatccttggagacaagcatgcactagctgccacttactagcacc

SEQ ID NO: 144573 - DNA, 1568 bp, Zea Mays
ctccacgcaccgcggctaccacctctgttctcttcctcgcttccttgctcaaccggatcgacgcgagcgtggcaagaatcgcggtgcgtgtgagccttgttcggagaagagctacccgatgcagctgaggctgtgagggcactgtgcacgcgtcgggcgcgctgacgcgggcgcgggcgctggtggtgccgcgccccggcgccggggccacccgcgacgacgtgcggttctacgtgcgcgacctcttcgcccggctcagggccggcggcgccgagatgcggagggaggccgcgaccgcgctcagcgaggtgctgcgcgacgacgagaagtgcgtccgcgtcgtggcgtccgacgtcgcggacggcgtcggcgtgctcgtcgcgctgctcgagtgccccgacgcccgcgtccgggaggacgtcctggaggcggtctcggtgatcgccgggtccgacgcgcacaggggagacctggtcgtcggcggcgtcatcgcgcctgtggtccgcgtcctcgacgccgccgccagcgccagcagcgaggcggccaaggagagggcggcgcgggtgctctgcaaactcacggagaactcggacaacgcgtgggccgtcgccgctcacggcggcgtcacggcgctgctcgacctgtgcacggaccacggagcgagcggcggcgagctcgtgtgcgcggcgtgccgggtgctgcggagcctcgcgggcgtcgacgagatcaggaagtacatggtggccgacgctggggccgtcccggtgctcgtgtctctctcgcagagggccacggacgacgcggcgcgaatccaggcaatggagctcgtcgtcgccatcggctctggggacagctcagccagggaggccgtggtccaggaaggtgccatcgaggtcctcgttcgcgcgctcgacgcctcctcctcctcgaaggtgcgggaggtggccctccgtgccatcgacgggctctgcctctcgccgcccacatccaccgaccgtctcctcgccgccgggttcctcgacagcgtcctctccctcctccgcaccggagacaccacgctgcagcactgcgccctgaaggcggcgcaccgtctgtgcccggtgtcggaggagatcaggaaggcgatgggcgacgccggattcatgctggagctggtgagcgtcctcggcgcgtcgtccaagtcccccgaggcgcgggagatggcggccgagtcgctctgcgccttggtgtccgtgcaccgcaaccggaagcggttcgtccaggaggaccgcgacgacgtggcgcgggtgctgcagctgctgggctccggcgacgaggagaagctcacgccggcgaagcggttcctgctgtccacggtgacgcgtctcgcggacagcagctccggccggaggaagatcctgacctcggagcacgaatctggagaagcttgcggagaccgatgtcccggacgccaaacggatcgtgaagaggcttggcgggagcaggctgaggagcattttccatggcatttggagcctgtaatgtaatccttggagacaagcatgcactagctgccacttactagcacc

SEQ ID NO: 144574 - DNA, 1021 bp, Zea Mays
ccgccgcacaccctcctccctccataaatggccactcccgctcccaccctgccggagccggccgcgcaagagctgaccgctgccgtcgccggcgccggccagcggcagcagccccatcaccagcacccgctcctcgcggcggcggctgcggcgtcgctcctcgccgtgctctacctcccccggccggtgctgctgctcgtgctctccccggcctcgctctcctccctgctcctgctcctctccctcctccacctcggctccacgccgccgccgccgcctcccgctctcgccgcccctcctccttcctccccgccgccgacggaggagaagaagcagcaggagcaggagcaggctccagaggccgcgtgcccgccgcctccccctcctccgccgccgccagagccggagcgtggggccgtgttcccggagctcctggagttcgcgtcgtgggcggccaaagggcgcgcgctggaggtgatccacgaggagttcgaggccgagtgggggctgccggaggagatgggactgccgtgggactcggactcggactccgaccccgactcgggcagcgacgacggctacgtccggggcggcggcgacgcggacgacggcatgatcgagatcgagctggaggaggacagcctcatcgagatcgacatctccaggtgccggtgagcgcggttaccgattggatggaccgcgtatcatcgtcttcagttttttcccccctccctcccttccgttcccgtctcccgcggattaagatccctggtacttggagctgaggctgtcgacaagatttctcttcttagtgagtgattaggcgtgcggggtgattggagttctttcttctgttgcttttttatctagatggcttgccgccatgtacatataggattttacggtgatgagatagggagcgacaagctctgctctgcttgctttcttttgttcctctttatatactgatgaaacagcttgatttggtcgttttgagacgaggacggccatgataactcgg

SEQ ID NO: 144575 - DNA, 908 bp, Zea Mays
tccaattttacctagaataggtttggtcctccaggctccagcaaacatcccaggtgttctgtctgatcacctgtcgagaggcgcatgaggagcttgggtttgacagcggaagaacaggaagtggattactatctccaatcccatgcagataggcttcattgcaagatctccgattagttaagcacaaggatcatcgggaggaagagagtcgccgtctcgccgactccgggctcccggaccccgcactcgccatcacgcaccctgcgcaagcagcgaagcgtccgcttccacttccacatggacgacgccgtcaacctccttgagtcgctgccgctggatgtactgataaaaatcttgtgtaaggtgaactacagtgatctgaggcaccttctcctagtgtcaaaacaagtcaaggaagcaacaatttatgctagggagctgcatttcaagttttcgacgccgtcggcgaagcccgtttttagagacgaggaagccggcggtggcgacgacacttgcccttgcgcgcccaagcaacaccgggctgcaaagtcacgcttgcggggccagaacctagagagaatcgccgtcaacctgtcggcgtcgtacgagagcatgctccccgaggtctagatgtaaatatacgacatccacatgttttcagtttgtgatctattcgtgcttgtatctagtagtttcaggttacaagtttagtgccttttgtagcccacgtcatagagaggctcctagatagtgggaatagtatactcggatgcgtgattactagtcttaagtaattatagatatatggtcgtacgtagttcttcaatgttgtgattgaagaacacacgcgatgtcttctctaatcttatgcgtacttatatcttgtattttatttatcgtcaaagaga

SEQ ID NO: 144576 - DNA, 975 bp, Zea Mays
tccaattttacctagaataggtttggtcctccaggctccagcaaacatcccaggtgttctgtctgatcacctgtcgagaggcgcatgaggagcttgggtttgacagcggaagaacaggaagtggattactatctccaatcccatgcagataggcttcattgcaagatctccgattagttaagggcaacgcgaagaagggggtctcttgccagttgccaccagcttgagcttctcaaactgcaggagcagcacaaggatcatcgggaggaagagagtcgccgtctcgccgactccgggctcccggaccccgcactcgccatcacgcaccctgcgcaagcagcgaagcgtccgcttccacttccacatggacgacgccgtcaacctccttgagtcgctgccgctggatgtactgataaaaatcttgtgtaaggtgaactacagtgatctgaggcaccttctcctagtgtcaaaacaagtcaaggaagcaacaatttatgctagggagctgcatttcaagttttcgacgccgtcggcgaagcccgtttttagagacgaggaagccggcggtggcgacgacacttgcccttgcgcgcccaagcaacaccgggctgcaaagtcacgcttgcggggccagaacctagagagaatcgccgtcaacctgtcggcgtcgtacgagagcatgctccccgaggtctagatgtaaatatacgacatccacatgttttcagtttgtgatctattcgtgcttgtatctagtagtttcaggttacaagtttagtgccttttgtagcccacgtcatagagaggctcctagatagtgggaatagtatactcggatgcgtgattactagtcttaagtaattatagatatatggtcgtacgtagttcttcaatgttgtgattgaagaacacacgcgatgtcttctctaatcttatgcgtacttatatcttgtattttatttatcgtcaaagaga

SEQ ID NO: 144577 - DNA, 903 bp, Zea Mays
atggtacagatcacgacagaaacgagtagtgtacaacacaatgtcctggcacgccgcggcccggtagctagcttaagaccctggtgcgaacttggtggcgtagacccaggcgttgttggcgacggggtcgtcgaggtggtcgagcaggttctcgaggggccccttgccggtgacgatggcctggacgaagaagccgaacatggagaacatggcgaggcggccgttcttgatctccttgaccttgagctcggcgaaggtgacggggtcgtcggcgaggcccagcgggtcgaagtactggccgccggggtagaggttgttgccctcgccgacgccgtcgaggccgttgatgcggaagccctcgacgaggcccatgaggatgacctggaagccgagcacggccaggatgctctgcgcgtgcaccaggttggggttgcccaggtagtccagcccgccctccgagaagatctgcgcgccggccttgaaccacacgggctccttgaagtccacgcgcacccacttctccagcacctccggggtgatgcagcccagcgcacccagcatcgcccaccgcccgtggatcacctccagcgccctgttccgcgcgaacgcctccgggtccgcggacagcccggcggtgtcccagccgtagtcgccggggaactcgccggtcaggtacgagggcgtctgggcggagaaggggcccaggtacttgacgcggtccgggccgtaccacaggtcgttgcccatggtgatccggccgccagcagcggcggcggcgacgtcgcggagggggctggcattggcggcggcgcgaccctggccaagaaacggcgtcttggccgcgacgatgcgggaggtggcggccatgatcgtcgacgccatctgctgcggtttatctggtga

SEQ ID NO: 144578 - DNA, 4903 bp, Zea Mays
aaaaaatatcggttccgtttttgatttggaggggaggggagcggcggttcggagtgggcaggctcgctgttggttcttgcagcggcgcggcagagaggggtgtgcggtgcggccgtgctgttgaattatcctgttccttcagtgctcgcgtctcgatgcgttttctctgatgatggtttcatggccacctgcgtgtgctgctgctgctgctagtacgccagcgctttgattcggcagaggcgttgctttggtttcgggttctttcgcctttcctttcgccaaagattgcagctttcgcagccgcagccttttcttctccggccgattccaaccttggccagactacccccccttcaaaaatcgcgcaaggggtgggggttttacccggcccgtactgcgagcagcgccgaattttttcccctgggcgtgcgattgtcgcttagttgagcttcagagcctggttttttgagagatttctttttgaattttgagcctggtgtggaatttgggggtttgggtgtctgccagttttcaacccttggagagtcagaggctattgtctctgaagatatcgcctgttttgatgcgaaatggggaaatttctggtccctgtgctgttcggccattggatttggcgagttggtgtttgagccctggtatacatcacctgtctgtgctggtggccgtttgatttcacggtggtgatgctctctgcagcctccgtgatggcgccggcagcagccacacagaagagctcccttgaggtcttgcttgagacattaaagaagcgcgatgagcagcccaaggatgcacctccaacattgccagcccggccgacgtgccgtggccggctgcccaccaccagacggtcatcactgcctgctggctttatgctcgagaacggcatggcaacagttgctgccacagaagctgcagtggttgacaagaaggcagatgctaagatggagattgttgggctggaggccaaggaggaaaagctggtgaaaggctgcatctttgggactaagaggaagttccctaacacagaagtgctggaggagtcgccgtatgttggtaaatttcttgaggagaggaagggtacatcagtttgtaagaatcctccacatatttcctcggcaacgataaggatgaatgggaatgtagcatgtacagatatcttggactatattctccagaagaagctaagagtttggtgttcttcaccaaatgcaaagtgggaacttggacagatccaatcaatgtctggagatgatgctgaaatactcctggctaatggaaaagttttgatggtgtcaccagaacaactcttgcctgctaaccctgatatcctcgatggagtggatgatttgatccagatgagttacttgaatgaaccttcagttctttacaatctgcaattgcgatattctcgtgatcttatctatacaaaggcaggacctgttctgattgctgtcaatccattaaaagaagttgctctctatgggaagtcttcaatcatgcaatacaagcaaaaggccaacgatgacccacatgtgtatgcagttgctgatttggcatttaacgagatgctgcaagatggcataaaccaatctataataataagtggtgaaagtggatcaggaaaaaccgagacagctaaaattgcaatgcaatatttgtctgatcttgggggtgctagtggtacggagtctgaggttcttcagaccaatgttattctggaagcattggggaatgcaaaaacatcacgaaaccataactcaagccgatttggcaagcttattgaaatacacttctctgaatctggtaaaatgtgtggtgctaaaatccagaccttcctgcttgagaagtcgagggtggtccaaagggcacaaggagagagatcttaccacattttctatcaactgtgctctggagctcctccccttctcaaaaaaaaattgtttctgaaaagcgccaatgactacaattacttgaagcagagtaattgcttgaaaatcgatggtgttgatgattcaaaaaaattcacagtgctagtggatgcattggatacaattcaaatatctaaggaagaccaaatgaaattattttctatgcttgcagctgtcttgtggctggggaacatatcattctgtgtgattgataatgaaaaccatgtggaagttgtttcaaacgaaggattgtctactgctgcaaagctattaggctgcactgcaaatcaactagtgattgctttgtccacttgtaaaatccgagctggaaatgacagtattgttaaaaagctaacattaactcaggccattgacgcaagagatgcactagcgaagtcaatctatgccaatttatttgactggattgttgaccaaattaaccactcacttggaacagggaggcaatttacatggagatccataagtattttggatatttatgggtttgagtgtttcaataagaatggttttgagcaattttgtataaattatgccaatgagaggctgcagcagcacttcaacagacatcttctcaaactacaacaggaggaatacttggaagacggaattgattggacccccatggaatttgtggataacactaattgcttatctctctttgagaagaaacatctagggctattgtcattattggatgaagagtctactttcccaaaggcatccgatttttcctttgctaacaagcttaagcggcaattaagtggtaactcttgcttcaaaagtgaaaaagaaggcacatttaagatttgccattatgcaggggaggtgacatatgatacagctgggttcctggagaagaacagagacccattgcactctgagtcaatccaactactctcatcatgtacatgtgaactttcaaaacattttgcctctgtcatggttgctgattctcagaataaatcaagtctgtcatggcattcagtaaaggatacacataaacaaagtgttgtcatggaatttaaggctcaactgttcaagctgatgcagcagttggagagtacaaccccacattttatccaatgcattcaaccaaatagcaaacatcatcccaggttattcgagcatgatcttgttttgcaccagcttaaatgctgtggtgtgtttgaagttgttcggatatcaagaacatgctatccaactaggatcacccaccaacagtttgctgaaagatacagatttcttctcttgcgttccattgcatctcaagatccacttagtgtttcaattgctgttttgcaaaagttcaacattccccctgaaatgtatcaagttggctacacaaaattatttttccgtacaggacaggttgctgcactggaaaatgctaaaagacagatgcttcttggaaccctccatattcaaacacagttccggggtttgcattctcggcggggatatcaacgactaaagaaaggggcgatgaatttgcaatcatttatacgtggtgaaagaacaagaatacactttgataatcttgtcaagagatggagggcagctgttctcatacagaaacacactaggcgtcgacttgcagctaacatgttcaatgatcaactgaatcatgtcattcttcttcagtccgtgacgcgtgggttcctggccagaaggaaatacaagtgtctgcagaatgaaaaggagtcaaaggccagtcacagcatagttcaagggaacacaaggaagaataactcagagtcaagaatatgccatgaaatgaatgggcattatcctcacgaaccagtcatcactgagcttcagggtcgtatcacgaaagctgaggctgcattgcggggtaaggaggaggaaaatgtaatgctcaaacagcaattggaacagtatgagaggaaatggtcagaatatgaagccaaaatgaaatgtatggaagaggcatggaagaggcagctctcttctctgcagctgagccttgttgtcgctaagaagagcctagctgctgatgatgcagccactagagcagctcggactgattgtactcctacacatgcgcagtatgactctgaagatacattatccaccgggactcgtacacctgaagtgatcgagtcgaaacacgacaaccacaaccctgaagctaaagtttcagcaggaaactcggataggcgagtgaatgctgtgaaccacctagcaaaggagtttgaagacagacgacaggtgttcgaagacgatgcgggcttcctagttgcagtcaggtccggtcagattggttcaaatatgaacccagatgaggaactccggaagctcaaggaccgctttgcgacatggaaaaaagactacaaatctcggttgaaggagactaaggtaaaccttagtaaggttggcacccatgatgagaaatcacggaaaagatggtggggaaagaagagctcgaagtgaaacgtgtaagagaatctccacaacattttgcaacgacactgggtcaaggaaagtggccaggaatgccagggcaggcgagaagaatctgcctctgatcccaaaagcttggtgagatgatgaactcccatgttggtggcagtgccgttactcatctgatgtcacgagtgtcgaaaagatcaaagtagacaataggtgaagccagagttctgtacatgtatattagtcagctctgagtcatcacttgacagtgtgtttatgtcatcgtgtatgtagagtgataaatccgaggcgtggaagggtaactaaatgcagattatccaccatgagcgaagagatgcgaaagcagagtactgtaatatgtgtacagtgagaacattgttgaaatgtgcaaggcattttactctgaaaactgtgattgcatcgccccatattttgcactatcttttgagacctttacacttacacatcagttttattttttt

SEQ ID NO: 144579 - DNA, 1557 bp, Zea Mays
atggtcatcgataatattactatagaagcaaaacccaatatatatagtgtggtacgcaatcacgaacacaacagtccaaacctacacaatgaacccatgaaaattattcttttgttaactactactagcaccacccaacaaaatactccgaccagcaaagaaaccaggaaccatggattacatgcagaatcatcatcatttcttcttggcagccgccttggtcaccttggctcccgttgggtccttcttctccacgctctttatcacgccgaccgcaaccgtctgcctcatgtcgcgaaccgcgaagcgccccagtggaggatactcggagaaagtctccaccaccatgggcttcgtggggatcatcttgacgaagccggcgtcaccgttcttgaggaacttgggggcgctctccagctccttgcccgaccgccggtcaatcttggtgagcagctccgagaacttcacggcgatgtgggacgtgtggcagtccagcaccggggcgtagccgttgccgatctgccccgggtggttcatgatgatcacctgcgcggtgaagctggcagcctccttggcggggtcgtccttggagttggaggccacgtagccgcgcttcaggtccttgaccgccacgttcttgacgttgaagccgacgttgtcgccgggcagtgcctcctgcatcgtctcgtggtgcatctccaccgacttgacctccgtcgtcaggcccgtgggcgcaaaggtgaccaccatgccgggcttcaggagcccagtttccacgcggcccaccgggacggtgccgatgccgccgatcttgtacacgtcctgcagaggaagccgcaggggcttgtccgagggccgcttgggctcgttgatctggtccagcgcctcaaggagggtggggcccttgtaccagtccaggttcgtcgacctctcgatcatgttgtcaccctcgaacccagagatgggcacgaaggggatcttgtccgggttgtaccccaccttcttcaggtaggaacccacttccttgacgatctcgtcgtaccgagccttggagtacttgggggtagtggcatccatcttgttgcagcagcagatcatctgcctcacaccaagagtgaaagcaaggagcgcatgctcacgggtctggccgtccttggagataccagcctcgaagccaccagtggtggagtcaatgatgagcaccgcacaatcagcctgggaggtgccggtgatcatgttcttgatgaagtcacggtgcccaggggcatcaatcacggtgcagtagtacttggttgtctcaaacttccacagggcaatgtcaatggtgatgcccctctcgcgctcggccttgagcttgtcaaggacccaggcgtacttgaaggacctcttgttcatctcggcagcctccttctcaaacctctcgatgacacgcttgtcaatgcctccaagcttgtagatgaggtggccggtggttgtggacttgccggagtcgacatggccaatgaccacaatgttgatgtgaaccttctccttccccatggcaacgggagcagctga

SEQ ID NO: 144580 - DNA, 100 bp, Zea Mays
cttcacgagcctctctgcaagatagacaagcaaaaaaggctaggatcaaagctaatctctactacttattaagtaagcaatagtagtctgtctctgaccg

SEQ ID NO: 144581 - DNA, 1428 bp, Zea Mays
ctctcacatcgcttcgcttccttccgtttccctagctgccgcgaacgcccgccgtacacggacaccgacagctaggacgcggcacttctcgtgctgggttcggggagctggaagaagaagactagaccaggtcgatggggtacgcgcggacgctgaaggcggcggccgcggcggtgctggcggccgggggcgtgcggttccttggtcccgcgctggcggcgttcgtgacggaagagctgccacgcgcacgcgccgtggccgccacctggctcacgccgccgtacctgtacctcgtcatcaacgccatcatcatctccatcgccgcgtcgtcacgcttccagccgagcgacggcggtcgtccgtcggccccttcgtatgcccccgccgccgacgccggcgccggcgccatcggagtaggaggagcgggcgaggagatagagcaggacgggatccagcctgcggttgcgttgcaggtgcctgcggcgatgcccctggtggcagtgaaggccgcggccgtcgctgctgtcgaggagcgggagcctctggtggaggtccacactacagaggtggcgccggtgccgccagacgaggtggacgaggactactcgatttcaaggtcgacctggacgccgcgtcggaggggcgaggagccggaggtggccgcggatgtagagactaaggtgctgccgttcaccgacctgaccaactccagggacaagccgctggtatcggcgaggttcagcaggaagacggccaaagcaagcccagaaggtagcagggctctgcgggtagcgcggccgcggaaggaggagacgctggagagcacgtggaaggccatcacggagggccggggcccgccgctagctcggcacctcaagaagtccgacacctgggacgcccgcccgggccgccgtccgtccgccggcggccgcagcggggaggtcgatccagcggcggtcgcgccggcgggggcgatgcggaaggccgagactttcaacgacggtgggggcgccggaaggagcaaggcgcctcctgcgccggtgcggcgggagccgtcgctggggcaggacgagcttaaccgccgcgtggaggcgttcatccacaagttcaacatggagatgcggctgcagcggcaggagtcgctcaagcactacagcgacatgcttggcaggggcatccgttactgagaaggacttggtgcaaatcgctgcggctcgcaggaagggttatatgcctttctcttttttgttccgtgatcgttctggattttggttcttggtctctgtaagatatggttgtcaaagttactccctaaatggttttgtcaagcaacaaggtgataatgatagattttgcacaagagagaggataagttggtccgcattccttccttatacttttagattaatttactactacattataact

SEQ ID NO: 144582 - DNA, 357 bp, Zea Mays
tctacaatttctgcatccaatactggtggtgcttgggataacgccaagaagtacattgaggctggagcttcagtgcatgccaggacccttggcccaaaaggttctgaccctcacaaggcggctgtcattggttacaccattggagatcctctcaaggacacgtctggcccctccctcaacattctcatcaagcttatggcggttgaatcccttgtcttcgccccctacttcgccgcccatggtggcattacatgtgtgttgtgtaatagcatctgtatagagaaacaatacactcagagctagaccactgacgacgaacctctgtgcaaactttgtcaaggactttgcaagtaacaa

SEQ ID NO: 144583 - DNA, 76 bp, Zea Mays
atgccgcggaccagatccgccggcccagtggccagacaaggctgcggtcgagccgcgccgcccttgcagttcttct

SEQ ID NO: 144584 - DNA, 232 bp, Zea Mays
ttgtactatagggatgtgcaagccagcagcatccttcttgatgataaatttgatgtacgccttggtagcttgagcgaggtgtgtcctcaagaaggggaaggtcaccaaaatgtcatcacaaagctgttaagattttcttcgtaagtttcagataccatctctgcatggctttggtctcttttccatgctaaatgcttcctttgtggagcatgcaaatccatacatatattat

SEQ ID NO: 144585 - DNA, 2163 bp, Zea Mays
aaattactctgctcataaacaatggaaaattgagagagcgagagagaggaagctagcgagaaggtcaagccgcgaagagaagagacgcacgtcacagatccctctccactgtctcaccctttctctctcctcgaccctcccgacgcggcaaagcaaaaacaaagggaggagaggagggagagaagggagaagacgaggccaaaaatcccctccccctccccaaatcctagcccaataatctctcaatcaggggattcttaggtctgatcaggtcggaggattcggcagggcgcagccatgaacgaaaaggcgtccgtctccaaggagctcaacgccaagcacaagaagatattggaaggtcttctacggcatcctgagaatagagaatgcgcagactgcaagtcaaagggtcctcgatgggcaagtgtgaatctaggtatctttatatgcatgacatgttctggcattcatagaagcctgggggtgcacatatctaaggtaagatctgccaccctggatacatggctgccagagcaagttgcatttattcaatcaatgggaaacgaaaaagcaaatagctattgggaagcagagctgcctcctaactacgatagggttggaatagagaatttcatccgtgcaaaatatgaggacaagagatgggtaccaaggaatggaacatcaaaatcttcgtccagtgttcgagatgagaagagccaagagtctccggctagtgctaataggagtggacatggtcatagatcttcatttgagcaaaaccgtgcttcaccagctcttccgagcaaagttgcacatgcagcttcaaggatatcctctcaggcatcacctcagcccccgaaggtagaaacaccagttccaaaggtggttttacctcctcagtcacagaaatcccccgccaaagttgatgcaacaccgcctaaagttgagaagccatcggttacaccacctcctaaagttgattatgccactgatctctttaacatgttgtcaatggatggaacaacagagaaagagtcagcgtcatcttcaaacgacgataatggctgggatggcttccagtctgcacaaccagtacctagttcagagaaaaaagattctgccaaaccagcagaaagcaagacccagtctacatctggaatggaagacttatttaaagactcaccagctgtgccattatcctcagctccagctgtttcccaagtaaacgctaagaatgatatcatgagtttgtttgagaagtccaatatggtatcacctttcgctgcccatcaacagcagctggcgctcatgtctcagcagcaagctcttctaatggctgctctcaaagctggaaatgcaccacaaatgatgattccagggactgccaatcagctaaatgctaacggaaccttgcctttccaaaactggacaaatctttatcaaaatcctgggtcgactccagcagcagcacagaatggtgccaccaaggttgctaacaacaatcaggacttctcttctggtaccttcggttttggcacacctggggtgtacaacattagcccaactgtcccagcaaatggggccacgacagcaggtgctatcaacaacggcactgcatcaactgcctcttctactctcccctcacaatctggcaaagactatgatttttcgtccttaactcaaggatttttcaccaaacgatgagcgcctagtgagcttgaaaaccaaacagaccacaggatcatgttggacgaggcatattgatttagggagcacaaggggcttacacatgcttatttcgaggcagattttcttctggtggatatattgttgtttcatgaccttgtagctgtcggacaataagagtggaaatatgccgcaaaatagctttgttgtttctaaaagcgaagaatacattgccggttatgtcaacggcttttactcgaggaccaccttgtcagttatacaagtctaatgcagtcttttcactatgttggtcttgatttatctacgacgtcgatactgattacagattgttttgtattgtattttacgacaattggattttatttgtttctacatttgtatattgtttgtgagatgggagaaacctcttcaaggcgttgaaccaaacgtacttttccaacatttcatatatatctt

SEQ ID NO: 144586 - DNA, 913 bp, Zea Mays
ataaacaatggaaaattgagagagcgagagagaggaagctagcgagaaggtcaagccgcgaagagaagagacgcacgtcacagatccctctccactgtctcaccctttctctctcctcgaccctcccgacgcggcaaagcaaaaacaaagggaggagaggagggagagaagggagaagacgaggccaaaaatcccctccccctccccaaatcctagcccaataatctctcaatcaggggattcttaggtctgatcaggtcggaggattcggcagggcgcagccatgaacgaaaaggcgtccgtctccaaggagctcaacgccaagcacaagaagatattggaaggtcttctacggcatcctgagaatagagaatgcgcagactgcaagtcaaagggtcctcgatgggcaagtgtgaatctaggtatctttatatgcatgacatgttctggcattcatagaagcctgggggtgcacatatctaaggtaagatctgccaccctggatacatggctgccagagcaagttgcatttattcaatcaatgggaaacgaaaaagcaaatagctattgggaagcagagctgcctcctaactacgatagggttggaatagagaatttcatccgtgcaaaatatgaggacaagagatgggtaccaaggaatggaacatcaaaatcttcgtccagtgttcgagatgagaagagccaagagtctccggctagtgctaataggagtggacatggtcatagatcttcatttgagcaaaaccgtgcttcaccagctcttccgagcaaagttgcacatgcagcttcaaggatatcctctcaggtaaccccctcactaccaaaactttcctaagcaatagtcagttcatcattgtgaaactagcggatgtgtcttcatacatagctcttt

SEQ ID NO: 144587 - DNA, 1345 bp, Zea Mays
atcccgtggttcggccaagaccaacgcttgcctactccacgttgtggcgtcccaacggacgagggttgcaatcaacccctctcaagtggtccaaagaccaacttgaataccacggtgttttgctttgcctttcaatatcccgtttgcgaggaatctccacaacttggagcctctcgcccttacacttgagattcacaaagaaatacggagtaagggaggaactagcaacacacacaagactcaaaatcagagcaacagcacgcacacaagtcgcaacaagaactcgcaacaccactcaatgagttcacaactcaacaagagctctagatgctatcacaatgaaccaaatgcgcggaatcgatgtcttggtgcttaggaatgttgtaggaatacttggtgtactcctccatgcgcctaggggtcccttttatagccccaaggcagctaggagccgttgagagcaaatctggaaggctgatcttgccttctgtcgactggtgcaccggacagtccggtgcacaccggacactgtccggtgcccgatttctttccttaaacggcacagctgaccgttggccgccagagagccgttggcgcaccggacatgtccggtgcactccggacagtccggtgcccccttctagccgttggctcggccacgtgtcccgcgcagatcgcgcggccgaccgttggcacggccgaccgttggctcactggacagtccggtgcacaccggacagtccggtgaattatagccgtacgtcgccggtaaattcccgagagcggccagttcgcccgagtcagtctggcgcaccggacactgtccggtgcaccaccggacagtccggtgccccagaccgaacagccttttggctgtacacagccaacttttctctgactcgatttctcctgtttcaagcacttagacacaatacattagtcttcaaaacaatgtactaaggcttagaaacatacctttactcttgatttgcactttgtccatccatgggtatagattcacatttaagcacttgtgttggcactcaatcaccaaaatacttagaaatggcccaagggcacatttccctttcaatctcccccctttttggtgatttatgccaacacaacataaagcaactagaacaagtgcaatatcacttcaaataaaactcaaatttattttgattcaattttggcatatatggatcatcctttgccaccacttggtttgtttttgcaaatcaaaactcaaatttctatctctaagtcaaacacacatgttaagtcataaagagagtcatttcaggagtatttgattcaggattccaaaaactccccctttttc

SEQ ID NO: 144588 - DNA, 506 bp, Zea Mays
atgccttcgtggtgcctcatcttcgccgcgacttgaaacctccaccccgtcgaggaatggcaggcattgtcgtgccttgaacaccgttgcgctacccgtcgtcgacgcggcccatctaaggcagggacatggtacccccgtcgccgaggtcgaagacctcatgccaccaccttggcttgaagccttcaccccgtcgaggatcacacaacaagcacaggtcagatgaaagaaaaaacagttatggtctcaattggtctccttcaaaaaggttgaagaaagaaacttcacacatcgaaagaaacgacaagaacgtgcatgaaaattaaacattgctatcaagagaagccatattttctatagtgctcccaagctgtttatgtggcctttaagggtacactgccacaaaaaagctattttatggcctttaaggtgtttttacactagccaaaggttttgtcgagtgtaacactcgacaaagaatactcggtaaatattttatcagcaaa

SEQ ID NO: 144589 - DNA, 351 bp, Zea Mays
atgggcgattgggcgagccgcacacgggccagtgatggtctggcacctggcagtgctcgtgtcactagtcagcagcactccacagcgagcgagctgaaaccgtcggacggctggagagctccatgtgtcggcaactcaacaccgccagaggaagaaaaggttgcagaatgtggaagattttgctgggcaggccatgtgtatgccaaaatgcgtaggagtactggtgaaccgaggcatgcattgcattgggggtaccatagtgatgctgtccctttcagaggttgccacaccgatccagtaaccacgctgtcacgcttatacatacatagaaaagggatggatgctatataa

SEQ ID NO: 144590 - DNA, 835 bp, Zea Mays
actctaccaccccacccctgcccgccatcaatgcggtccatatgcgtgcgtcgccttaaatcggcctaccaccctccttcgcccccgccgcagcacgcagaattttcttactgctggctgctgctcgccattgctgaccacactcacagcagcctccctccccctcgccaccgaaagctagcccgttgcttgcaagcctcgccaactgccgctatatatacgcatacaagcgcgcgccgcgcacgcgcagcacgcaatcagaacagtggttgctggagagcgcgcgggccgggcaaggagcaaggacgagcagggtcgtcgatggtgttcttctgcttcctggtggagcagcggcggacggtgcggagcagcaagccggcggcggggatctgctcgcgctgcggcgggtgcgccagcgtggcggacatggagaccgccaccagggtctgctacctgctcaccgtgcaccgccgcacctggcgcgccatcatctgcaccttctgcggcgccatgctcaagtcctaccgccactacaggctctactgactctcggccgatcgacggagttgttcgagtcggtgggtggtggaggaacgcgcgccttcattcttcgcggcttgctgtgaggtgtagtgatgagctacgtacggtactagctagtgatctgttcttcctgatgagtcctcctctaactgggtgtcttgctcgcgactgctacaagctagattttgtttttgtttttgttttgttcctgcttgattatgctgctggggtttgcagatggttgtaatggcagagctgcgtgtaaatatagttatgtgtcatcactcatcca

SEQ ID NO: 144591 - DNA, 1662 bp, Zea Mays
gtttggcccacgagcggttactgggtggacaggtggctccgcgtgtgcgcgttcacccgcctcatcctctccttcgcaagacggcaaagaggagtcgccatcgcccgccccatctagtcggtgtcggtgtggtgtgggggcggtgctgcgcgtgtgcgctcctctgttcggcaggactccttcaagcagaaggggcggagcagcatggcggggcgctacgacggcaaccccttcgaggaggaggacgtgaaccctttctcggaacaagcgcgcggcaaggctggcgggcagtccaacttcggcggtggtgcgttttacatgcctaacaccagaaacatgcctcctgcatccaattcgcgcctttcgccgcttcctcctgaaccagcagacttcagtgctacagtggacatacccctggactcgtcaaaggacctgaagagaagggagaaggagctgcaagcaagggaagcggaattgaacaagagggagaaggaactaaaacggagagaggaggctgcagcgagagctggcattgtcattgaggagaaaaattggcctccttttctgccactcatccatcatgatatcaccaatgagataccgagtcaccttcaaagaatgcaatatgttgcatttgcgtcgtttcttgggttggtttgctgcctcttctggaatgtcatagcagttactacagcttggatcaagggggaaggcgttaagatctggttgttggcaataatctacttcatatctggtgttcctggtgcatatgttttgtggtatcgtcctctatataatgcaatgaggactgatagcgcattgaagtttggattgttcttcttgctttacgtattccacattcttttctgcgtattttctgctgtggctcctcctgttgtatttgaaggaaaatcattggcaggaattttgccagcaattgatcttattagcgtgaatgctttggttgggatattctactttgttggatttggactgttctgtctggaatcattgcttagcatctgggtcatccagcaagtgtacatgtacttccgtggaagtggaaaggctgcagagatgaagcgtgatgcgacgaggggtgcaatgagagccgcattttaagtgtggtgtggtattttttttgtgatgacagtcctaggcccaagcgcatacttccggtggataggttgtgcaccgaacaaaaagcagatgtttcttccttggttgctgactatgataccaaactgccagtaggttatcatgatgttacaagtgacattatatcactccccgtcctgatctaacaagaatggggaatgtgcagcttttacagctttacttaatcgttttgttcttgctagttgaaatgtggaatggattatgaatcaagtttagttaagttgtacagtgctgttaactatttgtactccttttgaacggctattggtacttcgttggaacaataatacagtggtgatattggcggaagcatttggcaaggcagcaaatgatcatgcgtgatcgtgtattgtttgaatgcggtgtttgaagcgtgtgcgtcttcaattgaaaaggaatggttttgcaaaattagatgcttagcttattttgatgtcatggagtggtatgaaaataagctagtttttagcttttaaaaaaaat

SEQ ID NO: 144592 - DNA, 5545 bp, Zea Mays
atggccggcgctgcaggtgggttcgtcacgcgggcgttcgaggccatgctcaaggagtgcgccgccaaccgcggcaagttcgccgcgctgcagcaatccatccagtcatacctcgatagcatcaagggggctacggcggagggcgcggtcatcacggaggcgctcgcgtcggctgggcgcgtgctcgacggaccgcaggccgagctggtgctgcagccgctccgcctcgccgtcgagaccaagcacgtcaagctcgtcgagcccgcgctcgactgcctccacaaacttattgcttatgaccatttagaaggcgatcctggtttagaaggtggtaaaaactccccaatatttacagacatcttgaacatggtatgtggttgcgttgataacacatcctctgacagtactgttctccaagtcttgaaagtgcttctcaatgctgttgcttcaaataggtttagagttcatggagagccattgcttggggtcattagagtatgctataacattgctcttaatagcaagagccctgtgaaccaggctacctcaaaggctatgttaacccagatgatcagcattgtattcaggagaatggaatctgagcaggtttctgtattgcctgcaagctctgtggttaaagatacaccttcatctatcacaaatgaatctgaaaatggagaaatatctaccgatggccaagatgaggaaaaagttactccgggagatgcattgtctatgaatcggccttctgaagcacctccaacatctgttgaagagcttcagaatcttgctggtggagcagatattaaggtattgcattggttccatctaattacaagagatcttttacaggggctggaagctgttctagacaaggctgttgaacttgaagatgggaagaaagtgtcacgtggaattgacctggacactgtgaacataatacagcgggatgcactattgctctttcgaactctttgcaagatgagcatgaaagaagaaagtgatgaagttgctaccaagacaaggctgctatcacttgaactgctccagggattgctagagggagtcagcaacgcattcacaaaaaatttccacttcattgattcggttaaagcatatctttcatatgctcttctgcgagcatctgtcacttcatctccagttgtttttcagtatgcttgcggtatattttcagttctgttgctccgttttagagagagtctgaagggggaaattggtgtcttctttcctctgatagttttaaggtctttggatagctctgatagctccctcagccagaaggctagtgttcttaggatgttggagaaagtttgcaaagatccccaaatgcttgcagatgtgtttgtgaactatgactgtgatcttgagggaccaaatctttttgaacgcacggttagtgcactctcaagaatagcacaagggtctcaaattgctgatactaactccattgtgtcatcccagacagtttctgtaaaaggctcgtctctccagtgtttggtgagtattctgaagtcattggctgtttgggagcaacttcgaagatattccttaaagcaagggagcattgttgaatctcatgaaggggatgcttcaaggagcgtgacaactgatgagatgaagagccaagaggatgttcggaatcagtttgagagagccaaagctcataagtcgacactggaggctgcaatctcagagtttaatcgtaaaccaactaaagggattgaatatttgttgtcaaataaattgatagaaaataaggcatcatctgtagctcagtttctcaagagcaacccgggcctggataaggttatgattggtgagtacttgggacagcatgaggagttccctcttgctgtgatgcatgcctatgttgactccatgaagttttcaggattgaagtttgatgctgcaattcgtgagttcctgaaaggatttcgccttcccggtgaggcacagaagatagatcgcataatggaaaagtttgctgagcggtactgtgctgataatcctgagcttttcaaaaatgcagatactgcttatgttcttgcttatgctgttataatgttgaatactgatgcacacaatccaatggtgtggcctaagatgtcaaaatcagattttgttcgtatgaacactgcgagtgatgcagaagaatgtgccccaaaggagctcttggaagaaatttatgattccattgtcaaggaagagataaagataaaagatgattctcatgatacttcaaaaaccacaaagagacctgaaacagaagaaacaggccgtcttgtcaatatcctcaatttagcccttccaagactgaagtcagctagcgatacaaaggctgagagtgaaaagatcatcaaacagacacaggcacttttcaggaaccagggacagaagaaaggtgtttttcacgttgcacagcaggtggagcttgttaggccaatgcttgaagctgtaggatggcctttgcttgcaacattttctgtgaccatggaggaaggtgacagtaagcctagggttgtatcatgcatggaagggtttcgtgctggtatccatcttactcgtgttcttgggatggacaccatgcgctatgctttcttgacgtccttagtgaggtttacatttttgcatgctcccaaggagatgcgtagtaaaaatgtcgaggcactgaagactcttcttggtttagctgacactgatatggatgctttacaagatacttggaatgctgttttagaatgtgtatcgagactcgaatatatcacttcaaatccttcaatttctgcaactgtaatgctgggatcaaatcaaatatcaagggattctgtagtccaatcgctgaaagagttggctgggaagcctgctgaacaaatctttgtaaacagtgtaaaactgccaagtgattcaattgttgaattcttcaccgccctttgtggcgtttctgctgaagagctaaaacaaacacctgctcgtgtctttagcttgcagaagcttgtagagataagctattataacatggctcgcatacggctggtgtgggctagaatctggtctgtgttggcccagcattttattgctgctggaagccaccacgaggagaaagttgcaatgtatgccattgattcgctaagacaacttggtatgaagtacttggagcgtgctgaattaaacaacttcacatttcagagcgacatactgaaaccctttgtcattttaatgaggaatagtcacaactcaaaaatccgaggtttaattgttgattgcattgttcagttgatcaagtcaaaagttggcagcataaagtcagggtggcgttgtgtattcatgatatttactgcagcggctgatgacgaggatgaatcaattgttgagagtgcttttgaaaatgtagaacaagttatcttggaacattttgatcaagtcgttggtgattgcttcatggattgtgtcaactgtcttattggttttgcaaataacaagtgcactcctcggattagtttgaaggctattgctctcctgcgtatatgtgaagatcgtttggcagagggattcattccaggcggtgctgttaaacctattgatgttgttccagaggccaattttgatgtgtctgagcattactggtttcctatgctagctggtttgtctgatttgactttggactctagaccagaagtcagacattgtgcactggaagtgttgtttgatttgttgaatgaaagaggacataagttctcttctcccttctgggagagtatttttcatcgtgtactatttccaatttttgatcatgtaaggcatgctgggagggatggactttcttcttctggggatgattggcttcgtgatactagcattcattcactgcagttaatctgcaaccttttcaatacattctataaggaggtatcctttatgcttccacctcttctcagtttgctgcttgaatgtgcgaaaaaaacagaccaaactgtcgtttcaattgctcttggcgctttagttcatctgattgaagttggtggtcaccagttcagtgatggtgattgggatacattattaaagagtattagggatgcatcatacacaacacagcctcttgaattgctcaattcattaagatttcagaaatcaaaacaccagcagttactttcaagagaagaaagcaatgcacaaggcaatagttaccttgacagccagggggaaccctccatcagtgacagtaataatggtgagcataatcatccagaggcaggtctgcaaactatcctggagaattcagaagatttaccgtcaccatcagggagaacacaacctgccgttttcccacgtggccaaagctttggacaaagaattatgggcaatatgatggataatattttggtcagaagtcttacgtccaaatcaaaaggtcgaacagatgatattgctccaccctcacctgtgaaggcccctgatgatgaggctgacaaggctgaagaggaagaaagccctatgatggaaactgtcaggagcaaatgtattacacagttactgctgcttggggcaattgagagcatacagaagaagtattggagcaggctaaaagctacacagcagatagcaataatggatatcttgctctcactcctagaatttgcttcttcatataactcaccttcaaatcttcggacgaggatgcaccatatacctccagaaagacctccactgaatcttctccggcaagaactagctggaacaacgatttatttagatatcctccataaatcaacagtggagcaggatgaaaaggactccattgaggaaacaaatggtttaaatgtggaatctgatgaccaggaaaagatcaagtacctagcagaagggaagctggtttctttttgcggacaggttttgaaagaggcgtctgatttacagcctagcactggggaggctgccagtgcagacatacatcgtgtattagacttacgggcacctgttattgtcaaggttttgaaaggaatgtgcatcatggatgctcagatcttcaaaaggcacctgaaagagttctatccattaattaccaaacttatctgttgtgatcagatggatgttcgtggagcccttggtgatctctttagcaaacagcttactccactcatgtcctgaagtatggcagtatttcctccgttgcatatatcttgttggaatatattcgtcatcagcatttttgtgcaaacatggagcaccgtgttttccctagcgacttggatgacacaagggatgatgcttccattatacagtagagtagtgttggtgacatgtacgcattgttcaggacattgtacttgaggcctgttgttattttatggcaatagtagattatttgcggcaagcctcgtttttgtgcgtctaataaagtgaggtcctgatgtatagccttgtctgacttgcagaattgcgttggcaaattccctttgtcctccaagttgctgtaatgttgacatgacggtgcatttatctgctggtactagtgtcttgtccgtat

SEQ ID NO: 144593 - DNA, 1758 bp, Zea Mays
agctctgagggcctcccgcccgccgcggcatcatctccggctcctctcgtcaatggtaaggggggcgataggtgtcctaagatgaaactgcggttgcatctgttcgtcctgtgcgtgatcattatattcctggtgtacaacatggctaactttcaacataagcagacaacgttggaagcaaaatctcatccatttgatacagtgacgaggcaggttttcctcttcctaaactatgatatgtgcctccaatgtaaacatcaggtgtctgacagagatgctgttaaggtgcctcaaaaggctgaggctaggattggttatttaccccatggtatagtggagtctaactctgacatggacttgaagccattgtggctgactacaagtgcacggtcaaagaagcctaaacaaaatgataattttttgattgctattgctgccggtataaatcagaaaaaaactgtggatgctattatgaagaagtttcttccagaaaattttacagctatattgttccattatgatgggaatgtcaatgggtggaatgatctaccatggagcaaaagtgtgatacatatagctgcctctaatcagactaaatggtggtttgcaaagaggttcctccatcctgctgttgtgtccatataccagtacatctttctttgggatgaagatctggaagtagataactttagcccgagaagatacttaaatatagttagatcagaagggttggagatatcacaaccaggtcttgactctaagctttctgaaattcatcaccggataactgttcgtaaaaaagcagggacctttcatagaagagttagccgggctaacaaaaagtgttcaagagaaggaccaccttgttctggatgggtcgagggcatggcaccagttttctcaaagtccgcttggcaatgtgtgtggcaccttatccagaatgatcttatccatggatggggcatcgattacaagtttgggtattgtgctcagggtgacaggacaaagaacattggcgtagttgatagtgaatttatagttcaccgaggagtgcagacattaggaggttctacaataacaaaggatggtattcgtggcaaaaatgccaagccactcggccagaaagcagctcaaatccaaagatcgagagggagggctccaggccttgatatgcgaacaaagatccggagaaaatcgcgatccgagctccgtgattttcagaagcgctgggaccgggctgcaagggaagacagaacatgggttgatccgtttgcccgctcccgaagaaagcggaagaatagaaacccacagtagatcagcataatcttcactgttacacttgcacataattccgtttgcaccttggatttagagtgtataataattgcataatcaacattgtataaattctcacagacgaaacgagaaccacacacgtgaaattttccgatgggagttgtgggttcttgtatcgaggggcaggtccaggatttaaaggatgggcattcggaattgtagttggcacaatttttttaacaacataaatttattattcatgggagcggataattatccattggacatagatgtggtataatttgttatccacatgtatgagtatgaatataataaggtattcattgatattttttttctgaacccaatgggtatcagacatgagtacaaatctatacctacgaacgtatatgagtatgagtatatattgaattttgtctcgtagttatagatttgtaaacc

SEQ ID NO: 144594 - DNA, 2216 bp, Zea Mays
aatttccaccaacctttcccaatcgccctccaggctctggcactgcgagacgtttcattagccacttagccgttcccacgacacaatcagcaccaccggtgtcctcgctgccaaggcgcccgcccgctcgtgtgacgagtggcgttcgtccaccgcccattccgcgctcagctctgagggcctcccgcccgccgcggcatcatctccggctcctctcgtcgccacgggtgtcacgaaatgatcctgacttgcttgagttgcttcttgacaccataagaagcgatccatctgtttccagttgtacacagaaaattagtgcctggaaaaataagaatggtaaggggggcgataggtgtcctaagatgaaactgcggttgcatctgttcgtcctgtgcgtgatcattatattcctggtgtacaacatggctaactttcaacataagcagacaacgttggaagcaaaatctcatccatttgatacagtgacggtgtctgacagagatgctgttaaggtgcctcaaaaggctgaggctaggattggttatttaccccatggtatagtggagtctaactctgacatggacttgaagccattgtggctgactacaagtgcacggtcaaagaagcctaaacaaaatgataattttttgattgctattgctgccggtataaatcagaaaaaaactgtggatgctattatgaagaagaaaattttacagctatattgttccattatgatgggaatgtcaatgggtggaatgatctaccatggagcaaaagtgtgatacatatagctgcctctaatcagactaaatggtggtttgcaaagaggttcctccatcctgctgttgtgtccatataccagtacatctttctttgggatgaagatctggaagtagataactttagcccgagaagatacttaaatatagttagatcagaagggttggagatatcacaaccaggtcttgactctaagctttctgaaattcatcaccggataactgttcgtaaaaaagcagggacctttcatagaagagttagccgggctaacaaaaagtgttcaagagaaggaccaccttgttctggatgggtcgagggcatggcaccagttttctcaaagtccgcttggcaatgtgtgtggcaccttatccagaatgatcttatccatggatggggcatcgattacaagtttgggtattgtgctcagggtgacaggacaaagaacattggcgtagttgatagtgaatttatagttcaccgaggagtgcagacattaggaggttctacaataacaaaggatggtattcgtggcaaaaatgccaagccactcggccagaaagcagctcaaatccaaagatcgagagggagggctccaggccttgatatgcgaacaaaggtgagctaacaaagcacttggtatacgtcgtttgaagtgtttaactcgaaaaatgttggtggaagctgaaaattcagagttcaaaaacctatcacttcgcttgtaaaactgctgttccgcttcagttgacagtaacagctcagtaatcaatagctacccagattatgcaatgcgtcggaatttacattccatcccatcgatcagccctcacggtttgctgcaatttttttcgatcttgcagatccggagaaaatcgcgatccgagctccgtgattttcagaagcgctgggaccgggctgcaagggaagacagaacatgggttgatccgtttgcccgctcccgaagaaagcggaagaatagaaacccacagtagatcagcataatcttcactgttacacttgcacataattccgtttgcaccttggatttagagtgtataataattgcataatcaacattgtataaattctcacagacgaaacgagaaccacacacgtgaaattttccgatgggagttgtgggttcttgtatcgaggggcaggtccaggatttaaaggatgggcattcggaattgtagttggcacaatttttttaacaacataaatttattattcatgggagcggataattatccattggacatagatgtggtataatttgttatccacatgtatgagtatgaatataataaggtattcattgatattttttttctgaacccaatgggtatcagacatgagtacaaatctatacctacgaacgtatatgagtatgagtatatattgaattttgtctcgtagttatagatttgtaaacc

SEQ ID NO: 144595 - DNA, 1666 bp, Zea Mays
aatttccaccaacctttcccaatcgccctccaggctctggcactgcgagacgtttcattagccacttagccgttcccacgacacaatcagcaccaccggtgtcctcgctgccaaggcgcccgcccgctcgtgtgacgagtggcgttcgtccaccgcccattccgcgctcagctctgagggcctcccgcccgccgcggcatcatctccggctcctctcgtcgccacgggtgtcacgaaatgatcctgacttgcttgagttgcttcttgacaccataagaagcgatccatctgtttccagttgtacacagaaaattagtgcctggaaaaataagaatggtaaggggggcgataggtgtcctaagatgaaactgcggttgcatctgttcgtcctgtgcgtgatcattatattcctggtgtacaacatggctaactttcaacataagcagacaacgttggaagcaaaatctcatccatttgatacagtgacggtgtctgacagagatgctgttaaggtgcctcaaaaggctgaggctaggattggttatttaccccatggtatagtggagtctaactctgacatggacttgaagccattgtggctgactacaagtgcacggtcaaagaagcctaaacaaaatgataattttttgattgctattgctgccggtataaatcagaaaaaaactgtggatgctattatgaagaagaaaattttacagctatattgttccattatgatgggaatgtcaatgggtggaatgatctaccatggagcaaaagtgtgatacatatagctgcctctaatcagactaaatggtggtttgcaaagaggttcctccatcctgctgttgtgtccatataccagtacatctttctttgggatgaagatctggaagtagataactttagcccgagaagatacttaaatatagttagatcagaagggttggagatatcacaaccaggtcttgactctaagctttctgaaattcatcaccggataactgttcgtaaaaaagcagggacctttcatagaagagttagccgggctaacaaaaagtgttcaagagaaggaccaccttgttctggatgggtcgagggcatggcaccagttttctcaaagtccgcttggcaatgtgtgtggcaccttatccagaatgatcttatccatggatggggcatcgattacaagtttgggtattgtgctcagggtgacaggacaaagaacattggcgtagttgatagtgaatttatagttcaccgaggagtgcagacattaggaggttctacaataacaaaggatggtattcgtggcaaaaatgccaagccactcggccagaaagcagctcaaatccaaagatcgagagggagggctccaggccttgatatgcgaacaaagatccggagaaaatcgcgatccgagctccgtgattttcagaagcgctgggaccgggctgcaagggaagacagaacatgggttgatccgtttgcccgctcccgaagaaagcggaagaatagaaacccacagtagatcagcataatcttcactgttacacttgcacataattccgtttgcaccttggatttagagtgtataataattgcataatcaacattgtataaattctcacagacgaaacgagaaccacacacgtgaaattttccg

SEQ ID NO: 144596 - DNA, 1668 bp, Zea Mays
gtcgcgctgttcctctcgggctctcgttcctcttgctccctcccgcgggccgcggccgccttcgcccgtccccgtccccgtccccgtccccgtcccaatttccaccaacctttcccaatcgccctccaggctctggcactgcgagacgtttcattagccacttagccgttcccacgacacaatcagcaccaccggtgtcctcgctgccaaggcgcccgcccgctcgtgtgacgagtggcgttcgtccaccgcccattccgcgctcagctctgagggcctcccgcccgccgcggcatcatctccggctcctctcgtcgccacgggtgtcacgaaatgatcctgacttgcttgagttgcttcttgacaccataagaagcgatccatctgtttccagttgtacacagaaaattagtgcctggaaaaataagaatggtaaggggggcgataggtgtcctaagatgaaactgcggttgcatctgttcgtcctgtgcgtgatcattatattcctggtgtacaacatggctaactttcaacataagcagacaacgttggaagcaaaatctcatccatttgatacagtgacggtgtctgacagagatgctgttaaggtgcctcaaaaggctgaggctaggattggttatttaccccatggtatagtggagtctaactctgacatggacttgaagccattgtggctgactacaagtgcacggtcaaagaagcctaaacaaaatgataattttttgattgctattgctgccggtataaatcagaaaaaaactgtggatgctattatgaagaagtttcttccagaaaattttacagctatattgttccattatgatgggaatgtcaatgggtggaatgatctaccatggagcaaaagtgtgatacatatagctgcctctaatcagactaaatggtggtttgcaaagaggttcctccatcctgctgttgtgtccatataccagtacatctttctttgggatgaagatctggaagtagataactttagcccgagaagatacttaaatatagttagatcagaagggttggagatatcacaaccaggtcttgactctaagctttctgaaattcatcaccggataactgttcgtaaaaaagcagggacctttcatagaagagttagccgggctaacaaaaagtgttcaagagaaggaccaccttgttctggatgggtcgagggcatggcaccagttttctcaaagtccgcttggcaatgtgtgtggcaccttatccagaatgatcttatccatggatggggcatcgattacaagtttgggtattgtgctcagggtgacaggacaaagaacattggcgtagttgatagtgaatttatagttcaccgaggagtgcagacattaggaggttctacaataacaaaggtttggctttacttttgttttgttgttgcaagctagaagggagggctccaggccttgatatgcgaacaaagatccggagaaaatcgcgatccgagctccgtgattttcagaagcgctgggaccgggctgcaagggaagacagaacatgggttgatccgtttgcccgctcccgaagaaagcggaagaatagaaacccacagtagatcagcataatcttcactgttacacttgcacataattccgtttgcaccttggatttaga

SEQ ID NO: 144597 - DNA, 2215 bp, Zea Mays
cagtaggcgaggcagggaaacggaaaccagactaccgcccccgaaaccgcgacgaccccacacctcgtccgcccctcctcccttcccgactcctactggctatccatcgcccgtctcccccgcgatcaagctgaccagagccggcaaccgatggtggtggtggcggtgggagggggcggaggcggcggctgggggacgtgggaagagctggtgctgggcggcgcagtgctccggcacgggggcgccgcgtgggccaccgtcgccgaggagctccggacccgttccccgtgcaccttctcggccgaggaatgtgaagcaaaatttgcagagatacagttgcggtactccgcatgcaatgcttggtttgaagagcttcgtaagcagagagttgctgaactgaaaagggaattggagaagtcggaaaattctatcggatccctccaatctgtgattcaaaagcctcagcaatagcaaaacatgttgacgggagttctgaataccacaccagtcatactgaatcatgtcccccgctctgaaaatacagcagatactaatttcctcagggaaagaaacatccagggatagatcatcagctgctagtttcacagaggaggcaagcaacagtcagaaatctcagaaagtgcagcagtgtgatactgattcaattcaagctatcaatccatcaccagatgagtcatatccccaggcccaagttgaaaaggtcggtcccaaagatggcttgctttggggttctagaaaacaaagaggagggagagctagaaggacacttctgaaaggtggtgatagtagcggggatggtgagcctacatctacagcattcatacagagggagggttcgtctaaaggctgcatgaagaacttcataactccaaaagtagaaccagttgttatgaagaagggtgtgaaaattccaaaagtagaatctggtgtgatgaataaggatttgaaaacttcaaatgtaggatccggtataatgaagaagtgcttgaaaactcccaatgcacaagctgatatgctgaagaaggatgtgagaactcctaaagcagaatccgatgttataaagaaggggttaaaaattcccaaagtagaacctgatgttatgaagaagggcttgagatcttcaaaggcagaatgtggtcagcctgtgattgagagagttaaactgaagctggcagagattttaaatactatatcaactcaagatgactgcaaaatgttgcaatgccaacttgatacccagaggaaaagagctagatataagaagatgattcgccggcatatggacttccgaatgcttcactctaagatcaagagtggcgcaatctcttgcaccaaggagcttctgagagatgtgctcattttcatcaataatgtaataaccttctatccgaaggctacattggagcacatggctgcggttgagcttcgtgagtctgcatgcaaaactgtgaagcagagtgcaagcttgttcttgaaaagccatggagagatcggaacagctggtgcccccgtagtaaagaatactcgagtcctgcagcctcgatgccctggccccggtgatgcaaggccaagcaaggtttcttcaagggacgctactgccagggaaggagatggcaagcgccctagtgatcagctggctaatcaaaagactatacagagaaatgagccagccaagaagagaggtgtgggtcggcctccaaagagtgggcataggattgctggggcacaggaagatagccccataaaaggcaggaaaaggggcgctggggcacaggaaggtagccccatcaacggcaggaaaaggggcgctggggcacagctagatagccccggcaaaggcagaaagaggagtgcggcagcacaggagaataaccccagcaaaggcggcaagaagagccggcggtgaagctaccatcagctcaatgccggtgaaacagtgtacagcttaaccatatatcataggctggtcccttccaacgttgtttgcctgtcaaaaaagtttttgccccagtattcaaactgatgtaacaggaagggttagctgtttctgatgttgttttgtaaggagtatggacagttaggagggaaccctcattttcctgtagagattatccgagctaggctatacatgtctgactgtgtaatgcttaatagtttaatttatatcatgtgaactgatgcttgaacaccgaca

SEQ ID NO: 144598 - DNA, 1092 bp, Zea Mays
gcaggtcgcggtccccagtcccctccctcctctcccatgctcccggctgactcacgcgacgcgcgcgacgacgcggcagagaaagccaggaactccaaaggtccgagtttgggttcggaagccaacccacaccactccaccacaccctactcgagcgaagcgagccagcaatggtgcatcgcagccgtgggccgtgaccggcgtcgccggagactggaacaacaatggctgtcgtggcgcgcgccggtcttgcgatgcccccagcagttgtgccggcggcggcggccgcggccgcggcggaggaggagatgcggtggcggcagctagacagcggcgtgagcgcggtgtcgttcgggttcgtggccaccgccatcctcgtgtccatgttcctcgccatggccatcctcgagcacttccttcgccccccggcccacacgctcgggcacgcgccgccccgggggatccgccgccgactccgcttcttcctcggccgcggcggtgagcgtggcgacgcccccggctcggatctcgaggcggcgaggaagctccaaggccacgcgcccctcgagatacctgtctatcccaaaggcgtctcggttctgatgccagggcaagacatgccaacgttcatcgcgcatcccgcccctgcaccctgtcccccggagaggatccgatggccatcacaccagccccctcctttcgctggttcctcatcgaaccctagctaggccagggttgctgttgtcagccaaccaccaaaagtctgttatctgtagaggaggaggccggagcagccgtgtgccgatgatccacccactccgtctctccgagacaggctctcccctcctctctgtctgtatctgtactgtacaggtttaggtcttgttctgaagcaagttctacactgctgccctgccccccctgctgcattgtggcgggcgagcggcggctggtggatccgtggagctgatcccacttgctgcgtgtgttattagtagtagatgcctgatggagcatgaaatgtactggaaaactcgcttggcaaatgtggacctacagatgtttcatttcagcaagtcctttcttctgata

SEQ ID NO: 144599 - DNA, 1246 bp, Zea Mays
cacccggcagtcacacctcgaaagcaacagcaagtcagcaacctacctagctagagctatcactatcagtatcaggtacctagagctagcagcagccacacccacaccgtacgtcggcatggctaggtggtcgtcgtcagctctggtcgccgtcctcgtggtcctggccgcggcggtggcgtgctccgcggcgcgccccgtccccgcgcagcagcagcagcaggcgggagaggacgtgaagcggccggacacgctgcacgaggggacggtgctgatcccggggatggggcgctacgagatcggcagccactacatcccggacatcggcgggctggaccacagcatccccgccgccacccacggccagttcctccccggcgccgacgacacctgggtgcccaaccccggcttcgaggtccccaaccccttcatgcccggcgcggccactccctgaacacgtacccgcgctggcgaaggtggctctcggtcgatctgatcgtcgcgcgccgccgcccgccctgaacgaataatactactagctactactcgctctgctacgtattagctagccgtgcttgcctgctgcatgtacgcatgtcttcgtgtggcctgtcccacgtctctcttctagtctctgtgcactttacgctccagtgaagttactgaagtgtgcgcgcgcgatgcgtagcagatcttttgggccggtagttgttgctggaagtgtacgtagtatgtagccgcttgtttcttggccactatatattattacaaataaagtttgatggatgtagttatgggcacaaacttgctacagttcatattttacattaaaattgtagttttgttatactttacatagtcataatctgtatttttttatttttttcaagaataaaaaacagattatttgatccgtgctggtataaagaccattcacacaatttataattatttttacagcggacaataaaaaatgacatgtcatgatatagcgacaaacaacaaatcataaaaaataacagtctacttatgctggttagcaatagtgtttttccatcacgtgccaattatcgttaactatcgctgtcaactgtccattgccatcactgcactgcaccttcaaaacttgtcgtacgtcctcctccttcccatgcgtcctccacacaatttagcgaaatataaaaaagtacctactaagatttgaattacctctagacactacagatcatgttgatttatattatat

SEQ ID NO: 144600 - DNA, 886 bp, Zea Mays
ctaggagaactgggacgacagcagcggcgggcgacggggaacggggaacccctgtactgtatttcgtcgacctttgccatggcgtcgtcgatgatgagttctcgcgcgggcgcggcggcggccggaggaggagaacaccgccgtcagcacgtcaccgtggcgtgcggtgggctgacgcggccgagtaccaggcccgtgccgggcgcagctggcccacggcccgggacgccgaggccgcggggacctgctgcagctgcgggcggctcttcgtcttcgtcgccgacggggcgcgcggggccggagtgcaactggtggggcgctgccgcgcggcagcaggcgacgccgaggcggacgaggagcgccagggccgcgggcgcgcgcgtgcccacgggcaaggggaaccgcgagctggtgagacgggcgctcacgccgcccgccgcgcgcggccgtggccgtggccgcgccggaggagccgtcctcctgaggaggtggagcttccggcccgcgcccagccgcctgcgcaacgcgtcgtcgctctcctcgcagtcccctgactcgccgcggccacgtccgtcgtgatcgaccgtcgcgaccggattctttgattcgttgttttgtgggaaagaaatctttggtctgcactgcagtttgtaaaatgttttgtttaaacgcagtttagaattttgaccagctgtacgtagtgaaaatggtcgattgtatgacatgtaacaatcgcttcatgcaaatgcttccatccggatccgacccacgttttgtgccattgtggcatgtcatcgtgcaactagcgtgccaggtaggcagaataactaaagctattgtgatccaaatctcactttgtaagtttagtaatcaaaatgttcatttt

SEQ ID NO: 144601 - DNA, 2716 bp, Zea Mays
aatccagcaacgccgacgaccggtcagcagcatcagcaccagcgacaagcaacggcggcacgggcagcgcgtcgagcgctgagcccctcgcctccaactcttcccagtcccacgcccgccgtccccgtccccgactccccgagagccgctgtgcctcttctttctccgtgaatgggaaaagctgtctgactcaccctcactgcctctgcgtgcgtgcgtcactgccgcgccgctcgcccgatcacgcgataaataactcgcctctctctctcctcctcaagcagtcaggctcatccagggatcaggggacccgcccgccttgacttttcacgttgcgtttgagcggtgctgctgatctgcgattcctcctctctctctctctctccactccacacctgagagggaatcctgctccctcttgctccgcgcccgcggcggcggcggcggctttggtatccgtgcgggtgtttctgtccggcgtttacttgccgggccagcgcggcattggaggagggagatcggaggcgtgatcgatggggaactgcgtggcgagcgggggcacgacgacggtcacggcggcaggtgctgcaggggaggacgggaggcggcgggggaggaggtggaaggcgccgcgggaggagcagctcggttcggtccccggccggatcttctccaacgacggccgcagccgcaccgccgccgtgttcacgcagcaggggcggaaggggatcaatcaggacgccatgctcgtctgggatgggttcggcggggaggaagacgtcgtgctttgtggggtgttcgacgggcacggcccgcatggccacctggtggcgcgcagagtccgcgatgcgatgccgctgaagctcatgtccgcggtgcgcgcgtccaaggctggcttggatatgcccgccgccgcgtggaggaaggccttcgcgcgcgcctacaagaccatggacaaggaccttcgctcccacgccaccctagattgcttctgcagtggcagcaccgccgtcaccgtactcaagctcggctcggatctctacatggccaacattggtgactcacgcgccgtccttggctcgagggatggtggcgacggcggcatggtggccttgcaactgactattgacctcaaaccggatgttcccagcgaggcagaacggatcaagaagtgcaggggcagagtatttgctctgcaggacgaaccggaggtgccgcgggtctggctgccgttcgatgacgcgccaggcctggcaatggcccgggcctttggggacttctgcctcaaggattatggtgtcatttcggttccagagttcttccactggtcgctcacagagaaggatcagtttgtcatccttgcatcagatggggtgtgggatgtcctcagcaaccaggaggccgttgacatagtgtcgtcgtccccaagccgatcaaaggccgcaagatccctcgtcgaggccgcgacccgtgaatggaaaaccaagtacccgacatcgaagatcgatgactgcgcagtggtctgcctatatctggacggcaaaatggaccacgaacgtgactcgacggcctccatggacaacatgagcctcgacgaaggttcagccgcggacccaaacgaagcccaggagcaggagccagcgctgacccgcaacttcacggtcaggacggtcgccggaagcgcccacgagaaggcgctgtcgggggcggtggatgtggtcgttgccggcgcagcccacgaccagagttggtcaggcctcgacggggtgacgcgggtgaactcgctcgtccagcttccgaggttctccgacgagaaggcgatcggctgacgagctgtgcaattctttggttttcagttaacttattatcttttcctgcttgaaaatttagtttagtttgcccgttgtttgagagcaaagatggaaacggaatactgtatggtctttgtgatttgcatcggcgcgtaggtatagtgtgttttttgagccactgtggtcttagggtgtgagccgcgacttttaacacggcggaattgtgctttgctggagcacaaagggttcgtcctatgctgtgttctatcttcaggtatgataagcattcctgaaaggtgaaacagcaaggggcgccttttgttcagagcttgcgattttgctgtgtttaaacgaacagctcgtgctcctaagcacactggggcgcaaacgcatgctaggcgccagtcatctgggggtgaggtgatgacgctgtcgggtggcctgtaaattcgagcaccgtccatcggcacagcacttggctttgtaaaaagagaagcgtgtgtctgggcttttcccgggcgtagcttttgttgacagggcccgggacgctttgtgttgtgtgtcggctttaccgaccgacgtctgatcgatccgcatctgcagttctgcatggtgctttgccatggcaccctgaccttggttccttgccatagtgcgggtagtggtagtacgccttgcatgctgtatcttgtctggaatgtatgtatgtaacctgccgaaatgtgctgtagagctgtacggcagcacaagttgtaaggtaatccgtgcgaggcctcatggatccaatcgcttgcacgtgatttgtcagtttcttagtaccatttctgcactctcctactgctactgttttaaattaaactatagagagaattataaagatctgtgacaacaaatatgtgtaatca

SEQ ID NO: 144602 - DNA, 1727 bp, Zea Mays
gggacccgcccgccttgacttttcacgttgcgtttgagcggtgctgctgatctgcgattcctcctctctctctctctctccactccacacctgagagggaatcctgctccctcttgctccgcgccgtgttcacgcagcaggggcggaaggggatcaatcaggacgccatgctcgtctgggatgggttcggcggggaggaagacgtcgtgctttgtggggtgttcgacgggcacggcccgcatggccacctggtggcgcgcagagtccgcgatgcgatgccgctgaagctcatgtccgcggtgcgcgcgtccaaggctggcttggatatgcccgccgccgcgtggaggaaggccttcgcgcgcgcctacaagaccatggacaaggaccttcgctcccacgccaccctagattgcttctgcagtggcagcaccgccgtcaccgtactcaagctcggctcggatctctacatggccaacattggtgactcacgcgccgtccttggctcgagggatggtggcgacggcggcatggtggccttgcaactgactattgacctcaaaccggatgttcccagcgaggcagaacggatcaagaagtgcaggggcagagtatttgctctgcaggacgaaccggaggtgccgcgggtctggctgccgttcgatgacgcgccaggcctggcaatggcccgggcctttggggacttctgcctcaaggattatggtgtcatttcggttccagagttcttccactggtcgctcacagagaaggatcagtttgtcatccttgcatcagatggggtgtgggatgtcctcagcaaccaggaggccgttgacatagtgtcgtcgtccccaagccgatcaaaggccgcaagatccctcgtcgaggccgcgacccgtgaatggaaaaccaagtacccgacatcgaagatcgatgactgcgcagtggtctgcctatatctggacggcaaaatggaccacgaacgtgactcgacggcctccatggacaacatgagcctcgacgaaggttcagccgcggacccaaacgaagcccaggagcaggagccagcgctgacccgcaacttcacggtcaggacggtcgccggaagcgcccacgagaaggcgctgtcgggggcggtggatgtggtcgttgccggcgcagcccacgaccagagttggtcaggcctcgacggggtgacgcgggtgaactcgctcgtccagcttccgaggttctccgacgagaaggcgatcggctgacgagctgtgcaattctttggttttcagttaacttattatcttttcctgcttgaaaatttagtttagtttgcccgttgtttgagagcaaagatggaaacggaatactgtatggtctttgtgatttgcatcggcgcgtaggtatagtgtgttttttgagccactgtggtcttagggtgtgagccgcgacttttaacacggcggaattgtgctttgctggagcacaaagggttcgtcctatgctgtgttctatcttcaggtatgataagcattcctgaaaggtgaaacagcaaggggcgccttttgttcagagcttgcgattttgctgtgtttaaacgaacagctcgtgctcctaagcacactggggcgcaaacgcatgctaggcgccagtcatctgggggtgaggtgatgacgctgtcgggtggcctgtaaattcgagcaccgtccatcggcacagcacttggctttgtaaaaaga

SEQ ID NO: 144603 - DNA, 1700 bp, Zea Mays
cgcctgcgcctccgtctccggccggctctcctcgatcgctacgatttcagggggggcccccggacgaaaccaccaaaaatcccagcgcagatcactcgccggcctcctgctccagcagatcctctcccaaccgacagcgtaacaaaaaccccgggctatcctcttcgctgtctgctctccttcacgctactgagcgcggctctgccaaactgcagggatccatcgtcccgcggtaagcaaactgcatggcatgcagttggggtagcacaagaagctgctgctgtgctttctgtgtgcgtactgcgtgcgtagtatatatggtctggtagatcgatctgctgatctggtgttggtacttggaaaaggggccggccagccggggtagtactacggtgatgaggtccatggagagcacggactcgtcgtccggtgagctaccaccaccgcagaagcagccgagctcggcgccggatctcccgccgggcttccggttccaccccacggacgaggagctggtcgtccactacctcaagaagaaggccgcgtccgtgccactccccgtcgccatcatcgcggaggtcgacctctacaagttcgatccgtgggagctacctgataaggcgacattcggcgagcaggagtggtacttcttcagcccgagggaccgcaagtaccccaacggagcgcggccgaacagggcggcgacgtccggctactggaaggcgactggcacagacaagcccatcatggcgtccggcggcaaccgcgagaaggtcggcgtcaagaaggctctcgtgttctaccgcgggaagccgccaaagggcctcaagaccaactggatcatgcacgagtaccgcctcgcggatgcggcgagctcaaccaccagccggccgccgccgccttgcaacgccggaggcaaggccacgtctctcaggctcgacgactgggtgttatgccgcatctacaagaagatcgacaaacttggagtcggcgatccgccgcggatcatggagtgcggcgaggactccgtggagaatgcggtggcagcctacccgacgcatgccgcggctgctgccatggccgtcgcagtcgcaggcggaggaggggcttaccataccggcaattacacttcgctgatccaccaccatcacgaggacagcttcctggtggatgggctgctcacagcagaggacgcgggcggcagctccctgagccagctagccgcggcagccagggcagctgctccaacagacaccaccaagcagctcctcgtcccgtcctccaccaccccgttcaactggctcgacgcgtcggcactcacgattcttccgccggcaaagaggttccatgggtacaacagagacaccactgacggcggcggcacgtccctcccgtcgccgtccgagaggaataacctgcaggcggctgtcggcgccgtcgatagtggcgccagcggtggcactagtgccgtcattccatcatttctcaatccgctcggcgtgcaaggtgcgacaagctatcaccaccacgccattttcggcacaccggtgacgccggaagccgccgcggccgccgcatgcagtttccagcacccctaccagctgtccggcgtgaactggaacccgtaaaaaatccttgataccgacgttgcattggtgcatatggctggcttttcaggtagatcacagcatcaccagcat

SEQ ID NO: 144604 - DNA, 1567 bp, Zea Mays
cgcctgcgcctccgtctccggccggctctcctcgatcgctacgatttcagggggggcccccggacgaaaccaccaaaaatcccagcgcagatcactcgccggcctcctgctccagcagatcctctcccaaccgacagcgtaacaaaaaccccgggctatcctcttcgctgtctgctctccttcacgctactgagcgcggctctgccaaactgcagggatccatcgtcccgcggggccggccagccggggtagtactacggtgatgaggtccatggagagcacggactcgtcgtccggtgagctaccaccaccgcagaagcagccgagctcggcgccggatctcccgccgggcttccggttccaccccacggacgaggagctggtcgtccactacctcaagaagaaggccgcgtccgtgccactccccgtcgccatcatcgcggaggtcgacctctacaagttcgatccgtgggagctacctgataaggcgacattcggcgagcaggagtggtacttcttcagcccgagggaccgcaagtaccccaacggagcgcggccgaacagggcggcgacgtccggctactggaaggcgactggcacagacaagcccatcatggcgtccggcggcaaccgcgagaaggtcggcgtcaagaaggctctcgtgttctaccgcgggaagccgccaaagggcctcaagaccaactggatcatgcacgagtaccgcctcgcggatgcggcgagctcaaccaccagccggccgccgccgccttgcaacgccggaggcaaggccacgtctctcaggctcgacgactgggtgttatgccgcatctacaagaagatcgacaaacttggagtcggcgatccgccgcggatcatggagtgcggcgaggactccgtggagaatgcggtggcagcctacccgacgcatgccgcggctgctgccatggccgtcgcagtcgcaggcggaggaggggcttaccataccggcaattacacttcgctgatccaccaccatcacgaggacagcttcctggtggatgggctgctcacagcagaggacgcgggcggcagctccctgagccagctagccgcggcagccagggcagctgctccaacagacaccaccaagcagctcctcgtcccgtcctccaccaccccgttcaactggctcgacgcgtcggcactcacgattcttccgccggcaaagaggttccatgggtacaacagagacaccactgacggcggcggcacgtccctcccgtcgccgtccgagaggaataacctgcaggcggctgtcggcgccgtcgatagtggcgccagcggtggcactagtgccgtcattccatcatttctcaatccgctcggcgtgcaaggtgcgacaagctatcaccaccacgccattttcggcacaccggtgacgccggaagccgccgcggccgccgcatgcagtttccagcacccctaccagctgtccggcgtgaactggaacccgtaaaaaatccttgataccgacgttgcattggtgcatatggctggcttttcaggtagatcacagcatcaccagcat

SEQ ID NO: 144605 - DNA, 790 bp, Zea Mays
attgtggggaatcagagtatcgccccctaccaaagatgtttgttccaacatccgattatcacaattaactcccccctcaatctgagtatgagcaccagtaggttcatccgaagaagaagcggattcgctggaagaaccataggctccatgctcacccgaggggacaccaaaactcgaagatgaatccgccaaatcaaaggaaataccagtttgagagttgtacttacagtgtatcagcttgcatgcctgccgaagcctcccatgatttgatctccttgtccttggggagcatgcccagcctccgctatcttccgccatcagctcaacgaaagcagactgctcgctgctggacttcgccaaggacgtggacgcgctcatggactgggtctgcctgcagctgccgccggagctgcggcaggaggcggtgcgggccgtggaggccgggcggcgcgcgggcgccggcggccgcgtccgggtccagccgtacctgctagctgccgtgctcgctctagtcgtgccactctcctaagcacgtctctatcgcgtgcatccttgtgtgggggggaaagaataagaaatagaacgacgagacctaactacctaagtctgtcgtaggctgatcatcgctttccctgtggccctagcataaccacatgtcacaatcctttggtgatggagcgccgccaacaccgtgggtagcaacatatcttgtggaagcaaacttcctggtggtagaaccttggtaagtttccaggaaagcaaggtatgtggttcaggtacctttctgtta

SEQ ID NO: 144606 - DNA, 1314 bp, Zea Mays
gctgactccgcctccgcctctacggtgggggccgccacgcccctcgtatgggaccacgtcaccggcgccgctcgcctgccgttccgcctccccgcctccgtcgaatccctgcccgcggggctgccgcggcttgactccccgcgccggatcgccgccgcagccttcggatcggacgacgagctggtggatctggaactgcgggtcgagatctcgtccatcgccggtatcgaggacgcgcttctcctgaagcccgcctctggtaaggccgccgagacgcggctccgcgccgggtgggcacgctggctggaggggaaggccgactacctacggcgcgatcggatgctccgctccaacctggaatccctcaatccgcgcaaccacccgcttctccaggatccggacagccccggcctcacttctctcacccgcggcgaccgcatggtgcagcgaatgctactagccgagctcgacaagcccgcgtccaagagctttgagcggcgtaggcttctatcttacgagaacaagcagagcatgacaacaactgtgaaggagaagccgcagacgggaaggaggtggggatatttcccggggatcgatccacatttgggattctcagagttcatggagaggttcttcgagcatgggaagtgttccatgagagtgttcatggtgtggaacagcccgcagtgggcgtatgacatcaggcaccagaggggactggagagtctactcaagcagcacccagatgcctgtgtagtcatgctatcggagacactggaactagagtccttccaccaattcgtcaaggaaggatataaagttgctgttgcagtgccgaatcttgatgagcttttagaaagcactccaactcacgtatttgcatcagtgtggtatgaatggcggcagacaaaatattaccatttgcactacagtgaactagtacgccttgctgccctttacaaatatggtggaatataccttgactctgatgttattattcttaaacctttaacatcgctccggaattctattggtgccacaaatcatgtctctggaaattcccgttttggtggggctgtgttagcatttgaaaaacagagccctttattggaggagtgccttagggaattttattcgacatatgatgataccctcgtgcagtggaatggggctgaacttatgacaagagtgataagcaatatttctagcagagcagatgaaaacagggggcatcttgacattaagttggagccctttgttaaattttaccctataagctctactgatattatacggtatgatatcaattcatcc

SEQ ID NO: 144607 - DNA, 885 bp, Zea Mays
acttgaaccactctgtagagcaatcgccaatcggcagcttcgtcatccctcgtcgtcggattgtacgctccagctctccaagatttgccttggcttgccgtgccctgcgggagccaagccaaggacggctagcgctcgccacgcgcgatgtccgggcttcctccggccgcgcgaccgctgctaccgtctccctgcgcctcttcctccgttgttcgggcgaaggcagcgtcggcatgctgctccagcctaaagcagtcgcgcccaggccgaagtgctgccgcccgttccaccgtcgccgcgcgtcaggccgcgccgctcttggctgcggcgctcgtccttgtagcggcaccccctggcctgcctgctgctatctcaccagcatttgcacagccagtttcagaaggcgcagcgctgttccggaaggcttgtattggttgccatgacatgggaggaaacattctacagccaggagccactcttttcctgaaggacctcgagagaaacggagttgccacggaggaggaactgtataacatcacatactatgggaaaggaagaatgcccggttttggagagaaatgcaccccaagaggacagtgcaccttcggcccccggctatcggaagacgacatcaagatcctagcttcgtttgtcaagtcgcaagcccagaacgggtggccgaagattgagggggatggagattgatcaaactgaaaaaacgatgagaagacggtgcttgttagtcagatgaaaatggtgacgggaagatagtgtttgtatagtttaggaatctggtctttctgaacttgtaaccttttagtctctgtttctgaactgaacttgtaaccttctggtccgtgtttcagttttctgaacttctattcc

SEQ ID NO: 144608 - DNA, 580 bp, Zea Mays
acttgaaccactctgtagagcaatcgccaatcggcagcttcgtcatccctcgtcgtcggattgtacgctccagctctccaagatttgccttggcttgccgtgccctgcgggagccaagccaaggacggctagcgctcgccacgcgcgatgtccgggcttcctccggccgcgcgaccgctgctaccgtctccctgcgcctcttcctccgttgttcgggcgaaggcagcgtcggcatgctgctccagcctaaagcagtcgcgcccaggccgaagtgctgccgcccgttccaccgtcgccgcgcgtcaggccgcgccgctcttggctgcggcgctcgtccttgtagcggcaccccctggcctgcctgctgctatctcaccaggtttctccggttcttgcttcctataagacgcacaaacctgttgtttttattattgtgtgtatgtattcgctgcatcgcgtaattacatgtgagaccgcttcttgtactaataatggtttcttggaatctgtagacaccatagcttactgttgcgtgccatttgagtttggttgctggttacttacagtggcagactgttag

SEQ ID NO: 144609 - DNA, 1157 bp, Zea Mays
aaaaatttagctttgagctgacgtggggagaggcccccgtgtccgttcacctctccggctctccctcccagcctcgccctcccaccgtcccacgttgttcctcccgaccctcgccgtccctcccgccgcgacccgccctcctcctcccgaccacgccgcccagcccgtgtaccactccctcccagcctcgccctcccacgccgtccctcccgtcgtgacccttcctcctcctcccgacctcgccgcctagcccgtgtcgccgccgtcgcccgtgccactctgctgctgcgaccacgacaatggggatgtggaaggtggtgtgcgtcaccgacgcatcagcgtacatcgcgtcctggatcgttaggctcctcctcgaccgtggctacaccgtccgcgccaccgtgcgagacacagagcccacctcagttgatctattcaagaacttccattatagcaaaaacaatggatttatcgagtttgtacagaaagcaattgatgatatggaaggcatcatgagtgaaccagtacaagatggacatgaaccaaagttagcaaatgaagctgtttctcaggttgtcaaaatcaactacttttcttcgtgttgcaggtgtttgttcggcctccaagagtacctctagaggcacaatatcgtcacaggtccaagatctttagattaccttgagaatgagaagcaataaacggcagaacttcgacaagagttggataacatgaagatggaatcagaaactttggtaaaacattctgaggaaatagaggatttaaagaagacaccataagaaatacatgccctccttcactagctgctaagcttcaatcaggatcagcacaatccagggccataaagttcctaagcccccaacagtgaactattgcaggacgtttctgttttgaaatttggttgttggttgaactatgtctaattgttttatcaataattggttgctagttgtttacaagtatgacttagtaggtccaagtttattgatttttgttactggtacctccaagttttgttgaacattgttgcttcttgcaagacgtattgtgatctatgaattggaactcatgtctgctataattttggttattggatgtgtaaattttgtgaaatatgttatgtgaacatctgtacgctt

SEQ ID NO: 144610 - DNA, 1699 bp, Zea Mays
ggttggtgatgtgaatgaccaaataacattgctaaacactttgttaatgtaacatacatgactggtataggggatccacgagagagaaagcactgggcgctcctactgatgcttttgaaagttttgtcctccttggtttagtggaaacaagttattattctactttaatgatgccttcttagaattttatataactagacaagtgaaaatatgggatatacattgtcttttgcacccatggatgtgtaagttgtaacctcatcaatgcagttatgctctggttttaaaaaaatagtgagcttacatatgcctgcacgcggactgctgatccatgtgttcccctttcttgagcccaatacacatgctaatagcagcatcaggttttagtgttgctgacttgctgtgtggggcaaaccaaaacaaggcaggcttcaaatctaaggaatttccctcttgcctagggctcttacagttgctattatttggccaaggtcaagattctcatacagattgtgtcctgtagtgtgggttggtgccttgttctgttttccatctcactcatccagcacaattctgcccctctaaacaaactttgtattcgctctgctatttaggtgttaaaaaggagaactaaatttagctgtcaaaaaaggagaactgtcctgtataatttctttggtcacacattcatagttcttctgtgacattattacaattaaccaaatatatgcaccacttttcccatgttttttcccttttcctgagctgatgtcactcttttttctggattgcgtgatctcactctccaaatatttggcccttcattatgtatctgtctgactgatgatttcatctcatctgttctcacctaaatgagttgttgatcatccaccttctggtacccaacttcatggcaccaaataatggagtggccgtctaatttgggatctactaccttggatccaactggttgatgagctgatacagcccacctcagttgatctattcaagaacttccattatagcaaaaacaatggatttatcgagtttgtacagaaagcaattgatgatatggaaggcatcatgagtgaaccagtacaagatggacatgaaccaaagttagcaaatgaagctgtttctcaggttgtcaaaatcaactacttttcttcgtgttgcaggtgtttgttcggcctccaagagtacctctagaggcacaatatcgtcacaggtccaagatctttagattaccttgagaatgagaagcaataaacggcagaacttcgacaagagttggataacatgaagatggaatcagaaactttggtaaaacattctgaggaaatagaggatttaaagaagacaccataagaaatacatgccctccttcactagctgctaagcttcaatcaggatcagcacaatccagggccataaagttcctaagcccccaacagtgaactattgcaggacgtttctgttttgaaatttggttgttggttgaactatgtctaattgttttatcaataattggttgctagttgtttacaagtatgacttagtaggtccaagtttattgatttttgttactggtacctccaagttttgttgaacattgttgcttcttgcaagacgtattgtgatctatgaattggaactcatgtctgctataattttggttattggatgtgtaaattttgtg

SEQ ID NO: 144611 - DNA, 1169 bp, Zea Mays
aaaaatttagctttgagctgacgtggggagaggcccccgtgtccgttcacctctccggctctccctcccagcctcgccctcccaccgtcccacgttgttcctcccgaccctcgccgtccctcccgccgcgacccgccctcctcctcccgaccacgccgcccagcccgtgtaccactccctcccagcctcgccctcccacgccgtccctcccgtcgtgacccttcctcctcctcccgacctcgccgcctagcccgtgtcgccgccgtcgcccgtgccactctgctgctgcgaccacgacaatggggatgtggaaggtggtgtgcgtcaccgacgcatcagcgtacatcgcgtcctggatcgttaggctcctcctcgaccgtggctacaccgtccgcgccaccgtgcgagacacagatggtactacatcgcaacttacacagcctttggaaatgtagagcccacctcagttgatctattcaagaacttccattatagcaaaaacaatggatttatcgagtttgtacagaaagcaattgatgatatggaaggcatcatgagtgaaccagtacaagatggacatgaaccaaagttagcaaatgaagctgtttctcaggttgtcaaaatcaactacttttcttcgtgttgcaggtgtttgttcggcctccaagagtacctctagaggcacaatatcgtcacaggtccaagatctttagattaccttgagaatgagaagcaataaacggcagaacttcgacaagagttggataacatgaagatggaatcagaaactttggtaaaacattctgaggaaatagaggatttaaagaagacaccataagaaatacatgccctccttcactagctgctaagcttcaatcaggatcagcacaatccagggccataaagttcctaagcccccaacagtgaactattgcaggacgtttctgttttgaaatttggttgttggttgaactatgtctaattgttttatcaataattggttgctagttgtttacaagtatgacttagtaggtccaagtttattgatttttgttactggtacctccaagttttgttgaacattgttgcttcttgcaagacgtattgtgatctatgaattggaactcatgtctgctataattttggttattggatgtgtaaattttgtg

SEQ ID NO: 144612 - DNA, 742 bp, Zea Mays
aaaaatttagctttgagctgacgtggggagaggcccccgtgtccgttcacctctccggctctccctcccagcctcgccctcccaccgtcccacgttgttcctcccgaccctcgccgtccctcccgccgcgacccgccctcctcctcccgaccacgccgcccagcccgtgtaccactccctcccagcctcgccctcccacgccgtccctcccgtcgtgacccttcctcctcctcccgacctcgccgcctagcccgtgtcgccgccgtcgcccgtgccactctgctgctgcgaccacgacaatggggatgtggaaggtggtgtgcgtcaccgacgcatcagcgtacatcgcgtcctggatcgttaggctcctcctcgaccgtggctacaccgtccgcgccaccgtgcgagacacagagcccacctcagttgatctattcaagaacttccattatagcaaaaacaatggatttatcgagtttgtacagaaagcaattgatgatatggaaggcatcatgagtgaaccagtacaagatggacatgaaccaaagttagcaaatgaagctgtttctcaggttgtcaaaatcaactacttttcttcgtgttgcaggtgtttgttcggcctccaagagtacctctagaggcacaatatcgtcacaggtacaagtgttttacataccaattatgttcccttctttctttggataagttgtacttgcaacatgtaccttgagaaagcatctag

SEQ ID NO: 144613 - DNA, 1380 bp, Zea Mays
aaaaatttagctttgagctgacgtggggagaggcccccgtgtccgttcacctctccggctctccctcccagcctcgccctcccaccgtcccacgttgttcctcccgaccctcgccgtccctcccgccgcgacccgccctcctcctcccgaccacgccgcccagcccgtgtaccactccctcccagcctcgccctcccacgccgtccctcccgtcgtgacccttcctcctcctcccgacctcgccgcctagcccgtgtcgccgccgtcgcccgtgccactctgctgctgcgaccacgacaatggggatgtggaaggtggtgtgcgtcaccgacgcatcagcgtacatcgcgtcctggatcgttaggctcctcctcgaccgtggctacaccgtccgcgccaccgtgcgagacacaggtgcgcatcccggcccgtcctccccaatccccgtgcctttctttcccactgattccctgtggtagctagcggaattactgtgatgttttgtgagattggttaggttagactgggaattgattagttggcaggggactgcataacctaccttggtaaatttgggatgttaggttcggtactattttgcttctggatccacttgcctccggcaacccaaaatcttgattgcatctgtagactgaaaaatgctgctacagatgaacttggcttgtcagtttattaaggagcaatttgtatccccatacatatcagtacaccaagttccagaagggagagaaatagaaaatcaaccaaacggatagaaacagaaactattttttagaatgggtccctattataatcctaacaaggagaaaccttgaagtgcagcctatccttagctccatccaacgcagtcacttgcaatgttttctttgggtcagccgaaaagtgaaggtaacaacaatgaccgaatgccaaaggtaatattactaaagaattatggtaagaaatagaagacagtagtattattctgttgtatctccttgttaggatttgcaacacgtattctgcatttgcaacttttatttgttcttcgtgtggtcattctagcatgcttggattactctctgcatacatagatatgggaaaatagctccgatccattttttggtagccaacgatagctggcagaaaatttattctgtcagacaggcacttctggtctctagatctagattaattaacacactgcacataaatgaggtttccatccgggactatagcttatttctgcactagcgcatcgccacatgtatatgtatcaagcttgagtataagtatatatttccagcagttctacatatgtcaccacaatatatatgttatctttggccattaacttgtatatgtctgtatttatacttc

SEQ ID NO: 144614 - DNA, 591 bp, Zea Mays
atgccaccgttgaagctgccagggtaccccggcggcggcgcgggctgcacgtggctcgcctgcgtcggcggcggctgcacgtacggctgccccgccggaagcgggggcgcggtcgccggcgggtacgctgcttggcagagcgacggaaaaggcacgcggtcagttcaaaccgtgatcgaagccgaggtggcggaagaaaaaacaagtttccggatcgagctcgttgaggatcaccgaccccatcacgctgttcttcccgcgtgccgccacatcaagaccatgtctcagtctctgcgtgctggtctagagatggcaatgggtaaatacccaccgggtattactaccccatacccatacccacgacacaaaaataaccccaccgggttacccatatatgctgacgggtatggatttacccccatatccatacccatgtggtataggaaggatgataattgcaagataccgctggaggccgatttctcaaaattttcgacggacgcgaattgcaagataccgctggaggctaaattgttgagtgtagacttaaaaaacggtggaacatccaaacaacttcgtagtaggttctga

SEQ ID NO: 144615 - DNA, 2742 bp, Zea Mays
agggcacgcgaagccagaaaaccccatacacggtagccgtccggtcgctgccggtgggtggctacccgtaacggcactccactccacttccgctcccactccaccgccgcctccttcgtcctctcgtcattcgctcccggcacgctgtacgccgagaaatctctccttcccagcttctgtcctgtgggaggcttctgagatcgcgcggaggtgcggaatggagagcagcagcggggaggagctggaggaggagttcccgggccacgagtggatcaccccgcagtcctccatcaacgccgcctaccagtctcagaccgagaagggtatcaggaaaatttgctccgatttgttggagttgaaggatgctattgaaaacctgtctgcaaataggcagtcaaagttcctggcttttctcagaatttctgaggaggttgttgaagcagaacaagagttaattgagctacaaaagcatgtgtcttcccaaggaattcttgtgcaggatctaatgagtggtgtgtgtcgtgagctcgacatttggcacaaatctagcaaggaagaagatgcaacaaaaaaagactctgaaactgaacttgatgaaattttgtctgatgatacccaggatcccagaactatttttctagataagttagacgttttgcttgcagagcacaaaatggaggaggctgttcttgctttggaagctgaagagaagaaatatttagttgcagatgaatctggtaaagaatcaaatgcagataatactgcctttaagacagcactggttaaaaggaaaacaattcttgaggatcagcttgttaggtattgtggacagccatctttatctatgaatgaactaaggaagtgtttgtctggtttaattaagataggcaaaagttctttagcccatcaagtacttctaaaagcttatggttcacgcctgcagaaaagtgtcgaggcatttcttcctaactgttcaatctacacggagacatactctgcaactttgtcacagcttgttttctcagctattgcaaaagcagcaaaagaaactaatacgctacttggagatagccccatgaatacaaaccggattatccaatgggctgaatatgaaatcgaaacctttgcgcgtttggttaaagaaaattctcctttgcctgagagtgtttctgcccttcgctctgcctgtatatgcatcgaaactagtctctttcattgctcttgtctagaatcccaaggtctgaaattctcaaaattacttatggtactattgcgcccttatattgaagaagttcttgatttgaattttagaagggtgaggagaaagattgtggatggggcaaggaatgatgatattctgcttctcacccctcaagaaggatcaccgctctctggtgcagtttcaccaaatgttatgcttacaagcagtggaaaaaagttcatgtccattgtcaatgatgttttggatcagatcctcccaatgaccatagttcactttggtggagcaattctgaataaatttatccagctttttgatagatatgtagaaacactgatcaaagtcttgcctgggccttctgaagatgataatctactggagtcaaaagagcctattgaacttaaagctgaaagtgatgcgcaacaacttacactaattggaacagcatacactgtagcagatgagttattgccagctgctgtatccaagttctttgacatacaagctgagaagaaaggagctggtggatcaagcgaaggccttggccctgggtccatatatgccatggaatacaaagagtggaaacgtaatttgcagcattcattggacaaactgagggatcacttctgccgacagtatgtcttatcttttatttacttggaagggaagtcacgtttggatgctaaaatgtacttgggacggaaagacgatgatcttttatttgatcctgatcccttgccttcattgcccttccaggcactgtttggaagattgcaacagctagctagtgtcgctggtgacgttctactgggaaaagataagatacaaaaggttttactctcaaggctaactgaaacagttatcatgtggctctccaatgagcaagagttctgggatatctttgacgaccgatctgtccaactccagccttcggggctgcagcagcttattcttgatatgcacttcattgtcgagattgctgtgtgtggaaggtttccatatagaccagttcagcagcttgtgtccacaatcataaccagagcagttgcagctttctcagcaaggggtgttgatccacaaagtgttcttcctgaggacgggtggtttgtcgacaccgccaaggccgcaatccacaagctcatgctgggggtttctgggtccgagtccgagcccgagcctgatgcggaagaacatattgctctgcatggtgaggtctcagattctgaggagagctcaggtgcatcgacagtaggatcagaagactcattcgcttctgcgaagaacgatgatctagaaagccccgtttacttcactgaccctgagagttgagaacttctcaggtcgtcgttgtagattcagttatcgtttatttgaagttttgtcatcctgcatagttggcagatttcagaaccgtggaacatcgttgcactcaagatgaaaacaaagaacccagaaatgccgtttgtaattatggtcgttgctattgtaccttgttgcttattgttagcgccgatttggacatc

SEQ ID NO: 144616 - DNA, 2261 bp, Zea Mays
ttgaccacctcctccctcgctcggctcggctcccaccttcctccgttgcctcctcttccgcggccccgtcgctgggcttggctttaccagtggcgggttcccacacgggggctagacgccgccaccgctgaccccgtctacaccgaatccccgcgcgatttaacccctcgcctcgctcgccgcctccgcttccatacaaccgcgcactccaaacgcgcacgcgctgttcgttcctcggccgctctgtccacccccgtccttctccgcccccaacagatctccgccggccgtgcggttccttaattcgccttctccgggactgtcggatctccgcggcggctggggatgggcaactgctgcgtgacgccgaaagcagccgacgacgccggcggcggcaagaagcccaaggagccgaagcagaagaagggtaagaagccgaaccccttctcgatcgagtacaaccgctcggggcaggcgagcgcgccaaagctggtggtgctgcgggatcccacggggcgggacatcgcggcgcggtacgagctcggcgcggagctcgggcgcggcgagttcggggttacctacctctgcacagaccgtgcctcaggggaggcgctggcctgcaagtctatctccaagaagaagctccgcaccgccgtcgacctcgaggacgtgcgccgggaggtggagatcatgcgccacctccccaagcaccccaacgtcgtcacgctcagggacacgtacgaggacgacaatgccgtgcacctcgtcatggagctctgcgagggcggtgagctcttcgaccgcatcgtggcgcggggacactacactgagcgtgctgccgccttggtcttacgcactatcgttgaggtcgtgcagatgtgccataagcatggagtgatgcacagggatctcaaaccagaaaattttttgtttgcaaacaagaaagaatcagcggcacttaaggccattgattttggcctgtctgtatttttcactccaggcgaacggttttctgagattgttggaagtccttattacatggctccagaggtgctaaagagaaactatggcccagaggttgatgtttggagtgcaggagtgattctgtacattcttctttgtggtgtccccccattctgggcagaaacggaacagggtgttgctcaggcaatcattcgatctgtcattgatttcaaaagagatccatggccaagggtgtctgataacgccaaagaccttgtcagaggaatgctgaatccggacccaaaacgacgattgacagctcaccaagtgcttggtcacccatggttgcagaacattaagaaggctccaaatgtcaatttgggtgaaactgttaaggccagactccaacaattctctgtgatgaacaagttcaagaagcatgcacttagggttatagctgagcatctttcggtagaagaggctgctgacataaaggatatgtttgagaagatggatcttaacaaggatcaaatgcttagtttcgaggagctgaagcttggtctgcataagtttggtcaccaaatgcctgatgcagatgttcaaacactaatggaagcggcggatgctgatggaaatgggtccttgaattatggagaatttgttacattatttgttcatctaagaaagattggaaacgatgagcatctgcataaggcattcgcatacttcgaccggaaccagagtggttatattgaaattgatgaactccgtgagtcattagctgatgaccttggacaaaaccgtgaagagattatcaatgccatcatccgtgatgtagacaccgataaggatggcaagataagctacgatgagtttgcgacgatgatgaaggccggaacagactggaggaaagcatccagacagtactcgagagagcgattcacaagcctgagccttaagctgcaaaaggatggatcgctgcagatgacgagtacacggtagcccgataacaccacataggcaagttgtgaattacagatggaaaccatgtgtagatttttctggttgtttgttgacagctcttctgcttgtcctgatgttccattgctttgtattcttcgcttgcggcctgtttgaaggattaggggggattgtttatgctatgattgtatttagactgcatgatccatgcctcgctcgtttccaaagtgtactgtacaaaagaaagaggagaaagggattatgaggctctgctcatttcttaacttctgtggattcatttgtttgtgtgttgttct

SEQ ID NO: 144617 - DNA, 1449 bp, Zea Mays
ttttatagcagcctccatgcgcctcactcccgcactcccacaccacgctcgagacgagagccagctctcccagcacacgagcacatggcgtccaccaccctcctcgctgtcttgctgctcgtggctgcgtccgcagcgccggcgcggtcttgctcacctcgcgacctgcaggcgctgttgagcgtgaagcaggcgctagggaacccgtcaacgctgtcgacgtggaccccagcgtcgcccgactgctgctcgtgggaccacctccggtgtaacgacgccggacgcgtgaacaacgtgttcatcgacggcgcggacgacgtgcgcgggcaaatcccgtcggcggtgggcgggctgacggagctcatgtcgctgaccctgttccggctggcggggctgacgggccccatcccggcctgcctggccgcgctgtccaacctgcagttcctgaccgtctcccacaccaacgtgtccggcgccatcccggagtccctggcgcggctgcgcggcctcgactcggtggacctctccagcaaccagctgacgggcggcatcccggcgtcgttcgccgacctgcccagcctccggtcgctggacctcgggcacaaccagctgacgggcagcatcccggcggggctggtgcaggggcagttccggtcgctggtcctgtcgtacaaccagctgacgggcccgatcccgcgcgacgacgcgcgcgacgagatcaacaccgtggacctctcccacaacaagctgacgggcgacccctcccacctgttcgccgccggccggcccatcggcaaggtggacctgtcgtggaactacctcgacttcgacctgagccagctggtgttcccgccggagatgacgtacctggacctgtcccacaacctcatccggggcaccgtgccgctgtcgctggagcggctgtccacgctgcagaagctggacctgagctacaaccgcctgtgcggcccgctccccaagggacacggcgtcatcaagcacgggtgcaagccgtacgcgcacaaccagtgccgcaaagggaccccgctcgcgggctgccaggacctggagtggagtgagtgagccggccggtatggttttctatactctgctctgctctccctcgccggcgtgcttcccgatcgtggtgtgtgtaaggaactaaggacgacggtgcctggtttaggcgtttagctatagacgaaagcacgtacggccgcgtgcctggtctagctacgcggccggttgatcttgagcagttaagcgtgtacgaaacgacagcgctgtgtacgtgtactgtctgctgaagtgtgagatgtactgtctgtgtgtatttggtatggatccgatcggcctgatgtatgaaaaggatgtttacgtactatataaagatggaaaatcgtatttgcctcctcttctttttattatttaataagttgcttttgactg

SEQ ID NO: 144618 - DNA, 264 bp, Zea Mays
ccacatcagccgaaggctgctcattcactgaagtagcatctgtccctgaagggtttgtcaggtcagccacgtcaaccagaggctcattgaaggcagaagtatatggctctgatggtgtagtcaggtcggcaacatcacctaaaggctcgcctgcagcagaagcatcgtcatctgaagatgagaatgtaccaaacagtccagctgagccaatgccagcgccactggcaataccctcctcaagatcagaaatttgcacttcagaat

SEQ ID NO: 144619 - DNA, 1660 bp, Zea Mays
aacaccaatctgttcctctgttggttcgccgccctacgctagtgtggtgggcgctggccaggcaccgcctccggcttctatttaagaaggcgcgcccccgccaccatcctacccaccacacaccaccaccaccaccaccgcacacccggcggcgccaagcccttcgaccaggtagctgaccagcatagcggcagatggtttcgcggccgctagagacttagcgtcgacgaagagggaggaagcggcgtgccacatgttgagtgagcagacggcggctagcactagcagcagcggcggcggcgtcgagcgtcaggacaggtggctgcagccggtggcggagaacgaggaggaggaggaggagttcagggacatccacgcgctgagcccgccgccgagccagccgtcgtcgtaccgccgggcgcgcggcggcgagccgtgggggtccgccgcgggcgggagcaggcacacgtccgtccgctccgtggggagcgacaccgcgcccagcgagcccttcccgactatgaccagggagttctcggccatggtcgccgcagcagccagcgccgcagcagacagccgtgacgccggcagcgacgtcgtgggcagggccgaggaggaggaggaggaggagctggaggagaccaacccgctggccatcgtgccggacagcaaccccatcccgtcgccgcgccggggcccgccgcccgccgccccgggcgccgacgcggcggcgctggtggccgccgacgggcacggaagccgcgaaggcgggggggtgtccgtggggcaggtcaggaaggaggaggtggagtccaagatcgccgcgtggcaggtcgccgaggtggccaaggtcaacaaccgcttcaagcgcgaggaggtcgtcatcaacggctgggagggcgaccaggtcgagaaggccagcgcgtggctcaagaagtacgaggtaattaatatccatgggtctatagcttcaaaacccagcaaaccccccctaatcatgtatctggattgcccagttctgatatcgtcagtgttgttatgttgtatggcacagaggaagcttgaggagaagcgtgccaaggcgatggagaaggcgcagaacgaggtggccaaggcgcggcggaaggcggaggagaagcgcgcgtccgcggaggccaagcggggcaccaaggtggcgcgagtgctggagctcgccaacttcatgagggccgtggggagggcgccctccaccaagcgctccttcttctgaacccaccggcctcttcttcaccagttcctctgtcttgccgccgccgcctgtgcagttcagttcagttcagttgtcctgtgggtcggaccgttcaccgcttcactccacgggatcaggcacagtgatcagtgccgtgctagctgtgtggaacgcttgttttagtgttgtatccacatgtacgatttgtaacgtttccttgcttctcccgtttcgtgttttcgtatggtatctatggtattgcaaagtccatggccacgatagacagggaaagcatatgtatacaccattagaaggatgtgctctgcgcctctgcccgagtcttgaggacaggagctgcatgtatttttcaccaatataatggttgtgtatgtcaattacgaaaagatatgaacaccattaccaccgcgtaaa

SEQ ID NO: 144620 - DNA, 1549 bp, Zea Mays
aacaccaatctgttcctctgttggttcgccgccctacgctagtgtggtgggcgctggccaggcaccgcctccggcttctatttaagaaggcgcgcccccgccaccatcctacccaccacacaccaccaccaccaccaccgcacacccggcggcgccaagcccttcgaccaggtagctgaccagcatagcggcagatggtttcgcggccgctagagacttagcgtcgacgaagagggaggaagcggcgtgccacatgttgagtgagcagacggcggctagcactagcagcagcggcggcggcgtcgagcgtcaggacaggtggctgcagccggtggcggagaacgaggaggaggaggaggagttcagggacatccacgcgctgagcccgccgccgagccagccgtcgtcgtaccgccgggcgcgcggcggcgagccgtgggggtccgccgcgggcgggagcaggcacacgtccgtccgctccgtggggagcgacaccgcgcccagcgagcccttcccgactatgaccagggagttctcggccatggtcgccgcagcagccagcgccgcagcagacagccgtgacgccggcagcgacgtcgtgggcagggccgaggaggaggaggaggaggagctggaggagaccaacccgctggccatcgtgccggacagcaaccccatcccgtcgccgcgccggggcccgccgcccgccgccccgggcgccgacgcggcggcgctggtggccgccgacgggcacggaagccgcgaaggcgggggggtgtccgtggggcaggtcaggaaggaggaggtggagtccaagatcgccgcgtggcaggtcgccgaggtggccaaggtcaacaaccgcttcaagcgcgaggaggtcgtcatcaacggctgggagggcgaccaggtcgagaaggccagcgcgtggctcaagaagtacgagaggaagcttgaggagaagcgtgccaaggcgatggagaaggcgcagaacgaggtggccaaggcgcggcggaaggcggaggagaagcgcgcgtccgcggaggccaagcggggcaccaaggtggcgcgagtgctggagctcgccaacttcatgagggccgtggggagggcgccctccaccaagcgctccttcttctgaacccaccggcctcttcttcaccagttcctctgtcttgccgccgccgcctgtgcagttcagttcagttcagttgtcctgtgggtcggaccgttcaccgcttcactccacgggatcaggcacagtgatcagtgccgtgctagctgtgtggaacgcttgttttagtgttgtatccacatgtacgatttgtaacgtttccttgcttctcccgtttcgtgttttcgtatggtatctatggtattgcaaagtccatggccacgatagacagggaaagcatatgtatacaccattagaaggatgtgctctgcgcctctgcccgagtcttgaggacaggagctgcatgtatttttcaccaatataatggttgtgtatgtcaattacgaaaagatatgaacaccattaccaccgcgtaaa

SEQ ID NO: 144621 - DNA, 1414 bp, Zea Mays
ccaccaccaccaccgcacacccggcggcgccaagcccttcgaccaggtagctgaccagcatagcggcagatggtttcgcggccgctagagacttagcgtcgacgaagagggaggaagcggcgtgccacatgttgagtgagcagacggcggctagcactagcagcagcggcggcggcgtcgagcgtcaggacaggtggctgcagccggtggcggagaacgaggaggaggaggaggagttcagggacatccacgcgctgagcccgccgccgagccagccgtcgtcgtaccgccgggcgcgcggcggcgagccgtgggggtccgccgcgggcgggagcaggcacacgtccgtccgctccgtggggagcgacaccgcgcccagcgagcccttcccgactatgaccagggagttctcggccatggtcgccgcagcagccagcgccgcagcagacagccgtgacgccggcagcgacgtcgtgggcagggccgaggaggaggaggaggaggagctggaggagaccaacccgctggccatcgtgccggacagcaaccccatcccgtcgccgcgccggggcccgccgcccgccgccccgggcgccgacgcggcggcgctggtggccgccgacgggcacggaagccgcgaaggcgggggggtgtccgtggggcaggtcaggaaggaggaggtggagtccaagatcgccgcgtggcaggtcgccgaggtggccaaggtcaacaaccgcttcaagcgcgaggaggtcgtcatcaacggctgggagggcgaccaggtcgagaaggccagcgcgtggctcaagaaaggaagcttgaggagaagcgtgccaaggcgatggagaaggcgcagaacgaggtggccaaggcgcggcggaaggcggaggagaagcgcgcgtccgcggaggccaagcggggcaccaaggtggcgcgagtgctggagctcgccaacttcatgagggccgtggggagggcgccctccaccaagcgctccttcttctgaacccaccggcctcttcttcaccagttcctctgtcttgccgccgccgcctgtgcagttcagttcagttcagttgtcctgtgggtcggaccgttcaccgcttcactccacgggatcaggcacagtgatcagtgccgtgctagctgtgtggaacgcttgttttagtgttgtatccacatgtacgatttgtaacgtttccttgcttctcccgtttcgtgttttcgtatggtatctatggtattgcaaagtccatggccacgatagacagggaaagcatatgtatacaccattagaaggatgtgctctgcgcctctgcccgagtcttgaggacaggagctgcatgtatttttcaccaatataatggttgtgtatgtcaattacgaaaagatatgaacaccattaccaccgcgt

SEQ ID NO: 144622 - DNA, 1655 bp, Zea Mays
cctttgtcctctcgttctctcgacgaaagccaaaaaaacaaacagccaactgcccgactccataaacgcgcacgaacacgcccggctactgacgtttttcacggctaggattgcgtcgcacccgcaccgggcgaggccagccgacggaaatatctggcccactagagctacagctatcccatctccacgaaccatggcagtcgcccaggccgcaacggtggtggctgcggccgccgcgtgccggggcatttcgccgagcgggacgactggcgtgttcaggtggcgaccacgccggcgcgcgctggcacgggcacgcccggcgcggcgcgggagccgagccacgggccgcggccgggggctcgtcgtcgtggccgagttcggcgggacgtacgaggacggattcgaggacgtgcacaagaacatcatcaactacttcacttacaaggccacgcacacggtcctccatcagctgtacgagatgaatcccccagcctacacctggctctatagttacatttctgtcaacgatccattagatggcgattacttccttcgcttgctcgccaaggagaggcaagacctcgcagagagagtgatgatcacgcgcctccacctgtacggcaaatggatcaagagatgcgaccacgcgatgatgtacgaacggatctccaaagagaacctggatatcatgcgccaaaggttggtcgagacagtggtctggccgaccgatgacacaaacttcggcgagtctaaggattgacgcggagcaatagctgcttcaatagatgctgtatattttcttcaatgtttttttgactggctcatttctgtatatggcagctctgctgcatgaatagaacagttgataggggtctgtagtgagctgggacccttcttgtcctcgcacaactcggtgaaaccttgtgagacagtgtgtgtctgtatgtgggttttaacctggatgttgtcttgtgcaaagaagaaaaagaagaacaaggtctcgagggaacccccatgtttgtgttgccactgaagctgacagcaaacctgcctggggtcaggagcagcctcgcctagcgccagaaggtatcgagaagtactgccccattcaccggtcgagtacccacgacttgacggctagtcaaggtttagtgccctgacaaaaaatgccccgatcaaggggacccaaaacagccgcacctcaatcaacaacggtataagcgaggccccaggccctataagaaaaaagaaatcacgcaagaccaaacacatttggcttccattctccaaggaggagggcgaatatgagttacaggacctagagcggacggtttccgttaattacgacaccaccgagttgtcttttaggtgagccctaaagcttctgcacgtcgccattccacggcagaccctcagataggctggcacctcgatctccttcgattactttggctgccctagtaacatggtaggcgcagggatccttcctcttgtcgtctctcccaccatcaacaatatcaaattcaagcatgtcatggttgatgataggcccggcatcaccatcttgttgatgtatgcctttaacaagatgtagatcccacagtccacagacgaagcccgcctgtttgtcgaaatctccccgaggatgatcctcc

SEQ ID NO: 144623 - DNA, 758 bp, Zea Mays
accgggcgaggccagccgacggaaatatctggcccactagagctacagctatcccatctccacgaaccatggcagtcgcccaggccgcaacggtggtggctgcggccgccgcgtgccggggcatttcgccgagcgggacgactggcgtgttcaggtggcgaccacgccggcgcgcgctggcacgggcacgcccggcgcggcgcgggagccgagccacgggccgcggccgggggctcgtcgtcgtggccgagttcggcgggacgtacgaggacggattcgaggacgtgcacaagaacatcatcaactacttcacttacaaggccacgcacacggtcctccatcagctgtacgagatgaatcccccagcctacacctggctctatagttacatttctgtcaacgatccattagatggcgattacttccttcgcttgctcgccaaggagaggcaagacctcgcagagagagtgatgatcacgcgcctccacctgtacggcaaatggatcaagcagagatgcgaccacgcgatgatgtacgaacggatctccaaagagaacctggatatcatgcgccaaagaagaaaaagaagaacaaggtctcgagggaacccccatgtttgtgttgccactgaagctgacagcaaacctgcctggggtcaggagcagcctcgcctagcgccagaaggtatcgagaagtactgccccattcaccggtcgagtacccacgacttgacggctagtcaaggtttagtgccctga

SEQ ID NO: 144624 - DNA, 871 bp, Zea Mays
accgggcgaggccagccgacggaaatatctggcccactagagctacagctatcccatctccacgaaccatggcagtcgcccaggccgcaacggtggtggctgcggccgccgcgtgccggggcatttcgccgagcgggacgactggcgtgttcaggtggcgaccacgccggcgcgcgctggcacgggcacgcccggcgcggcgcgggagccgagccacgggccgcggccgggggctcgtcgtcgtggccgagttcggcgggacgtacgaggacggattcgaggacgtgcacaagaacatcatcaactacttcacttacaaggccacgcacacggtcctccatcagctgtacgagatgaatcccccagcctacacctggctctatagttacatttctgtcaacgatccattagatggcgattacttccttcgcttgctcgccaaggagaggcaagacctcgcagagagagtgatgatcacgcgcctccacctgtacggcaaatggatcaagagatgcgaccacgcgatgatgtacgaacggatctccaaagagaacctggatatcatgcgccaaaggttggtcgagacagtggtctggccgaccgatgacacaaacttcggcgagtctaaggattgacgcggagcaatagctgcttcaatagatgctgtatattttcttcaatgtttttttgactggctcatttctgtatatggcagctctgctgcatgaatagaacagttgataggggtctgtagtgagctgggacccttcttgtcctcgcacaactcggtgaaaccttgtgagacagtgtgtgtctgtatgtgggttttaacctggatgttgtcttgtgcaaagaagaaaaagaagaacaa

SEQ ID NO: 144625 - DNA, 111 bp, Zea Mays
ggtcgtattcatctagacaaaatccactagaaaagaatatgagagaagtatgccttttaattttaggttcgtttgcatgtaatttagattgtactatgccaagctttataa

SEQ ID NO: 144626 - DNA, 80 bp, Zea Mays
tttggcttttagttttgattttttttccctctaaaaagccaaaccaaatgtttagatttaggaatcaattttttttttct

SEQ ID NO: 144627 - DNA, 856 bp, Zea Mays
gaagacttacgcccgactcagcacctgccatatgttcttgcccaagccagtagcccagcccgctcctcttgcccccgcatcgactccaccggaagaagcccgtcacagcccaaagcaccaccacggcaccatcagcatcaccgccgagaagcaagaactgcctcaccacaaagcctgccgtccgtgcgctgccccagccaaccaagccacggcagccacagccggccacggcctgcagccacagcacgaagtcaagtagcccctagcgccagacacctgcactggccacgaccaccgtcggtgccgcccgagccggccgccgccgctgcccggcgtcctgccgccccacgcacatcacacacctctcgtcgcacggccaccggatccagccgagggaatatcggatctggtggccctatcctcctccaccgccagcccgtcatcgccgacgaggaggtccgggggaccaggcagccgcgtccgccccaatccaccggagaagagaagagagggccccgccgccgccttccccgcaggccgcacgagcagccggcatcctgctcgggcagcggtgcggcgagaagaggcgaggtgaggatggcggcgccgcggcggctaggattaggtgtccgctcggtcgcccgcgcggggggcgacgcgagcgtctccttctctctgatgtatagaaataaaaccatctcagagcaaatcgattcgcgcggacacatgccggcatacaagcgagagtcgcgctgtcatgcggatcaagcacaacatgatcagaggcctgacgaccggagtgtagcatcagctctctctctcttgcatggcttagtgcagaagcactgcttgaacg

SEQ ID NO: 144628 - DNA, 589 bp, Zea Mays
ggcggggcggcgatggatagtgcgatgatggtggggcggatggagggttcctgggattgcgcgaccaagagcggggcaaggggaggatgtcggaggcaggggcagggcagaaccgtgcgccacaccactgtggacgcctacggtatcttcttaagaatagtagagattacatctgatgttgtatttggtaaaaaaatatttttttcagagtttagagccaacaactaaactgccatcatctcttcaccaacagatgcacaagactcctagatgtattgtatgggggacaaggatagtctcacagaaaaagggttgctaatgatatcatgttgttgtagaagtaaatcaccatacaatatgaactatgaagtgagtgattgaaccaaaagggttttgcatggcatcctaccataaattgtgagaacacaaaaccataaggggagctgctcctcttaagcggctgacgatcgatctattgtattccagatggtccttaaaccgacaaaatatatatacactgccgcttggtgtatgcaaatagctaactgggcagtcagccaagcgcgtgcactgtagcatgatttagaaa

SEQ ID NO: 144629 - DNA, 1015 bp, Zea Mays
tgcttttaatagttctatcaatttcacattgtttttacctaacaacttatgtctactatctcatagtgggaaaacagtatgccacaacatcatggtcagagtttggacattgcatgaagcacttgctggacaattgagaagaactcatgcctacttgcaggagggttgttgtacacgtgagtggaggtcgaacccttcttgtagggctcttaatgtatgaagtacgccatgctagctattgaatcaagttcaatgggattcgttaaaatataaggagggttgttgtacaagtgagacaaggtcagcccttcttgcagggctcttaatataagcctgtactacacgttcatccacgtcgagctcgtcggctcccaacgcaaccccttcttctctcacgagatcagtggtgaggacgacactggggatagagacctagggttctccaagtgggcctagaaactccatggcaacgtctcaggaaaaatgggcgcattgaagtcttgaaggactttcaggaatactaattttgagaattcgtggaaataaaaatagggttggctttatcaaactgcacaaaaaaatcagcagcacttctctttatcatgcaaggaaaatcaaacttaggagcatcttccaatttcgtcagcagctgagccgattgtgatctctgatcactatacaaccatggaaataaataatgcagctttgctctgcaaattttatacaatagttcttgaatcgatattgactactactatattcacaacgtcatccacaaacatcattctaagaaaactaacaacatatgatggtatgtaaagcatgtttagtgtcaaaaaatgatatgatatatgttaagtacattctataagtttttttttcttggaccatctcgcagtcacacgctaagatactacatatgactatctgcacaaatccttcaccacagttcaaactggccagatgtactccgcatggacatatgtttaggacaacgcattactgtttttctgtc

SEQ ID NO: 144630 - DNA, 1616 bp, Zea Mays
tccatgactgttctggaagctccaagcgttggcgaaaaaagtaagatatttctgcgaggcaaggaatccctcccccgcttctactctttcggttcgccggttcgccgtctcgcacacccacttcctacaccgccaccgagcactcgctcagtttcatacccatcctcgaagtcgcctctgtctagttcctgctcttccaccaccgcctgtgatgtatccccgaggcccggatgggggacgagatgcctcgtctcgccctatgcttgccactcccgccggcaacgacacgcgcgaggaggatgagatcaccaccgcggaggctcatgtggagaaagacgccgcgcggatggacgctgccctcctcatgcggactacgcccaagatggacgagtttcacaccgggggcgatctggactcaagtggaagtggaagcggcatctcggggccaagcgcctccaaaagacagctacaaagaaggggatcgtggcggcaacgagtcagcaggtccagcatccatgcttatccttttcctttgtgtttctatttgatctgtttttttgcccgcgccagcaacagagaagaatgtggtcgtggctgtaatgggtcagcagtttctgcaattttttggacgaccgagaggtgctgccgtttatgagtaactttccagtgggaaaacagtatgccacaacatcatggtcagagtttggacattgcatgaagcacttgctggacaattgagaagaactcatgcctacttgcaggagggttgttgtacacgtgagtggaggtcgaacccttcttgtagggctcttaatgtatgaagtacgccatgctagctattgaatcaagttcaatgggattcgttaaaatataaggagggttgttgtacaagtgagacaaggtcagcccttcttgcagggctcttaatataagcctgtactacacgttcatccacgtcgagctcgtcggctcccaacgcaaccccttcttctctcacgagatcagtggtgaggacgacactggggatagagacctagggttctccaagtgggcctagaaactccatggcaacgtctcaggaaaaatgggcgcattgaagtcttgaaggactttcaggaatactaattttgagaattcgtggaaataaaaatagggttggctttatcaaactgcacaaaaaaatcagcagcacttctctttatcatgcaaggaaaatcaaacttaggagcatcttccaatttcgtcagcagctgagccgattgtgatctctgatcactatacaaccatggaaataaataatgcagctttgctctgcaaattttatacaatagttcttgaatcgatattgactactactatattcacaacgtcatccacaaacatcattctaagaaaactaacaacatatgatggtatgtaaagcatgtttagtgtcaaaaaatgatatgatatatgttaagtacattctataagtttttttttcttggaccatctcgcagtcacacgctaagatactacatatgactatctgcacaaatccttcaccacagttcaaactggccagatgtactccgcatggacatatgtttaggacaacgcattactgtttttctgtc

SEQ ID NO: 144631 - DNA, 1713 bp, Zea Mays
tccatgactgttctggaagctccaagcgttggcgaaaaaagtaagatatttctgcgaggcaaggaatccctcccccgcttctactctttcggttcgccggttcgccgtctcgcacacccacttcctacaccgccaccgagcactcgctcagtttcatacccatcctcgaagtcgcctctgtctagttcctgctcttccaccaccgcctgtgatgtatccccgaggcccggatgggggacgagatgcctcgtctcgccctatgcttgccactcccgccggcaacgacacgcgcgaggaggatgagatcaccaccgcggaggctcatgtggagaaagacgccgcgcggatggacgctgccctcctcatgcggactacgcccaagatggacgagtttcacaccgggggcgatctggactcaagtggaagtggaagcggcatctcggggccaagcgcctccaaaagacagctacaaagaaggggatcgtggcggcaacgagtcagcaggtccagcatccatgcttatccttttcctttgtgtttctatttgatctgtttttttgcccgcgccagcaacagagaagaatgtggtcgtggctgtaatgggtcagcagcacaaataggaaatgttgcatgtgttgccgacagaaccatctcactctctctttagtttctgcaattttttggacgaccgagaggtgctgccgtttatgagtaactttccagtgggaaaacagtatgccacaacatcatggtcagagtttggacattgcatgaagcacttgctggacaattgagaagaactcatgcctacttgcaggcatcatctcaaccatacaatgggattcattgaaatatcaggagggttgttgtacacgtgagtggaggtcgaacccttcttgtagggctcttaatgtatgaagtacgccatgctagctattgaatcaagttcaatgggattcgttaaaatataaggagggttgttgtacaagtgagacaaggtcagcccttcttgcagggctcttaatataagcctgtactacacgttcatccacgtcgagctcgtcggctcccaacgcaaccccttcttctctcacgagatcagtggtgaggacgacactggggatagagacctagggttctccaagtgggcctagaaactccatggcaacgtctcaggaaaaatgggcgcattgaagtcttgaaggactttcaggaatactaattttgagaattcgtggaaataaaaatagggttggctttatcaaactgcacaaaaaaatcagcagcacttctctttatcatgcaaggaaaatcaaacttaggagcatcttccaatttcgtcagcagctgagccgattgtgatctctgatcactatacaaccatggaaataaataatgcagctttgctctgcaaattttatacaatagttcttgaatcgatattgactactactatattcacaacgtcatccacaaacatcattctaagaaaactaacaacatatgatggtatgtaaagcatgtttagtgtcaaaaaatgatatgatatatgttaagtacattctataagtttttttttcttggaccatctcgcagtcacacgctaagatactacatatgactatctgcacaaatccttcaccacagttcaaactggccagatgtactccgcatggacatatgtttaggacaacgcattactgtttttctgtc

SEQ ID NO: 144632 - DNA, 1969 bp, Zea Mays
tccatgactgttctggaagctccaagcgttggcgaaaaaagtaagatatttctgcgaggcaaggaatccctcccccgcttctactctttcggttcgccggttcgccgtctcgcacacccacttcctacaccgccaccgagcactcgctcagtttcatacccatcctcgaagtcgcctctgtctagttcctgctcttccaccaccgcctgtgatgtatccccgaggcccggatgggggacgagatgcctcgtctcgccctatgcttgccactcccgccggcaacgacacgcgcgaggaggatgagatcaccaccgcggaggctcatgtggagaaagacgccgcgcggatggacgctgccctcctcatgcggactacgcccaagatggacgagtttcacaccgggggcgatctggactcaagtggaagtggaagcggcatctcggggccaagcgcctccaaaagacagctacaaagaaggggatcgtggcggcaacgagtcagcaggtccagcatccatgcttatccttttcctttgtgtttctatttgatctgtttttttgcccgcgccagcaacagagaagaatgtggtcgtggctgtaatgggtcagcaggtacaccatccacgctcatcatttcctttgtgtttctgtttgatctatttttttaaaatttctttatcagtttgattagcatccacttgcatccgctcatagtttgattcgtgttcgttggatgggcctcaaaattaccagttgcttcgactacactctctgaatttcgcagatcaagataaaacccgacacaaaggaatgaatagcacacaaaaaatcacagtattatttagtcatattggacacgaataagttaaatttcttaaattttagatccacatttttgtattttggtctagactatcaaaaaaatcctagaaatgtccctctgcctctcgcgcgtgaattctcctctgccgaagggaagacactcaaaggcgagctactgatcttcaactgcttttctggattctctttgcaatatgctttgttggggctagatctgaaatcaatgtttttaataatctagcacaaataggaaatgttgcatgtgttgccgacagaaccatctcactctctctttagtttctgcaattttttggacgaccgagaggtgctgccgtttatgagtaactttccagtgggaaaacagtatgccacaacatcatggtcagagtttggacattgcatgaagcacttgctggacaattgagaagaactcatgcctacttgcagcctgtactacacgttcatccacgtcgagctcgtcggctcccaacgcaaccccttcttctctcacgagatcagtggtgaggacgacactggggatagagacctagggttctccaagtgggcctagaaactccatggcaacgtctcaggaaaaatgggcgcattgaagtcttgaaggactttcaggaatactaattttgagaattcgtggaaataaaaatagggttggctttatcaaactgcacaaaaaaatcagcagcacttctctttatcatgcaaggaaaatcaaacttaggagcatcttccaatttcgtcagcagctgagccgattgtgatctctgatcactatacaaccatggaaataaataatgcagctttgctctgcaaattttatacaatagttcttgaatcgatattgactactactatattcacaacgtcatccacaaacatcattctaagaaaactaacaacatatgatggtatgtaaagcatgtttagtgtcaaaaaatgatatgatatatgttaagtacattctataagtttttttttcttggaccatctcgcagtcacacgctaagatactacatatgactatctgcacaaatccttcaccacagttcaaactggccagatgtactccgcatggacatatgtttaggacaacgcattactgtttttctgtc

SEQ ID NO: 144633 - DNA, 1360 bp, Zea Mays
tccatgactgttctggaagctccaagcgttggcgaaaaaagtaagatatttctgcgaggcaaggaatccctcccccgcttctactctttcggttcgccggttcgccgtctcgcacacccacttcctacaccgccaccgagcactcgctcagtttcatacccatcctcgaagtcgcctctgtctagttcctgctcttccaccaccgcctgtgatgtatccccgaggcccggatgggggacgagatgcctcgtctcgccctatgcttgccactcccgccggcaacgacacgcgcgaggaggatgagatcaccaccgcggaggctcatgtggagaaagacgccgcgcggatggacgctgccctcctcatgcggactacgcccaagatggacgagtttcacaccgggggcgatctggactcaagtggaagtggaagcggcatctcggggccaagcgcctccaaaagacagctacaaagaaggggatcgtggcggcaacgagtcagcaggtccagcatccatgcttatccttttcctttgtgtttctatttgatctgtttttttgcccgcgccagcaacagagaagaatgtggtcgtggctgtaatgggtcagcagtttctgcaattttttggacgaccgagaggtgctgccgtttatgagtaactttccagtgggaaaacagtatgccacaacatcatggtcagagtttggacattgcatgaagcacttgctggacaattgagaagaactcatgcctacttgcaggagggttgttgtacacgtgagtggaggtcgaacccttcttgtagggctcttaatgtatgaagtacgccatgctagctattgaatcaagttcaatgggattcgttaaaatataaggagggttgttgtacaagtgagacaaggtcagcccttcttgcagggctcttaatataagcctgtactacacgttcatccacgtcgagctcgtcggctcccaacgcaaccccttcttctctcacgagatcagtggtgaggacgacactggggatagagacctagggttctccaagtgggcctagaaactccatggcaacgtctcaggtttcatgcagttctctaaatttattttgctcgattgtaagggaactgtgtcctctataagctcgcgctcgtgctgtaccgggagtaccccttcttcctgcaagtctggttcaattaaaaaattttgttctgtcgtgttgtaaagtacttggcgagctatgatatgtcattaccttagtgagaagactgcttctaatatattagtaatttttagctgtgcagatcatgtcatcatataaatgttgcaaacattataaaatagaggatccatttgaactctt

SEQ ID NO: 144634 - DNA, 1416 bp, Zea Mays
tccatgactgttctggaagctccaagcgttggcgaaaaaagtaagatatttctgcgaggcaaggaatccctcccccgcttctactctttcggttcgccggttcgccgtctcgcacacccacttcctacaccgccaccgagcactcgctcagtttcatacccatcctcgaagtcgcctctgtctagttcctgctcttccaccaccgcctgtgatgtatccccgaggcccggatgggggacgagatgcctcgtctcgccctatgcttgccactcccgccggcaacgacacgcgcgaggaggatgagatcaccaccgcggaggctcatgtggagaaagacgccgcgcggatggacgctgccctcctcatgcggactacgcccaagatggacgagtttcacaccgggggcgatctggactcaagtggaagtggaagcggcatctcggggccaagcgcctccaaaagacagctacaaagaaggggatcgtggcggcaacgagtcagcaggtccagcatccatgcttatccttttcctttgtgtttctatttgatctgtttttttgcccgcgccagcaacagagaagaatgtggtcgtggctgtaatgggtcagcagcacaaataggaaatgttgcatgtgttgccgacagaaccatctcactctctctttagtttctgcaattttttggacgaccgagaggtgctgccgtttatgagtaactttccagtgggaaaacagtatgccacaacatcatggtcagagtttggacattgcatgaagcacttgctggacaattgagaagaactcatgcctacttgcaggagggttgttgtacacgtgagtggaggtcgaacccttcttgtagggctcttaatgtatgaagtacgccatgctagctattgaatcaagttcaatgggattcgttaaaatataaggagggttgttgtacaagtgagacaaggtcagcccttcttgcagggctcttaatataagcctgtactacacgttcatccacgtcgagctcgtcggctcccaacgcaaccccttcttctctcacgagatcagtggtgaggacgacactggggatagagacctagggttctccaagtgggcctagaaactccatggcaacgtctcaggtttcatgcagttctctaaatttattttgctcgattgtaagggaactgtgtcctctataagctcgcgctcgtgctgtaccgggagtaccccttcttcctgcaagtctggttcaattaaaaaattttgttctgtcgtgttgtaaagtacttggcgagctatgatatgtcattaccttagtgagaagactgcttctaatatattagtaatttttagctgtgcagatcatgtcatcatataaatgttgcaaacattataaaatagaggatccatttgaactctt

SEQ ID NO: 144635 - DNA, 1421 bp, Zea Mays
tccatgactgttctggaagctccaagcgttggcgaaaaaagtaagatatttctgcgaggcaaggaatccctcccccgcttctactctttcggttcgccggttcgccgtctcgcacacccacttcctacaccgccaccgagcactcgctcagtttcatacccatcctcgaagtcgcctctgtctagttcctgctcttccaccaccgcctgtgatgtatccccgaggcccggatgggggacgagatgcctcgtctcgccctatgcttgccactcccgccggcaacgacacgcgcgaggaggatgagatcaccaccgcggaggctcatgtggagaaagacgccgcgcggatggacgctgccctcctcatgcggactacgcccaagatggacgagtttcacaccgggggcgatctggactcaagtggaagtggaagcggcatctcggggccaagcgcctccaaaagacagctacaaagaaggggatcgtggcggcaacgagtcagcaggtccagcatccatgcttatccttttcctttgtgtttctatttgatctgtttttttgcccgcgccagcaacagagaagaatgtggtcgtggctgtaatgggtcagcagcacaaataggaaatgttgcatgtgttgccgacagaaccatctcactctctctttagtttctgcaattttttggacgaccgagaggtgctgccgtttatgagtaactttccagtgggaaaacagtatgccacaacatcatggtcagagtttggacattgcatgaagcacttgctggacaattgagaagaactcatgcctacttgcaggagggttgttgtacacgtgagtggaggtcgaacccttcttgtagggctcttaatgtatgaagtacgccatgctagctattgaatcaagttcaatgggattcgttaaaatataaggagggttgttgtacaagtgagacaaggtcagcccttcttgcagggctcttaatataagctcagcctgtactacacgttcatccacgtcgagctcgtcggctcccaacgcaaccccttcttctctcacgagatcagtggtgaggacgacactggggatagagacctagggttctccaagtgggcctagaaactccatggcaacgtctcaggtttcatgcagttctctaaatttattttgctcgattgtaagggaactgtgtcctctataagctcgcgctcgtgctgtaccgggagtaccccttcttcctgcaagtctggttcaattaaaaaattttgttctgtcgtgttgtaaagtacttggcgagctatgatatgtcattaccttagtgagaagactgcttctaatatattagtaatttttagctgtgcagatcatgtcatcatataaatgttgcaaacattataaaatagaggatccatttgaactctt

SEQ ID NO: 144636 - DNA, 1453 bp, Zea Mays
tccatgactgttctggaagctccaagcgttggcgaaaaaagtaagatatttctgcgaggcaaggaatccctcccccgcttctactctttcggttcgccggttcgccgtctcgcacacccacttcctacaccgccaccgagcactcgctcagtttcatacccatcctcgaagtcgcctctgtctagttcctgctcttccaccaccgcctgtgatgtatccccgaggcccggatgggggacgagatgcctcgtctcgccctatgcttgccactcccgccggcaacgacacgcgcgaggaggatgagatcaccaccgcggaggctcatgtggagaaagacgccgcgcggatggacgctgccctcctcatgcggactacgcccaagatggacgagtttcacaccgggggcgatctggactcaagtggaagtggaagcggcatctcggggccaagcgcctccaaaagacagctacaaagaaggggatcgtggcggcaacgagtcagcaggtccagcatccatgcttatccttttcctttgtgtttctatttgatctgtttttttgcccgcgccagcaacagagaagaatgtggtcgtggctgtaatgggtcagcaggaaatgttgcatgtgttgccgacagaaccatctcactctctctttagtttctgcaattttttggacgaccgagaggtgctgccgtttatgagtaactttccagtgggaaaacagtatgccacaacatcatggtcagagtttggacattgcatgaagcacttgctggacaattgagaagaactcatgcctacttgcaggcatcatctcaaccatacaatgggattcattgaaatatcaggagggttgttgtacacgtgagtggaggtcgaacccttcttgtagggctcttaatgtatgaagtacgccatgctagctattgaatcaagttcaatgggattcgttaaaatataaggagggttgttgtacaagtgagacaaggtcagcccttcttgcagggctcttaatataagctcagcctgtactacacgttcatccacgtcgagctcgtcggctcccaacgcaaccccttcttctctcacgagatcagtggtgaggacgacactggggatagagacctagggttctccaagtgggcctagaaactccatggcaacgtctcaggtttcatgcagttctctaaatttattttgctcgattgtaagggaactgtgtcctctataagctcgcgctcgtgctgtaccgggagtaccccttcttcctgcaagtctggttcaattaaaaaattttgttctgtcgtgttgtaaagtacttggcgagctatgatatgtcattaccttagtgagaagactgcttctaatatattagtaatttttagctgtgcagatcatgtcatcatataaatgttgcaaacattataaaatagaggatccatttgaactctt

SEQ ID NO: 144637 - DNA, 1815 bp, Zea Mays
tccatgactgttctggaagctccaagcgttggcgaaaaaagtaagatatttctgcgaggcaaggaatccctcccccgcttctactctttcggttcgccggttcgccgtctcgcacacccacttcctacaccgccaccgagcactcgctcagtttcatacccatcctcgaagtcgcctctgtctagttcctgctcttccaccaccgcctgtgatgtatccccgaggcccggatgggggacgagatgcctcgtctcgccctatgcttgccactcccgccggcaacgacacgcgcgaggaggatgagatcaccaccgcggaggctcatgtggagaaagacgccgcgcggatggacgctgccctcctcatgcggactacgcccaagatggacgagtttcacaccgggggcgatctggactcaagtggaagtggaagcggcatctcggggccaagcgcctccaaaagacagctacaaagaaggggatcgtggcggcaacgagtcagcagcaacagagaagaatgtggtcgtggctgtaatgggtcagcaggtacaccatccacgctcatcatttcctttgtgtttctgtttgatctatttttttaaaatttctttatcagtttgattagcatccacttgcatccgctcatagtttgattcgtgttcgttggatgggcctcaaaattaccagttgcttcgactacactctctgaatttcgcagatcaagataaaacccgacacaaaggaatgaatagcacacaaaaaatcacagtattatttagtcatattggacacgaataagttaaatttcttaaattttagatccacatttttgtattttggtctagactatcaaaaaaatcctagaaatgtccctctgcctctcgcgcgtgaattctcctctgccgaagggaagacactcaaaggcgagctactgatcttcaactgcttttctggattctctttgcaatatgctttgttggggctagatctgaaatcaatgtttttaataatctagcacaaataggaaatgttgcatgtgttgccgacagaaccatctcactctctctttagtttctgcaattttttggacgaccgagaggtgctgccgtttatgagtaactttccagtgggaaaacagtatgccacaacatcatggtcagagtttggacattgcatgaagcacttgctggacaattgagaagaactcatgcctacttgagggttgttgtacacgtgagtggaggtcgaacccttcttgtagggctcttaatgtatgaagtacgccatgctagctattgaatcaagttcaatgggattcgttaaaatataaggagggttgttgtacaagtgagacaaggtcagcccttcttgcagggctcttaatataagcctgtactacacgttcatccacgtcgagctcgtcggctcccaacgcaaccccttcttctctcacgagatcagtggtgaggacgacactggggatagagacctagggttctccaagtgggcctagaaactccatggcaacgtctcaggtttcatgcagttctctaaatttattttgctcgattgtaagggaactgtgtcctctataagctcgcgctcgtgctgtaccgggagtaccccttcttcctgcaagtctggttcaattaaaaaattttgttctgtcgtgttgtaaagtacttggcgagctatgatatgtcattaccttagtgagaagactgcttctaatatattagtaatttttagctgtgcagatcatgtcatcatataaatgttgcaaacattataaaatagaggatccatttgaactctt

SEQ ID NO: 144638 - DNA, 1819 bp, Zea Mays
tccatgactgttctggaagctccaagcgttggcgaaaaaagtaagatatttctgcgaggcaaggaatccctcccccgcttctactctttcggttcgccggttcgccgtctcgcacacccacttcctacaccgccaccgagcactcgctcagtttcatacccatcctcgaagtcgcctctgtctagttcctgctcttccaccaccgcctgtgatgtatccccgaggcccggatgggggacgagatgcctcgtctcgccctatgcttgccactcccgccggcaacgacacgcgcgaggaggatgagatcaccaccgcggaggctcatgtggagaaagacgccgcgcggatggacgctgccctcctcatgcggactacgcccaagatggacgagtttcacaccgggggcgatctggactcaagtggaagtggaagcggcatctcggggccaagcgcctccaaaagacagctacaaagaaggggatcgtggcggcaacgagtcagcagcaacagagaagaatgtggtcgtggctgtaatgggtcagcaggtacaccatccacgctcatcatttcctttgtgtttctgtttgatctatttttttaaaatttctttatcagtttgattagcatccacttgcatccgctcatagtttgattcgtgttcgttggatgggcctcaaaattaccagttgcttcgactacactctctgaatttcgcagatcaagataaaacccgacacaaaggaatgaatagcacacaaaaaatcacagtattatttagtcatattggacacgaataagttaaatttcttaaattttagatccacatttttgtattttggtctagactatcaaaaaaatcctagaaatgtccctctgcctctcgcgcgtgaattctcctctgccgaagggaagacactcaaaggcgagctactgatcttcaactgcttttctggattctctttgcaatatgctttgttggggctagatctgaaatcaatgtttttaataatctagcacaaataggaaatgttgcatgtgttgccgacagaaccatctcactctctctttagtttctgcaattttttggacgaccgagaggtgctgccgtttatgagtaactttccagtgggaaaacagtatgccacaacatcatggtcagagtttggacattgcatgaagcacttgctggacaattgagaagaactcatgcctacttgcaggagggttgttgtacacgtgagtggaggtcgaacccttcttgtagggctcttaatgtatgaagtacgccatgctagctattgaatcaagttcaatgggattcgttaaaatataaggagggttgttgtacaagtgagacaaggtcagcccttcttgcagggctcttaatataagcctgtactacacgttcatccacgtcgagctcgtcggctcccaacgcaaccccttcttctctcacgagatcagtggtgaggacgacactggggatagagacctagggttctccaagtgggcctagaaactccatggcaacgtctcaggtttcatgcagttctctaaatttattttgctcgattgtaagggaactgtgtcctctataagctcgcgctcgtgctgtaccgggagtaccccttcttcctgcaagtctggttcaattaaaaaattttgttctgtcgtgttgtaaagtacttggcgagctatgatatgtcattaccttagtgagaagactgcttctaatatattagtaatttttagctgtgcagatcatgtcatcatataaatgttgcaaacattataaaatagaggatccatttgaactctt

SEQ ID NO: 144639 - DNA, 2106 bp, Zea Mays
attgttgacatgtattttttcgtatactaatacaattttggttggactttgaagcttcaagctatctgtgagacaggattccactaccgagacaagagcccccctatcaattatgttgtaaatatttcttctaacatgcagatttttccaccaaaagattggttgattgcgtcatctgtgccatcaaagttttcaccagatgctattcagaatgttttaaatgaactgactcctgagactgtaagaatattctgggaatcgaaaaagtttgaagggaaaacaaaattagcagagccatggtatggtacatcatattctgtcgaagttgtccctccatcaatcatacagaaatgggtagggaaagcccctgaggaagatctacacctgccaaagcgtaacatcttcattccaagtgatctttcactgagaagtgtagaggaaaaggtaagttttcctgccatgctgaggaagacacaattttcgagactctggtacaagcccgatacaatgtttttcacacccaaggcttatatcaagatggattttcactgtccactatctcaaagctcacctgagtcggcagttcttactgatgtattcacaaggttgcttatggattatttgaatgattatgcttatgacgcccaagttgctggcctctattatgttgttaagccaaatgacactggttttcaggtaactatggttggcttcaatgacaaaatgagaacccttttggagactgttattggaaaaattgcagaatttgaagttaaggctgaccgtttttctgtgataaaggaagctatgacaaaggagtatgagaatttcaagtttcggcagccataccaacaagtcctatattattgttcgctaatactggaggaccaaacatggccatgggatgaggaattttctgcactttctcaccttgaagctagtgatctgggaatttttttgccccatttgctatcaaaaaccttcatcgagtgttattttgcaggtaatattgaacccaatgaagcaaacaatatcgttcaacatgttgaagatgtcttattcaatgcaccaattagtgcttgcaagccactatccccatcgcagcatcttgccaagaggattgtaaagcttgagaagggtttgagatactattatccagcaatgtgctcaaatcaccaagatgaaaattctgctcttctgcactatattcagactcatcaggataatgttaagcaaaatgttctacttcaactacttgctcttgttggcaagcagccagcttttcatcaattgcgatcagttgagcaacttggctacatagcgcttcttaggcaaagaaatgattcaggtgtccgtgggttgcaatttataatccagtcaacggtgaaggatcctgctaatctggatgccagagttgaaaattttctcaacatgtttgaaagcaatgtctacaatatgtctgatgcagagttcaagagtaatgtaagtgctcttattgatatgaaactggagaaatacaaaaacatacgcgaagaatcagctttcttctatggagagatttctgaaggaaccctcaaatttgatagaaaagaagcagaggttgctgcactgagggagctcaagaaggaagagttggtaggcttcttcaatgatcatgtcaaggtcaatgcaccacaaaagaagattcttagtatacaagtgtacggtggtctccattctgccgagtacgaaaccatagtgcaaaatgctccgccaccgccgtcgtgtgagataactgatatttatggcttcaggaggtcgaggcctttatatggatcattcaggggaggcgttggtcagatgaagctatagttcaacattttctcatcattctgtaaaattctgaaaaagagtcatctttctgttcaactgcatctacgttgattgttttttcattgcgaacactctagtaggccatttatctacggttttttcactatattcattaagatattatgagatttcacattgccttgtaaagacaaatctctagccatgtttggttggtctgagatacaccatatattagactaaaaaggaaaaaaaaagaaatattcggttaatcaa

SEQ ID NO: 144640 - DNA, 2311 bp, Zea Mays
tctgttctatattcaggatgggctatgagtttggaagctggtgaaggggattggagtcatgatttttcattcttctgcgttgttattcagctcacagatgtaggccaggaacacatggaggatactctcggactattgttcagatatataaagttgctgcagaactctggaactcctaagtggatatttgatgagcttcaagctatctgtgagacaggattccactaccgagacaagagcccccctatcaattatgttgtaaatatttcttctaacatgcagatttttccaccaaaagattggttgattgcgtcatctgtgccatcaaagttttcaccagatgctattcagaatgttttaaatgaactgactcctgagactgtaagaatattctgggaatcgaaaaagtttgaagggaaaacaaaattagcagagccatggtatggtacatcatattctgtcgaagttgtccctccatcaatcatacagaaatgggtagggaaagcccctgaggaagatctacacctgccaaagcgtaacatcttcattccaagtgatctttcactgagaagtgtagaggaaaaggtaagttttcctgccatgctgaggaagacacaattttcgagactctggtacaagcccgatacaatgtttttcacacccaaggcttatatcaagatggattttcactgtccactatctcaaagctcacctgagtcggcagttcttactgatgtattcacaaggttgcttatggattatttgaatgattatgcttatgacgcccaagttgctggcctctattatgttgttaagccaaatgacactggttttcaggtaactatggttggcttcaatgacaaaatgagaacccttttggagactgttattggaaaaattgcagaatttgaagttaaggctgaccgtttttctgtgataaaggaagctatgacaaaggagtatgagaatttcaagtttcggcagccataccaacaagtcctatattattgttcgctaatactggaggaccaaacatggccatgggatgaggaattttctgcactttctcaccttgaagctagtgatctgggaatttttttgccccatttgctatcaaaaaccttcatcgagtgttattttgcaggtaatattgaacccaatgaagcaaacaatatcgttcaacatgttgaagatgtcttattcaatgcaccaattagtgcttgcaagccactatccccatcgcagcatcttgccaagaggattgtaaagcttgagaagggtttgagatactattatccagcaatgtgctcaaatcaccaagatgaaaattctgctcttctgcactatattcagactcatcaggataatgttaagcaaaatgttctacttcaactacttgctcttgttggcaagcagccagcttttcatcaattgcgatcagttgagcaacttggctacatagcgcttcttaggcaaagaaatgattcaggtgtccgtgggttgcaatttataatccagtcaacggtgaaggatcctgctaatctggatgccagagttgaaaattttctcaacatgtttgaaagcaatgtctacaatatgtctgatgcagagttcaagagtaatgtaagtgctcttattgatatgaaactggagaaatacaaaaacatacgcgaagaatcagctttcttctatggagagatttctgaaggaaccctcaaatttgatagaaaagaagcagaggtgtgtactcttgtttgtcttcgtgtattatttttgcgaactcaagataattctatgatggcaggttgctgcactgagggagctcaagaaggaagagttggtaggcttcttcaatgatcatgtcaaggtcaatgcaccacaaaagaagattcttagtatacaagtgtacggtggtctccattctgccgagtacgaaaccatagtgcaaaatgctccgccaccgccgtcgtgtgagataactgatatttatggcttcaggaggtcgaggcctttatatggatcattcaggggaggcgttggtcagatgaagctatagttcaacattttctcatcattctgtaaaattctgaaaaagagtcatctttctgttcaactgcatctacgttgattgttttttcattgcgaacactctagtaggccatttatctacggttttttcactatattcattaagatattatgagatttcacattgccttgtaaagacaaatctctagccatgtttggttggtctgagatacaccatatattagactaaaaaggaaaaaaaaagaaatattcggttaatcaa

SEQ ID NO: 144641 - DNA, 2079 bp, Zea Mays
tctgttctatattcaggatgggctatgagtttggaagctggtgaaggggattggagtcatgatttttcattcttctgcgttgttattcagctcacagatgtaggccaggaacacatggaggatactctcggactattgttcagatatataaagttgctgcagaactctggaactcctaagtggatatttgatgagcttcaagctatctgtgagacaggattccactaccgagacaagagcccccctatcaattatgttgtaaatatttcttctaacatgcagatttttccaccaaaagattggttgattgcgtcatctgtgccatcaaagttttcaccagatgctattcagaatgttttaaatgaactgactcctgagactgtaagaatattctgggaatcgaaaaagtttgaagggaaaacaaaattagcagagccatggtatggtacatcatattctgtcgaagttgtccctccatcaatcatacagaaatgggtagggaaagcccctgaggaagatctacacctgccaaagcgtaacatcttcattccaagtgatctttcactgagaagtgtagaggaaaaggtaagttttcctgccatgctgaggaagacacaattttcgagactctggtacaagcccgatacaatgtttttcacacccaaggcttatatcaagatggattttcactgtccactatctcaaagctcacctgagtcggcagttcttactgatgtattcacaaggttgcttatggattatttgaatgattatgcttatgacgcccaagttgctggcctctattatgttgttaagccaaatgacactggttttcaggtaactatggttggcttcaatgacaaaatgagaacccttttggagactgttattggaaaaattgcagaatttgaagttaaggctgaccgtttttctgtgataaaggaagctatgacaaaggagtatgagaatttcaagtttcggcagccataccaacaagtcctatattattgttcgctaatactggaggaccaaacatggccatgggatgaggaattttctgcactttctcaccttgaagctagtgatctgggaatttttttgccccatttgctatcaaaaaccttcatcgagtgttattttgcaggtaatattgaacccaatgaagcaaacaatatcgttcaacatgttgaagatgtcttattcaatgcaccaattagtgcttgcaagccactatccccatcgcagcatcttgccaagaggattgtaaagcttgagaagggtttgagatactattatccagcaatgtgctcaaatcaccaagatgaaaattctgctcttctgcactatattcagactcatcaggataatgttaagcaaaatgttctacttcaactacttgctcttgttggcaagcagccagcttttcatcaattgcgatcagttgagcaacttggctacatagcgcttcttaggcaaagaaatgattcaggtgtccgtgggttgcaatttataatccagtcaacggtgaaggatcctgctaatctggatgccagagttgaaaattttctcaacatgtttgaaagcaatgtctacaatatgtctgatgcagagttcaagagtaatgtaagtgctcttattgatatgaaactggagaaatacaaaaacatacgcgaagaatcagctttcttctatggagagatttctgaaggaaccctcaaatttgatagaaaagaagcagaggttgctgcactgagggagctcaagaaggaagagttggtaggcttcttcaatgatcatgtcaaggtcaatgcaccacaaaagaagattcttagtatacaagtgtacggtggtctccattctgccgagtacgaaaccatagtgcaaaatgctccgccaccgccgtcgtgtgagataactgatatttatggcttcaggaggtcgaggcctttatatggatcattcaggggaggcgttggtcagatgaagctatagttcaacattttctcatcattctgtaaaattctgaaaaagagtcatctttctgttcaactgcatctacactaaaaaggaaaaaaaaag

SEQ ID NO: 144642 - DNA, 297 bp, Zea Mays
atggattcgaggccccgcgagactgacgcccccggcgacccggccaacggcgccgcccctccgctggccgcggcggtgacggccgcgaccggggacgtcgagatcatcaggccccgcaacgacaagcgtgggtaccgccgcgtcgtgctccctaactcgctcgagtgcctgctcatcagcgaccccgacaccgataaggcggcggcgtcaatgaatgtttcggtggggtacttctgcgaccccgatgggctggaagggctcgcacacttcctcgatattacttctctattcctctga

SEQ ID NO: 144643 - DNA, 1073 bp, Zea Mays
gaaggctggacgcaggggggcatttccgggaacctcgccgcgggcggggctggaaagccgcggagcttttgatttaaccggccggttggtcagccagccagccagccagccactcagtactgcacactgccatcgctctcctacggtactgctgcctaccgcgcgtctcgtcccttcgctgccgctctatctatctcggccggagccatgggcggcggtggcgcggcgctgctgctgctggtgatgtgggcgggcgtggcgtcggcggccgtgtacgaggtgggcggcacgattgggtggaccgtcatgggcaaccccgactacgccgcctgggccagctccaagcagatcgtcatcggcgacactgttgtgttcacgtataacaagcagttccacaacgtgctggcggtgagcaaggcggactacaagaactgcatcgccaccaagccgacggccacctggtccacggggaacgattccgtcgtcctcaacaccacgggccaccactacttcctctgcggctacccgggccactgcgctgccggccagaaggtggacatccgcgtcgcctcctctgctgccccttccgccgcaccgtcgccgaccccctccggctccaagccctccggcggcgccacggccgcgccgtcgccgcaccctaacgccgcgccgaaggccctctccgccagctccgtagccgcggctgtcgccacgtccctgctctccctggccgcggccgtgctggcatgatcacttgatcaggatcgtgtagtgctggccaggggacggcgcctttgtgaattgtgagagctcgtactgtgtctgtgtgactgtctctgtggccgtatgagcatttagccctggatctgtgtttgttactctgtcttgctgactttgcttcgggaacatcgattatctcatctgccttctccatgcggtggtgactggcgactgcaagcagcgccatcggtaaagccttgcaggcgcactacgtgaagcctcgctgctgcatagtgatgaaaacagaaacggtaattttcggatgccggaaattgattttcgaagttttactg

SEQ ID NO: 144644 - DNA, 723 bp, Zea Mays
atgatgaccccggtcagaacttcttctgcctcgcgttttggggtcgtggggttcttgcttctgcggctctgcctggcttctgcctcgcttcgcttgttcgcctacttggatcgggtgccctgcccatgcgctctgcattttctcgtcacatcgattccgctcgaaacgaagctggtggtggacggtggtggcggcggcggtacaggccgtggagcgagatcgtcggtgataggactcggtccaaaatgcaatgttgacgtaaaaattggacctaaaactacacgagtcagttttaattgttgcgccaactgctgctgcgtcgtgtacctccacgcggagcagtcggaggcgaagaacggcgcggaccacggaggagagcacttagccatgaacggcggcgcgtcgctagacggcacggaccacggaagcgagcactcagcgacgagcggtggctcagtacacggcggctggcggagacgcggcgctagatgccggcggagacgcgtaaaagtagacggcggctctcagacgagacgagtgaaccccaagccgcgactcgacgagctatggaaagtgtgggctgtagttgggccggaccagcaggcccgaatcgcgttaaaactgctggcggatgcgccgacgcgtccgattgtgagctcacggcacatatggcgtgactgttttgtaactgcatttgcacgtgaaattacacaacctacctag

SEQ ID NO: 144645 - DNA, 348 bp, Zea Mays
gtgaggcatgcttatgtatccttttctattgtctatttctttatctattaaatattccctatgtttttgtttttttaaatgtatgacacctgaacaggttaaacagttaacaaaggaaataattacctgtcttaaacatcatattttaaaacaaagggagcatcttacttttatgattaaggctaaccggctaaacacaaatgaaccttgatttttattggacttgttcgtaataaatataatataatgatggtcaaagaagtaacatttgtcattggaactttttatttccttaatgtaatggtagatatttgagcaacttcatcaggagaaatcaagcactccagc

SEQ ID NO: 144646 - DNA, 1838 bp, Zea Mays
ctcctttttagcttttagcttgcgccttgcgttcgcggaaaaggctcatcttttcaggtggaaggagcgattcgtctgtgcctgcgcctcgccgggctcgtgccgctgtaccctccttctccaggagacctgtacggtgaaggggcgttcccgcgccaaacgggaagcaaagctcgctcgcgccctttttttcggatcatataacgccggcgcctagctcaaacaccacagctcgctgcctagatctacgcggcagcggcggcggcagaggagagggacccggagctgcgccatgggtcctaccgccggctccggcgaggacaaggctatgtcagagctccggaaaaaacatcgtgtggacctagagagactaacaattacatcgcgaccattcaagacattgtcattctttgtgttagccattgctcagaatttggaaagaacatgttcatctgttctgaaaaaaggttaccagttaaaaaccgcaatgcttttggttgttgctacttggcttctgctcatgttcactgatggcctgaatgaaaagcatctgcaggagctattttggtatgtcaggtttggattgtggtggattatactaggggttgcttcatccattggattaggttctggtttgcacactttcataatgtatttggctccccatgttgccctgttcactatcaaagcggttcagtgtggtagggttgatttgaaaagtgctccttatgacactattctccttgaaaggagaccatcctggttagagaaagactgtctgcaatttggacccccaatttatcatgaaacaattccattcagcaaaatactgcaagaagtttatcttgaagctattctttggggcattggaactgcacttggagagcttcctccatattttctctcaagaacagctagcatgtcaggccgcataattgatgaattagaagatttggatgcttccatttcagaaggctttctatcatcagctttacgtcaggccaaacgatggctcatgtctcattcacagtatttaagcttcactctaatattgctacttgcttcggtgccaaaccctctatttgatcttgccggtatcttgtgtggacaatttaacatccctttctggaagttttttctagcaactttgattggaaaggctattgttaaagtttgtatccagactacattggtgattactctctgcaataaccaacttcttgatttggtggagaaaaggcttatatgggcatttagcaatgttcctggagtggcatctgtccttccatcttttgtttccaaactgaagatggacaaaaataagtttttatcagcccatgttgctgcatcagcttctacttctgttaagggaaagaagtggaatctgtcattctctttggtctggaataccctggtgtggctcatggttgcaaacttcattatccagatagttacttctacagcacagggttatctcaggacacaacaggagcgagagatcagtaaaaagttggaaaccgagctttctgcctcttaacgttcttctgcgcaccaaaatgattcgccctgggaaagtccaatacattgtacataaccatgcatcaaccatcagctcaagactaaaggctctcctgcagtattgtggtgcactgactattggtctatttctttcgaaagagagagagaggaaagctattagctagtgctagaaatataatggtgccccacttacaattgtaagtttgtggccttgtacatagcaacaaatattattaggggacaaaaatatctaatgatacaagttaatacctgattttgtctccgcattggcaatgatc

SEQ ID NO: 144647 - DNA, 1950 bp, Zea Mays
cttgcgccttgcgttcgcggaaaaggctcatcttttcaggtggaaggagcgattcgtctgtgcctgcgcctcgccgggctcgtgccgctgtaccctccttctccaggagacctgtacggtgaaggggcgttcccgcgccaaacgggaagcaaagctcgctcgcgccctttttttcggatcatataacgccggcgcctagctcaaacaccacagctcgctgcctagatctacgcggcagcggcggcggcagaggagagggacccggagctgcgccatgggtcctaccgccggctccggcgaggacaaggctatgtcagagctccggaaaaaacatcgtgtggacctagagagactaacaattacatcgcgaccattcaagacattgtcattctttgtgttagccattgctcagaatttggaaagaacatgttcatctgttctgaaaaaaggttaccagttaaaaaccgcaatgcttttggttgttgctacttggcttctgctcatgttcactgatggcctgaatgaaaagcatctgcaggagctattttggtatgtcaggtttggattgtggtggattatactaggggttgcttcatccattggattaggttctggtttgcacactttcataatgtatttggctccccatgttgccctgttcactatcaaagcggttcagtgtggtagggttgatttgaaaagtgctccttatgacactattctccttgaaaggagaccatcctggttagagaaagactgtctgcaatttggacccccaatttatcatgaaacaattccattcagcaaaatactgcaagaagtttatcttgaagctattctttggggcattggaactgcacttggagagcttcctccatattttctctcaagaacagctagcatgtcaggccgcataattgatgaattagaagatttggatgcttccatttcagaaggctttctatcatcagctttacgtcaggccaaacgatggctcatgtctcattcacagtatttaagcttcactctaatattgctacttgcttcggtgccaaaccctctatttgatcttgccggtatcttgtgtggacaatttaacatccctttctggaagttttttctagcaactttgattggaaaggctattgttaaagtttgtatccagactacattggtgattactctctgcaataaccaacttcttgatttggtggagaaaaggcttatatgggcatttagcaatgttcctggagtggcatctgtccttccatcttttgtttccaaactgaagatggacaaaaataagtttttatcagcccatgttgctgcatcagcttctacttctgttaagggaaagaagtggaatctgtcattctctttggtctggaataccctggtgtggctcatggttgcaaacttcattatccagatagttacttctacagcacagggttatctcaggacacaacaggagcgagagatcagtaaaaagttggaaaccgagctttctgcctcttaacgttcttctgcgcaccaaaatgattcgccctgggtaccgatctggtttcttcaatcttttacatacttatatcgagtttagagaggaatattaacatgaataatgtggtaactgactgggaaattcaaaccgtgttcaccaactatttgccgctactgttcttcaggaaagtccaatacattgtacataaccatgcatcaaccatcagctcaagactaaaggctctcctgcagtattgtggtgcactgactattggtctatttctttcgaaagagagagagaggaaagctattagctagtgctagaaatataatggtgccccacttacaattgtaagtttgtggccttgtacatagcaacaaatattattaggggacaaaaatatctaatgatacaagttaatacctgattttgtctccgcattggcaatg

SEQ ID NO: 144648 - DNA, 250 bp, Zea Mays
cgattatattgcaaacacgcctcgcgatcggaagatagcataccacgtgaaaatgaaagaagaagaagaagaagaagaagcaggacgtgttgttatggacatgtcgatggttacgaaaagacaaggtgggaagacgaggtcgcaggtcaatcttacgcgataaaaaaatgaattttagaaggagaggatgccatcgttgatgccccgacgtagatatcaacaaggagaaagagaatgacttgtatggcaa

SEQ ID NO: 144649 - DNA, 2372 bp, Zea Mays
cgccaccgccgcagagccgctacgcagggagagggagggaatccctcgggggcgctttcacctaaggaagcgaaagagcgacgaggcaagcttggacgcacgcggatcctcaaatccgcaacccgacgatccagacccccgagcgttcggcctaatgccgtagagagcgagagcggcggcagaagcagaagcagtggaggagacggggagtgtgcatgctggggtgatgaagctgcaaatcttccggagcgggggcgaagcataggcagccagaggagagggtacgcgagagtgtgattgcaccgggagatcactggtgcgtcgcttggactggcggagcagagccgggcggaagcagagagagtgacgactacaaaatatatcagcaccatggccggattaggatcagctaaactaatcccacaaaaactggccacgcaaccttgaatgttcgatcatgcgagctgagagagcggaggagtccgctcggaggggaggaaagggcggaggaagaggagacggagcgaggaaaccggattctggccacggacacttaccgataatatagtagagattagatttttagatctaacggacttgcacgcttgacgctttataaatctgcccacgacgcgatccaagtcgagtcgagtcgagtcctcttctatttaggggaacggtcaaatacgcgtacacggccggtatccgcagcgccggcacggcgcacctcctctcggagaatcgaagccgaactgggcggcgggcgtaatggatctgctgaagcgggagctggagaagaagcggaaggcggcgacggccgacttcgggggcaagagcttcgtgcggcgctcggagctggagcagaagcagctccagaagcgccgcgacgagcaccgccagctcctcgccaagtccggcggcacgtcggcgccctccgcgaattccgccgcagctgctaccggttccgaccccagcagcttcgacgccgcagctcagacggcggcggcgaaccctaaccctagctcctccgccgccgccacctcctcggcgccctccgtcccgcccgccctcgcgccgaagaagaccgcgcaggaggaggcgctgctctccgaggagcgtcgcatcgacgagctcgacctcccacggcacgaggtggtgcggcgcctccgcgtgctgcgcgagcccgtcacgctgttcggggaggacgacgacgcccgcctcgcgcgcttcaagctcgtgctcaagtccggcgtcatcgacgacattgacgacatcgacatgaccgagggacagaccaacgacttcctccgcgacatgatcgagatgcgcaagcggcagaagtccgggagggacacctacgccaagggcaagagcaagcgtgtaggtgggggtgatggtggcgacgggggtgccgctggagacagtgcagatgatggggatgccaaggggagcggcgatgatgctgacgcagacaaggactccaagaggatgaggaccaagtttgaggagctttgcaatgaagacaagattttggtgttcttcaagaagctgcttaatgagtggaaccaggaattggatgagatgactgagctagagaagcggacagcaaaggggaagtccatggttgcaacattcaagcagtgtgcacggtatctcagcccgctgtttgagttctgcagaaagaaggttcttcctgatgacatccgtcgagcattgcttgttattgtcgagtgttgcatgaagcgagattatttagcagcaatggaccaatatatcaagctggcaatcgggaatgcaccatggcccattggagttacaatggttggcatccacgagcgttctgcccgagaaaagatctacacaaacagcgtcgcccacatcatgaatgacgagaccactcgcaagtatcttcagtcaatcaagaggctcatgacgctttcccagcggcgttaccctgcactgccctcaaaatcagtggagttcaacagcctggcaaatgggagtgacctgcaggcgcttctatcggaagagaatggttcgggtaaagcttccgaggaaaggctccggttgatgccagcattgaaagagtgatgccttcgcagactagattggattacaagtagagcttgagatgcttgtgtaatatatacaatcaatcctgcctgtttttttttcttttcctgtttgtgctgaagagaaaagcaacagagttatgtatgctaattaaatcgctttaccgctacatctggtcaggcaaagtttttattaatatatctgccaattccggagaaccattttttactatttatcatcaagcagcagtcatgcttactgtattaatcaggtttggtgctatcctagttgtgtcagta

SEQ ID NO: 144650 - DNA, 606 bp, Zea Mays
gtacttcctgatgatatccgtcgagcgttgcttgttattgtcgagtgttgcatgaagcgagattatttagcagcaatggaccaatatatcaagttggcaatcgggaatgcaccatggcccattggagtgactatggttggcatccacgagcgttctgcccgagagaagatctacacaaacagcgtcgcccacatcatgaatgacgagaccactcgcaagtaccttcagtcaatcaagaggctcatgacgctttgccagcggcgttaccctgcactgccctcaaaatcagtggagttcaacagccttgcaaatgggagtgacctgcaggcgcttctatcggaagagaatggttcgggtaaagcttccgaggaaaggctccggttgatgccagcatcgaaagagtgatgccttcgcagactagattggattacaagtagagcttgagatgcttgtgtaatatatacaatacaatcaattctgtctgtttttttttcttttctgtttgtgctgaagagaaaagcaacagaattgtgtatgctaattaaatcgctttaccgctacatgtggtcgggcaaagtttttattaatatatcagtcaattctgga

SEQ ID NO: 144651 - DNA, 844 bp, Zea Mays
cgccgcagctgctaccggttccgaccccagcaacctcgacgccgcagctcagacggcggcggcgaaccctaaccctagctcctccgccgccgcctcctcctcggcgccctccgtcccgcccgccctcgcgccgaagaagaccgcgcaggaggaggcgctgctctccgaggagcgtcgcatcgacgagctcgacctcccacggcacgaggtggtgcggcgcctccgcgtgctgcgcgagcccgtcacgctgttcggggaggacgacgacgcccgcctcgcgcgcttcaagctcgtgctcaagtccggcgtcatcgacgacattgacgacatcgacatgaccgagggacagaccaacgacttcctccgcgacatgatcgagatgcgtaagcggcagaaggccgggagggacacctacgccaagggcaagagcaagcgtgtaggtgggggtgatggtggcgacgggggtgctgctggagacagtgcagatgatggggatgccaaggggagcggcgatgatgctgacgcagacaaggactccaagaggatgaggaccaagtttgaggagctttgcaatgaagacaagattttggtgttctttaagaagctgcttaatgagtggaaccaggaattggatgagatgactgagctagagaagcggacagcaaaggggaagtccatggttgcaacattcaagcagtgtgcacggtatctcagcccgctgtttgagttctgcagaaagaaggtattgattcttatgcaatttccatctgttggttgcttaaattgtgctattaatttgattgcacttcaaattgacacaattattcaaaactctaatcagtaa

SEQ ID NO: 144652 - DNA, 2988 bp, Zea Mays
ttttttttttgtagtcgatctatccaacaagcccggccggaggtttaaacttatcaaatcacgtgaaaagatagctcgccgacgctgacgcagtccggaaacgcgtcgcccagacgcccacacatccatccacaacggtaaagccgccgcggcgatgtcttccgcacccccgcctccgccgtctctgaaccccgaagtgcccccgcgcatcgtccgcgcccccccgcgccggcctcctccgcgcgcgcccggtccgccgccttgggcggagcgtcggcctgccgtgtccgtcgacctcgaccgcggccgtcgctcggtccgcaccgaggtggacggcgtccgcgccgcgtcgctccctgcgcgacaccgcctccgcgtggagggcaaccggtggcagcgggactggaaggtgtccgaggtcgtcgcgcgcttgctcgcgctgcctcatgccgacgcggacgccgtcgacgccgtgctcaactgctgggccggtcgcttcgcacgccgcaacttcccgctgctcatcagagaaattgcaatttctggatccttgaaacatgctgtgcatgtgttccgctggatgaaaaatcaggagaactactgtgctcgcaatgacatttatggcatgatgattaggttacatgctagacacaacaaggttgatcaagcacgtggcctgttctttgagatgcaagaatggcggtgcaagcctaatactgatacatacaactctttgatccatgctcatgctcgagctggccagtggtgttgggccatcaacattatggatgatatgcaacgtgccgctatacctcctagccgaactacgtataataatgttataaatgcatgtggagctgctggtaactggaagaaagctttagaactttgtaagaagatgactgaaaatggtgtagggccagatttgatcacacacaacattgttttgtctgcttttaagaatggagctcagtactcaaaagccatagcttactttgaaattatgaaatcctctaaagttgcccctgatacatgcactatgaatattgtgatccattgccttgtaaagattgggctgtatggggaagctattgagttgtttaactcaatgagggaaagaagaacaacatgtcatccagatgtcgttacatatactagcataatgtattcttattctgtttgtgggcaagctgaaaattgcaaggcggtctttgatataatggttgctgaaggtgtcagacctaatattgtatcctacaatgcacttttgggtgcttacgcctcacatggtatgcacacagaggccttggagacttttaaattactgaagcaaaatgggttgagacctgatatagtttcctatacctccttacttaatgcttatggtagatctgcacagcctgagaaagctagggaggtctttaatgaaatgaggaagaatgcatgcaagccaaataaagtcagttacaatgcacttattgatgcttatggatctgctggaatgttgaaggaagcgattagtctgttgcatgaaatggagcaagatggcattcaaccggatgttatttcaataagtactctgttaacagcatgtggccgctgcaagcagctaactaaaattgacataattcttgcagcagctaagtctcgagggatccaactaaatacagttgcttacaactcaggcatcggaagttatttaagtttgggagattataagaaagctttggtgttatacacgtcaatgagggcaggcaatgtgaagccagatgctgtgacttacaatatactcattagtggatcttgtaaattgggaaggtatgtagagtctctgaaattttttgaagacatgctggacctgaatattcatttgaccaaggaagtctactcatccgtgatttgctcatatgtcaaacagggcaaattaactgaagcagcatctacttttaattctatgaaagaaactggttgcttccccgatgttttgacatatacgacattaattaaagcatatagtgatgatgggagctggaggagagcatgggacctattcaaagagatggaaaataatggcacacagccagatgctattgtctgttcatccctcatggaagcattgaataagggaggtcaacctgaaagggtccttcagttgatagaattcatgaagcaaaaaaagattcaattgaaccaaaaggcttattttgagataatatcttcatgcaccatgttacgagactggaaaacagcaagtcaaataattgaacatttggattcctctctctcatctatttcttttggcacactcaaccatattttaaattttcttggaaaatgtggcaggacagagagcatgatgaagctgttctataagatggtgacttcatgctctactgtgggcctttctacttatacgattctgctgagaaatctcttaattgtggggaaatggagaaagtatgttgaggttttgcagtggatggaagatgctggagtctgcccaacactctatatgtatcaaagcgtgcttccatatatctggagagacaacagtatggactatgttactctcatgcaagaaaaaataaatgcattgagagagaaggtaacatgagcttcagatatgcatttgctcgcttggtatgaactatgaagtactagaagtccataaccgaatactgaaggtagctttagaatgacactagcaggattcaggtaggacataattgtgagtctgcctgccctagtcgggattgaagcaacgaatccctcttcagaaaaaaaaatggatatggcacttcaagaacttaagaaacgacatgattctatagttgataaaaggtaagtcacatgtgaaaagaatgacctcatgagtcatttgctatggcttctaatgatcacagaaattgggccatttgttgctcgtatagcttggcttagaaaaaaccatgttactctcgtagttcgaactcatcttttttctacgac

SEQ ID NO: 144653 - DNA, 3052 bp, Zea Mays
atgtcttccgcacccccgcctccgccgtctctgaaccccgaagtgcccccgcgcatcgtccgcgcccccccgcgccggcctcctccgcgcgcgcccggtccgccgccttgggcggagcgtcggcctgccgtgtccgtcgacctcgaccgcggccgtcgctcggtccgcaccgaggtggacggcgtccgcgccgcgtcgctccctgcgcgacaccgcctccgcgtggagggcaaccggtggcagcgggactggaaggtgtccgaggtcgtcgcgcgcttgctcgcgctgcctcatgccgacgcggacgccgtcgacgccgtgctcaactgctgggccggtcgcttcgcacgccgcaacttcccgctgctcatcagagtaagccccattctctcccttttggtgttgatgctactattggccagtagtgtggcattcaaatggtcaaatggctcgagaggagcagtacgcggtgaacttatagtgcagcatctatttcacctagttacgttgagttctagttggtatcgatgctaacaagttcattctcagctgctgcacttgcaagtcatggttcttattttgtaacaaaccaaacatctctataatttcactgattacatgttagcctgttccagtgataatgcactcacacagtttgtgtcacctgtaggaaattgcaatttctggatccttgaaacatgctgtgcatgtgttccgctggatgaaaaatcaggagaactactgtgctcgcaatgacatttatggcatgatgattaggttacatgctagacacaacaaggttgatcaagcacgtggcctgttctttgagatgcaagaatggcggtgcaagcctaatactgatacatacaactctttgatccatgctcatgctcgagctggccagtggtgttgggccatcaacattatggatgatatgcaacgtgccgctatacctcctagccgaactacgtataataatgttataaatgcatgtggagctgctggtaactggaagaaagctttagaactttgtaagaagatgactgaaaatggtgtagggccagatttgatcacacacaacattgttttgtctgcttttaagaatggagctcagtactcaaaagccatagcttactttgaaattatgaaatcctctaaagttgcccctgatacatgcactatgaatattgtgatccattgccttgtaaagattgggctgtatggggaagctattgagttgtttaactcaatgagggaaagaagaacaacatgtcatccagatgtcgttacatatactagcataatgtattcttattctgtttgtgggcaagctgaaaattgcaaggcggtctttgatataatggttgctgaaggtgtcagacctaatattgtatcctacaatgcacttttgggtgcttacgcctcacatggtatgcacacagaggccttggagacttttaaattactgaagcaaaatgggttgagacctgatatagtttcctatacctccttacttaatgcttatggtagatctgcacagcctgagaaagctagggaggtctttaatgaaatgaggaagaatgcatgcaagccaaataaagtcagttacaatgcacttattgatgcttatggatctgctggaatgttgaaggaagcgattagtctgttgcatgaaatggagcaagatggcattcaaccggatgttatttcaataagtactctgttaacagcatgtggccgctgcaagcagctaactaaaattgacataattcttgcagcagctaagtctcgagggatccaactaaatacagttgcttacaactcaggcatcggaagttatttaagtttgggagattataagaaagctttggtgttatacacgtcaatgagggcaggcaatgtgaagccagatgctgtgacttacaatatactcattagtggatcttgtaaattgggaaggtatgtagagtctctgaaattttttgaagacatgctggacctgaatattcatttgaccaaggaagtctactcatccgtgatttgctcatatgtcaaacagggcaaattaactgaagcagcatctacttttaattctatgaaagaaactggttgcttccccgatgttttgacatatacgacattaattaaagcatatagtgatgatgggagctggaggagagcatgggacctattcaaagagatggaaaataatggcacacagccagatgctattgtctgttcatccctcatggaagcattgaataagggaggtcaacctgaaagggtccttcagttgatagaattcatgaagcaaaaaaagattcaattgaaccaaaaggcttattttgagataatatcttcatgcaccatgttacgagactggaaaacagcaagtcaaataattgaacatttggattcctctctctcatctatttcttttggcacactcaaccatattttaaattttcttggaaaatgtggcaggacagagagcatgatgaagctgttctataagatggtgacttcatgctctactgtgggcctttctacttatacgattctgctgagaaatctcttaattgtggggaaatggagaaagtatgttgaggttttgcagtggatggaagatgctggagtctgcccaacactctatatgtatcaaagcgtgcttccatatatctggagagacaacagtatggactatgttactctcatgcaagaaaaaataaatgcattgagagagaaggtaacatgagcttcagatatgcatttgctcgcttggtatgaactatgaagtactagaagtccataaccgaatactgaaggtagctttagaatgacactagcaggattcaggtaggacataattgtgagtctgcctgccctagtcgggattgaagcaacgaatccctcttcagaaaaaaaaatggatatggtaagagttttctaatataaagttcacaaatattccctctgtttcttgctataagctgttgccttaccaatgtgcttcttaggcacttcaagaacttaagaaacgacatgattctat

SEQ ID NO: 144654 - DNA, 191 bp, Zea Mays
gcggcccgaaattataaaagcccgaaattcaatttttggcctgaaattcacatcagggcccgaaattcaatttttgacctgaaattcagtttttggccctaaattcacatcagggcccggaattcacatcagagccctaaattcaaaacaaatttaataaaacaaataaaagataagacaaataaatttta

SEQ ID NO: 144655 - DNA, 790 bp, Zea Mays
actatagtgaaaaaaaatccgaacaaagaatccatggtggtggaatttcggatcaatataagtggcggagttgggattggttcttggtgcaaaagcaagagcaaaagatcatctctatccgtatcctagctttggtggtccgcagaacaggtggttaagaatagggagaaacaagggttaggtggcagaggaggcagtgaaatccggccaaatctcgacgcaatttttcttgccgattgctggtgcgtagtaagatcgtagctgaatccgtaggacgggcgctaatcggaggaacttgcatcgattcttgcgtgctgacggtaccggcaaggcggcaagataagagggacagggacggtgtttgtggaattgcctccttggaggaggctggtgagagggagaaaggatgacgatgccatggggtctcgcggcctgcatcgtggacatggtgtgggcggtgctcgccggctgggtgtccacctgcctggtcatcgccaacgaggtcgcccgcggcatgcgcagtggcgagatcggtccgttcgttgtcggctgagttattcgatcggctttaggtggctcagttgttcctgcattctcgatagtgtatttttcgtaccggtacatttcatacacatcgctatgctgtacagacggcgttgaggactggaggatgacttttgtttctaggattttgagttgtagtgagtgtttgtgcaatcacacaagaacaaacatgtgaatatgtgatgtactttcagtggtatataaacgggatggtcctataaaataa

SEQ ID NO: 144656 - DNA, 810 bp, Zea Mays
actatagtgaaaaaaaatccgaacaaagaatccatggtggtggaatttcggatcaatataagtggcggagttgggattggttcttggtgcaaaagcaagagcaaaagatcatctctatccgtatcctagctttggtggtccgcagaacaggtggttaagaatagggagaaacaagggttaggtggcagaggaggcagtgaaatccggccaaatctcgacgcaatttttcttgccgattgctggtgcgtagtaagatcgtagctgaatccgtaggacgggcgctaatcggaggaacttgcatcgattcttgcgtgctgacggtaccggcaaggcggcaagataagagttggtgcctgccgattgcagggacagggacggtgtttgtggaattgcctccttggaggaggctggtgagagggagaaaggatgacgatgccatggggtctcgcggcctgcatcgtggacatggtgtgggcggtgctcgccggctgggtgtccacctgcctggtcatcgccaacgaggtcgcccgcggcatgcgcagtggcgagatcggtccgttcgttgtcggctgagttattcgatcggctttaggtggctcagttgttcctgcattctcgatagtgtatttttcgtaccggtacatttcatacacatcgctatgctgtacagacggcgttgaggactggaggatgacttttgtttctaggattttgagttgtagtgagtgtttgtgcaatcacacaagaacaaacatgtgaatatgtgatgtactttcagtggtatataaacgggatggtcctataaaataa

SEQ ID NO: 144657 - DNA, 906 bp, Zea Mays
attacctcatatctatttaactatagtgaaaaaaaatccgaacaaagaatccatggtggtggaatttcggatcaatataagtggcggagttgggattggttcttggtgcaaaagcaagagcaaaagatcatctctatccgtatcctagctttggtggtccgcagaacaggtggttaagaatagggagaaacaagggttaggtggcagaggaggcagtgaaatccggccaaatctcgacgcaatttttcttgccgattgctggtgcgtagtaagatcgtagctgaatccgtaggacgggcgctaatcggaggaacttgcatcgattcttgcgtgctgacggtaccggcaaggcggcaagataagaggtgagttctcctgcaatagctactcaaatggtctgaactcaatcgatctcctccccggatcaaccgtggttgtttagttggtgcctgccgattgcagggacagggacggtgtttgtggaattgcctccttggaggaggctggtgagagggagaaaggatgacgatgccatggggtctcgcggcctgcatcgtggacatggtgtgggcggtgctcgccggctgggtgtccacctgcctggtcatcgccaacgaggtcgcccgcggcatgcgcagtggcgagatcggtccgttcgttgtcggctgagttattcgatcggctttaggtggctcagttgttcctgcattctcgatagtgtatttttcgtaccggtacatttcatacacatcgctatgctgtacagacggcgttgaggactggaggatgacttttgtttctaggattttgagttgtagtgagtgtttgtgcaatcacacaagaacaaacatgtgaatatgtgatgtactttcagtggtatataaacgggatggtcctataaaataa

SEQ ID NO: 144658 - DNA, 102 bp, Zea Mays
ttcttttgttttcagcctgctctgtgcgttcatcgggctttgcttcttagttgtcccagtgtctgtgtgctttagcatgatggtgtctgtgtgtcctaaaaa

SEQ ID NO: 144659 - DNA, 1389 bp, Zea Mays
atggccccgaggaggaggaagcaggatgatccaccaccagaatacggagccgatgagatgaagttttctgttgaggttcaccatggtggggttttctatggcagtggtcagaatcgtgcctacattgatggtaaggtagattggtgggatcatgtggatgcttggtcatggtcctatttctgggttgaagaaatagttatgaaacttggctatgggttaaatccatccaacttgacagtgtactggctcttaactgggaaagatttgtcagatggtttgaggtatttgtccactgatgatgacacaagagtgatgagcagagtggctgataaggtgaagaattttgtcatctactttaaccatgcacctacaggaaaggacaatgaagatgatccaattttcatggacgatgaagatgatccatttgtcatggacaatgacactgttaaggataagtcaaagaaggcaattgggagcaggatgggaaaggggaatgcaatagtagtttctcaaccacagagtactgatgaggaaagcgatgatgaattggaactaccagaagatgaagatggagcaaatggagtgagacttaaatttaaatcatttgtgcctgatgaccttaacaatccaacatttaggcttggtatgaccttcccttcagttgagatgggtcttaaaaagttaggaatcgatcctacacaaatatctgcaacacatgttgaagaacaaccagttgaaaatgatggagaagaaccagtcatcacccaagaaatggggagaccacaacctgctgctgtagatcctagtgagaccatgttatcacagatgctccatgaggcttcaagtggccctacagacattcagcatggtccactaccagattcagtttttattggagacaatcagcctgttgctcgacctgttgcacccaccaccgcatccaaggcgggaaaggcagcactcaagaagaggaagagtgcaggcaatacggcaggagcaaccaagacaactaagaaatccaagacaaaaccaaagtctggagggaagaaaaccaatcagtcgtcctccgacgaggacatcgacgaggagaaggatgaggacgacgaggtgaccgacagagacctccgatgttgcttggattcagcctactcgtgcaggaagcctttctcctcaagatgtatcaggttacccaatgctggcaatggacatggagaattatggggagggtgcagaatggatatttcagaaatgaatttgggtgtgggtaagcccgggtatgttcatagcctccccaacaacaggtctagttcaggtcatggtccagattcaaaacaaatcagctcaattgcatcgaattcagcattcagaaataacatgatcaatgagtga

SEQ ID NO: 144660 - DNA, 590 bp, Zea Mays
atggctcttttaagtggttttgcaggagtatatactgaagttatcatcaagaaaaatccttcaagaaatatcaatgcacagaatttttggctgtacatatttgggatgctcttcaatttggttgcaatttgtgtccaggacttcgatgctgtcatgaacaaaggctttttccatggctactcgtttattacagttttgatgattcttaatcatgctttgagtggaattgctgtatcaatggtgatgaaatatgctaacaatattatcaaggtttactcaacatcagttgcaatgcttctgacagcaacagtatccgtcttcttatttggcttccacctgtctcttgcattcttgcttggatccacggtcgtttctgtgtctgtgtacctgcactcagttgggaagctgcagcaacggaactagggtttttcttcctgcatgctgacggaagagtgtttttcttcgaatgccctacaagatcaggcagttggagcgctgtagaatgtttttctagtagcactgtgaacattgttgcaccatgagggagaacgtaagatggaaggcattcctgttcatcagaagaagaataa

SEQ ID NO: 144661 - DNA, 977 bp, Zea Mays
cagagctgcagagccggagaggccaggctcgccgctcgtggggaagagatggagcacagaagagtgaaggatcaggagagtgatggcgtatctcagaaggacatagagaactttgataagatatctctttctagcaatacatcaacttcaagtcttagcactgcaggagggccgaaggatagttcgaagctaaagtccattgttacacttgcattgacattgctaacaagttcccaggcaatattgattgtatggtcgaaaagagctggaaagtatgactatagtgtcacacagcaaatttttcggttaagtcaaattcagtgggctgcatttattcttttatgtgctggatgcactactgctcagctcagtccctcgtcagaccatgttcttcagacccctattcaaggttgggtgatggcaattgttatcatcaagaaaaatccttcaagaaatatcaatgcacagaatttttggctgtacatatttgggatgctcttcaatttggttgcaatttgtgtccaggacttcgatgctgtcatgaacaaaggctttttccatggctactcgtttattacagttttgatgattcttaatcatgctttgagtggaattgctgtatcaatggtgatgaaatatgctaacaatattatcaaggtttactcaacatcagttgcaatgcttctgacagcaacagtatccgtcttcttatttggcttccacctgtctcttgcattcttgcttggatccacggtcgtttctgtgtctgtgtacctgcactcagttgggaagctgcagcaacggaactagggtttttcttcctgcatgctgacggaagagtgtttttcttcgaatgccctacaagatcaggcagttggagcgctgtagaatgtttttctagtagcactgtgaacattgttgcaccatgagggagaacgtaagatggaaggcattcctgttcatcagaagaagaataa

SEQ ID NO: 144662 - DNA, 1509 bp, Zea Mays
ggaagatctttctgtgcagtcacggccctcttccttcttccatcgccactcactagtcactattctgcccctccgaccgtgtgtgcacaggaagggccagtcacggcaccgcagcatcgcggtcgcagattgccgtgccgagcgaagcgaccacaacaaagcggccagcgaggctctccgacaccgagccgcgcgcacgcaacgatgcccttcctgctcacgccgggcgctcgggcggtgccctcaccgtcaacgctctcgcgcctactgcttccgctccacctacaaattactaatggccggcacaaccaccagcacggtcacgtccccgcctctcccctcctataccctcgcctccgcaaccgccgcagccgattcttcgcggcctcctcctcctcctcctcgcctcagatggcggcgcctgccgacgccgccggtggctcctctgacgcgttcgaggtgatccgcgttcaccaggcaaaagctgttcgtctttctccagttgaagaaatacggaccattatggaccgaagtgtcagatgtgttcttgctacccattctcaggatcatgctggttatccatctggttcaatggttgattttgcatgtgatcaggatggttaccccatattagcagtgagtagtttagcagtccattcaaagaatctctctggaaatcctaaatgctcacttcttgttgccaaagatcctgaggacagaactgatactgtaatcactgtatatggcgacgctgttcctgtttctgacgaagaaaaagattcagtgagaagtgcttacctacgcaggcaccctgatgctttctgggttgactttggtgacttcagtttcctgcacatcaaacctaaagctgtgcgctatgtatctggcgttgcaactgctctccttggttctggagaattcaatgttgcagagtataaggaagcaaaagttgatccaatatctcaattctcaactcctatcacaagccatatgaacaaggatcatgccaatgatacaaagctcattgtgcaacactccactactgtcaaggtggattttgcttatatgctggacgtggacagccttggttttaatgtgaaggctggttatgatggaagtgttctgaagttgagaatccccttcccaagacaggcgcaagacaggaaggatgttaagacactaattgtggaaatgctccaagctgcaagagcctcatcttcagatcctgaatgatgtcgtcggtctggaatgtgaagaatcgtgcaaattgaagtaaacctaatgaataagagttattgggtttccgtccaatctctgcaccaactgaaggtggggccacagacactccatggattgatacacgaccttgtatataatataacaaagagcgcttgagccttgaagtacttgtagttgaatgaatacaaagcgatttcactatattgtacttactgacatgcataacaatttcaacggattgttcaccaaatgactgaactaattttaacc

SEQ ID NO: 144663 - DNA, 1100 bp, Zea Mays
ggaagatctttctgtgcagtcacggccctcttccttcttccatcgccactcactagtcactattctgcccctccgaccgtgtgtgcacaggaagggccagtcacggcaccgcagcatcgcggtcgcagattgccgtgccgagcgaagcgaccacaacaaagcggccagcgaggctctccgacaccgagccgcgcgcacgcaacgatgcccttcctgctcacgccgggcgctcgggcggtgccctcaccgtcaacgctctcgcgcctactgcttccgctccacctacaaattactaatggccggcacaaccaccagcacggtcacgtccccgcctctcccctcctataccctcgcctccgcaaccgccgcagccgattcttcgcggcctcctcctcctcctcctcgcctcagatggcggcgcctgccgacgccgccggtggctcctctgacgcgttcgaggtgatccgcgttcaccaggcaaaagctgttcgtctttctccagttgaagaaatacggaccattatggaccgaagtgtcagatgtgttcttgctacccattctcaggatcatgctggttatccatctggttcaatggttgattttgcatgtgatcaggatggttaccccatattagcagtgagtagtttagcagtccattcaaagaatctctctggaaatcctaaatgctcacttcttgttgccaaagatcctgaggacagaactgatactgtaatcactgtatatggcgacgctgttcctgtttctgacgaagaaaaagattcagtgagaagtgcttacctacgcaggcaccctgatgctttctgggttgactttggtgacttcagtttcctgcacatcaaacctaaagctgtgcgctatgtatctggcgttgcaactgctctccttggttctggagaattcaatgttgcagagtataaggaagcaaaagttgatccaatatctcaattctcaactcctatcacaagccatatgaacaaggatcatgccaatgatacaaagctcattgtgcaacactccactactgtcaaggcaagaaaatgatgaagtctactttaatgctttcttttgttccaacaata

SEQ ID NO: 144664 - DNA, 737 bp, Zea Mays
tttctcaattgtattaccgtatttttatttctttattgtccccactgaacttggatgcacgaattgaaggcatgcagcaaatgccatataatctatcagattatcactagcgttttttctttgcagaaggcaaagaaccacttgaaattgccgagacaaattcgttggtcgcaaatacctcatactgcacgctagataaccttcgttggccgcagtcccgcagatagagaatcttatacctcagattgaacgctagatgggcacacgatattaccgtaaaattaattgtgtgcacttggtgctcaggctggaaagaatcaaataaatcatctcattgataaccagaaaacggggcaggcacatgatcgccgccacaaacaatggagcgtcgacgcacgtaccaccacgcgcacacctcctcctccgccaccgactccatacatacagacacacgcccgccgaaacaactcacacagacacgcgcacgacacggactccactcgcgccagacgaatcacaaatcaagcagaaaccacgcgtccagcgcggatctagcagaagaggtagccgaaggcggcggcggcgagggaggccgcggcgaggggcacggcggccgcggcgtcggaggcgggggccggggcgggggccggccatctgcgagtgtgtagtgtagctagcgagtcgggtttttattgggccgcgcgggatctctctacgagagtatgaagcagtagaag

SEQ ID NO: 144665 - DNA, 2455 bp, Zea Mays
ggaaaagggccttgtcgcctcccacctcgcccccatccgcttggacctctcctcctgtcgtccatggcgtccctttccactttcacatcgccgacgagtcctcaccattgacatgcacgacggcactggtacccagctttccgttttggaccccagtgtctgtcgccgttccacggctctacctgtgtgcttttcaaaaaattctacttgcccgcgctgccgcgcagataattgtcacccctgcgccccgcgctataaaaaagctcacctcgccgatttctcggtcaaacccaaacacagacgaaaatcagaacaactacaaaaaccaaaatgcctcatctccaccactactcacccgtgctactgctcctcgccgtcttcgtctacctatcgacacgctacgtgcacggtgaccatgccgacggcggccaccaggaccttcccgccctgctctccttcaaggcgtacaacccgaacgccacggccctggcgtcctgggtcggccccagcccgtgcaccggcacgtggttcggggtcaggtgctacaggggcagggtggcgggggtcttcctggacagcgcctcgctggccggcaccgtggcgccgctgctcgggctcggccgaatcagggtgctcgccgtcaggaacaactccctgtccggcaccctccccccgctggacaactccacggcgagcccgtggctgaggcacctgctcgtctcccacaacaagctcagcggaagcctcagcatctcgctggccgctctacgcaccctgagagcagagcacaacggcttccgtggaggcctggaagcgctgcgcgtcccgatgctcaggagcttcaacgtgtcggggaacaggctcgccggggagatctccggcgacctgtccaggttcccgagctccgctttcggtgacaatcttgctctctgtggtccgcctctgccacaatgtgtccatgcgtacgatgctctaggccggtcatcaggtaactcgagcactagtgctactgccgctgaatctccggacgccagtgtgggtgtttcttctagcaacgggggattcagtaagattagcctgactgcgctcatggccacgggcattggcaacgcggtgctcgtcacggtttcgctggccatcacggtggccatgttcgtctacatgaggagaaagctccggtccgcgagtgatgctcccgacgcggggctgtgcttcgaggaggaagacaagagagcccagggggaagacaggtgccacaagaccggcgggctcgtctgcttcgagggcggcgacgagctgcggctggacagcctcctcaaggcatccgcagaggtgcttggcaagggcgtgtccgggagcacgtacaaggcggtgctagaggacggcgtcttggtggccgtcaagcgcctcagcgcgctgcagttccccgccggccggagcaaggcgttcgaccgccacatgcggctcgtcggccggctccggcaccggcacgtcgtcagcctcagggcgtactgcaactccaacggggagcggctgctcgtctacgacttcctcccaaacgggagcctccagtcccttctgcaagccaacggtgcgctatggaaatattatccaatctgcatgcagttgctgcaagagagtgagtgtctgttcttgacggactgttgctgctgctgctggctcgttgcaggaggaggcgcgaggaatctggactggacggcgaggaagagcatcttgttcggcgcggcgcagggcctgaactacatccacacgttcccggcgcgcccggcgctggtgcacgcgaacgtgaagccgtccaacatcctcctgggcgagcgcggcggcgcgtgcgtgtccgagtgcgggctcatgcgctacgccaccaacatccagcagtccatcgccccgcaggccacccggacgcggtgcccgcccgagctgttcctggagcgggacacgggcacgacgacgtcggcgcccgcgtcgagcgggtggcacgggtacgcggccccggagctggcttccggcgcggccgcgcgggcgacgcaggaatcggacgtgtacagctttggaatggtgcttcttgaggtggtggctggcgagggtagcgatgagacgatggggatggtgaagatcggcatgctgtgcaccgccgaggcgccggaggagcggcccacgatggcgcaggtgctcgccatgatgagcgagttcgtgtgaagcagttgcccttagcgagactggtagattgccaagtgtattgaggcaagatatttgttcgtcggcagataaatgttgtgatctcgtggcggttcggtacaattattccaattccaacatcattacgaacgtgtcttcttcattttattccttctctccattctacgcttggagcgattcatccgtggtcgtggactcgtagtcacgcctaggaatagcaaggaatctaattcgggcc

SEQ ID NO: 144666 - DNA, 2222 bp, Zea Mays
ctcgcccccatccgcttggacctctcctcctgtcgtccatggcgtccctttccactttcacatcgccgacgagtcctcaccattgacatgcacgacggcactggtacccagctttccgttttggaccccagtgtctgtcgccgttccacggctctacctgtgtgcttttcaaaaaattctacttgcccgcgctgccgcgcagataattgtcacccctgcgccccgcgctataaaaaagctcacctcgccgatttctcggtcaaacccaaacacagacgaaaatcagaacaactacaaaaaccaaaatgcctcatctccaccactactcacccgtgctactgctcctcgccgtcttcgtctacctatcgacacgctacgtgcacggtgaccatgccgacggcggccaccaggaccttcccgccctgctctccttcaaggcgtacaacccgaacgccacggccctggcgtcctgggtcggccccagcccgtgcaccggcacgtggttcggggtcaggtgctacaggggcagggtggcgggggtcttcctggacagcgcctcgctggccggcaccgtggcgccgctgctcgggctcggccgaatcagggtgctcgccgtcaggaacaactccctgtccggcaccctccccccgctggacaactccacggcgagcccgtggctgaggcacctgctcgtctcccacaacaagctcagcggaagcctcagcatctcgctggccgctctacgcaccctgagagcagagcacaacggcttccgtggaggcctggaagcgctgcgcgtcccgatgctcaggagcttcaacgtgtcggggaacaggctcgccggggagatctccggcgacctgtccaggttcccgagctccgctttcggtgacaatcttgctctctgtggtccgcctctgccacaatgtgtccatgcgtacgatgctctaggccggtcatcaggtaactcgagcactagtgctactgccgctgaatctccggacgccagtgtgggtgtttcttctagcaacgggggattcagtaagattagcctgactgcgctcatggccacgggcattggcaacgcggtgctcgtcacggtttcgctggccatcacggtggccatgttcgtctacatgaggagaaagctccggtccgcgagtgatgctcccgacgcggggctgtgcttcgaggaggaagacaagagagcccagggggaagacaggtgccacaagaccggcgggctcgtctgcttcgagggcggcgacgagctgcggctggacagcctcctcaaggcatccgcagaggtgcttggcaagggcgtgtccgggagcacgtacaaggcggtgctagaggacggcgtcttggtggccgtcaagcgcctcagcgcgctgcagttccccgccggccggagcaaggcgttcgaccgccacatgcggctcgtcggccggctccggcaccggcacgtcgtcagcctcagggcgtactgcaactccaacggggagcggctgctcgtctacgacttcctcccaaacgggagcctccagtcccttctgcaagccaacggaggaggcgcgaggaatctggactggacggcgaggaagagcatcttgttcggcgcggcgcagggcctgaactacatccacacgttcccggcgcgcccggcgctggtgcacgcgaacgtgaagccgtccaacatcctcctgggcgagcgcggcggcgcgtgcgtgtccgagtgcgggctcatgcgctacgccaccaacatccagcagtccatcgccccgcaggccacccggacgcggtgcccgcccgagctgttcctggagcgggacacgggcacgacgacgtcggcgcccgcgtcgagcgggtggcacgggtacgcggccccggagctggcttccggcgcggccgcgcgggcgacgcaggaatcggacgtgtacagctttggaatggtgcttcttgaggtggtggctggcgagggtagcgatgagacgatggggatggtgaagatcggcatgctgtgcaccgccgaggcgccggaggagcggcccacgatggcgcaggtgctcgccatgatgagcgagttcgtgtgaagcagttgcccttagcgagactggtagattgccaagtgtattgaggcaagatatttgttcgtcggcagataaatgttgtgatctcgtggcggttcggtacaattattccaattccaacatcattacgaa

SEQ ID NO: 144667 - DNA, 921 bp, Zea Mays
atgcctcgatccgctccagcggccgcccgccgaggcggctgtgcggtggatccaacctgccgtcttgttgcgcctcgtgcgtcaacgcgaggtaggagcaacatccacttccgcaggctggtcgagtaccacaggaggctgcgcatgatgaggagcctccgcgactccctccatggccgaatcaccgcacgcctcgaagccaagactgtgcaaccaatgtgcaatcgctcaatcaagaaatctagggcatatagcctgattagttcaccaaaatccggcggaggggaggagctctccgtggaggagcgcaacctgctgtccgtcgcctacaagaacgtcatcggcgcccgcagggcctcgtggcggatcatctcctccatcgagcagaaggaggagggccgcgggaacgaggcgcacgccgcctccatccgcgcctaccgctccaagatcgagaccgagctcgcccgcatctgcgacggcatcctcgccctgctcgactcccacctcgtcccatccgccggcggcgccgagtccaaggtcttctacctcaagatgaagggtgactaccacaggtaccttgctgagttcaagtctggtgcagagaggaaggatgctgcggagagcaccatgaatgcctacaaagctgctcaggttggaccatggtgtacatgttgataggatgaaggtgtacatatcttattaattgtgattcatagtttctgggtttttttggggggggggggggtttgtaggacattgctcttgcagatctggccttgctctcaacttctcagtgttctactacaagatcctgaactcccctgatcgtgcctgcaaccttgcaaaacaggtttgcttcttctccttctatcccccctttgtgatttgctttcattttgagaccctttgtgatttgtttta

SEQ ID NO: 144668 - DNA, 948 bp, Zea Mays
atgggtgccccggcgctaccatgcctccgcctgcgacaccgtgcccccgcccccgcttccgtcatcacgcaagctctgctgtcaatgtcgcccgactgccccatcctcagcgccccacccccgttcgcccctagatctggatcccgcccatcgtcggtgcctcctcccccgccccccagagacccgtatcccgccgctcccccgtcaaactccccagtctcctttttccccgtctccccctccaagcacgcgccaccgacctcctcggcgcctgcgtccaatgtcggggcctacgccagccggagccccaccctcatccgcctggcgccagcgctcgctagggcggacctcctggccacgatcggactaccccatgtttctgatggtgcagattttgcaattattgagaagaatgtattgctattacagggttttgagcacaacaataaagagtctattgaagtttttgtatcactaatgagtaaacgatttggccataatgaaattgatgagtcgtccttcacccaacctatggtgtacaaggggaaccatgtcagattaagtggtcaggatgttgagtggggtaaatttagccactgtcattctgtcatccatgaccaagaaactggagagcagtactgcccactggattgtcttgttatgaaccaagatgaggagctttttactatgagcaacatgtatgaacaatatgctaatgattgggttaggggcaagcaccatactcaaggaggcacttatgctcgtggacacctaaggtattcatgcaattgtgaatatggactatgtgatgaagtcgttgagtactcccttattccatatttgtggaggggtggaggcagtggcgtggggaggaagaggacgagatacgagggtgtcgtgaacgatgagtgtgtgagcaggaagaggtggggtgggccggcggtgtga

SEQ ID NO: 144669 - DNA, 646 bp, Zea Mays
tccaaactttgtttcatactttcgttgccactaaatgcatgtgtttcatactttgattgccactaaatacatggtgcagacttcacacccgtacagaggatgtccgaaccttgcctgccaggtgaggttaaccttacctactccagtgtgcggatttggtcctcttgagctaacaaaaaacagctcacagaacataaaaccaaggcaacaacagaacaagacatccgaaaacattttttctaacagaactaaacacggcctatttggtatggctccaaaggattttggcttattgctacagtacctgaaagagctgaagccggtgaaacaaaaaagtgaattcaccagtttctaattcattttgataaagaaaagcatctcatcgttaagatgcacacaggatctagagtcacccaaacctctaccaaacaccacttagaccgtgtccaacaattcaccgtatggtcaactaaaacactgttttacaatattttgcactatagactgtactgttagatgtgaggatggctaatctgctggagatagccttatgctagctatagttattcacactccattctaaaatataacccctcccaacacaaattttgtaccttatggttccaacttgtaactgaaatgagat

SEQ ID NO: 144670 - DNA, 2445 bp, Zea Mays
ataataataataataatgattaaatataattagtagtttagttaagctttcatcaataaatactttgttcataaatactttcttcataagtttagcttgtccttgtaaatggaaaaatgataaatagttgatctataattcagaacactacaatggtattgactattaagcacacagcacttgcaacagaatgaaatatactacatcgaacttcgatgaatagcattgcaaatcaaaacaggatgatatgaacaacaatcatggccaatagggggctacgaacaatttatcacaaaatacaaaatggaaacacacagcagcagcacgcaatggagtggacccatacagagtatactcaaaataactcaaccattaagcaccagcgaactaattattaaccggctactcaatagtcatcgccctcgtcaccctcgtcatctgcaccctctgcgccgacttcctcatagtccttctcaagagcagccaagtcctcacgggcctcggagaactcaccctcttccataccctcaccgacgtaccagtgaacgaacgcccgcttggcgtacataaggtcgaacttgtgatcgatgcgcgagaacacctcagcaacggcagtgttgttgctgatcatacacacggcacgctggacctttgccaggtcgcctccagggacaacagacggtggctggtagttgatgccacacttgaatccggtggggcaccttccacaaactggacagttctcttggtcttgatggttgcgactgcagcattgacatccttgggaacaacatcaccacggtacatcaagcagcaagccatgtacttcccatgccttgggtcacacttggccatcatgcttgagggctcaaagacggcattggtgatttcaggaacagagagctgctcatggtaagccttctcagcagagattacaggggcatatgaggaaagcatgaaatgtatacgtgggtatggaacaaggttggtctggaactcggtgacatccacattgatagcaccatcaaacctcagggaggtggttagagatgatatgatctgtgagatcagcctgttcaagttggtgtaggttggcctttcgatgtcaagggacctcctgcatatgtcatagatagcctcgttgtccaggaggactgcaacatcagtgtgctcaagcaaggagtgggtggagaggacactgttgtatggctctacaacagctgttgacacctgcaatccagggtggcattagaggaaaagttaaaccatggaccagacccaaaatgatcgatcatctctacccattgtccacataacagctaagatgcaaaaagaaactactctcatgagcaagctgaatggcccacatcacatggacaggagggagcagcactataggataatgttggcacatatgcgatgcatgatttcaagacactcataaagatgacctgtggcatgtgacagttgtactaatcatggtctaaaccatgcacaggaaggtcctcctcactaaccagaagtccacaacagttgattttttgtccacacatgatttaaataatgctaggctggtccaatgatcagtgtctatctgtgtgatttagaaggcaaggacagtgctgctaaattacatggtccgtagattaattctatataaaacaattccctgttggttgacaaatataaattgttaacctgcttcatgtattatttccatttctcagatatttaagccagcatctcagtttggaaagaatagatatacgaatactttttttgagaaatcaccggatactaggttgctaatataaggttttagcataggtaaggtcatacctgtggggaaggataaatggtgaaaccaagcttggatttcttgccataatcaactgaaaggcgctccaataaaagtgacccaagtccagagccagtcccaccaccaacagcattgaacaccaagaatccctgcagcccagtgcagttgtctgcaagcttgcgcacacggtccaggcatagatcgacaatctccttcccaactgcattccacataattagaattgaacatatccacagtcacagaagcataatacccactcctattacatattcacatacacatggtgaattaccagtgtagtggccacgggcaaagttgttagctgcgtcttccttgcccgagatgagctgctctgggtggaagagttggcggtacgagccagtgcgaacctcatcaatgacagtgggttcaaggtcgacgaagatggccctcggcacatgcttgccagaaccggtctcgctgaagaacgtgttgaaggcatcatcattcacctgggcatggtgccatcgggctcgatgccgtgctcgaggcagtagagctcccagcaggcgttgccgacctggatcccggcctggccgatgtggatgctgatgatctctctcatc

SEQ ID NO: 144671 - DNA, 1426 bp, Zea Mays
gcatcgacacctgtcttcctcctcctttccaaccgctccaaccagctgctcaaagccaaggaagctcacatggagctccacttccaagcgcagccaccagtgttccagctcgagaactacagcagcagcagcagctactactactaccagcagcaagaggcggcggctcaggccaagccgtccaagccacggggccggaagaagggcagcaacaaccacagcaagttcgtcggcgtccggcagcgcccgtcgggccggtgggtggcggagatcaaggacaccacgcagaagatccgcatgtggctcggcaccttcgagaccgccgaggccgcggccaaggcctacgacgaggccgcccgcctcctccgcggcaccgacgcccgcaccaacttcgcgccgcgcatctctcccgactgcccgctcgccgtccgcatccgcggactcctccaccacaagaagatcaagaaggccaaggccgccgccgcagccgccaagcagcaggcgtcgtcgagctcccctgcatccaccacaagcaacagcaacagcaatagtcatagcacgaatagtgctcgtggtggtggctctagcatcaccaccaccaccaccagcagcagcagcagctccagctccagcagcgcagtcagctgcgacgacgacatggccacgcagggcggcggcaccggcgcactggacgccggcgaggtgtaccggccggggttcgccaccgcgggcaccgaggaggagttcgactcttggatgttcgactcggcgttcccggcgctggacagcttcgcggccgtcgacagcgccgtcccagctgctggcaccacggaggaaccgggcgccgagatggccgagttcgagcggatcaaggtggagcggcgcatctcggcgtcgctgtacgccatgaacggcctgcaggagtacttcgaccgggtgctcgacgcctccgcctgcgactcgctctgggacctgtctccgctctgccaccattagctagcttcatcacctgaaccgcgtgcgtcgtttcttcttgccctcccgcctcctgccaggtgtatgcgcgcgcctgcggtgtaaagaggaaccgaacaacactagaggattctgctcgttgtagtcagtcgatgcatttttttttttgagcaaaagtgcctcaaattctgccttacggcaaagcgaatggtcgcgcatttcaattttcagtctgtctgcagttgctcttcatgcggtgagtgcaggactgcagggtgcttagcgctgagtgcagaatgacacttatctcagagtagagtaccacagtcttgaatcttgatgtaccttttgcatctgcgaaactcaagtttgtcgtcgacttcgtcaagatcgatcagctagacttaataacttgggtgtacaaagtacaattcatccttcttctacgaat

SEQ ID NO: 144672 - DNA, 2793 bp, Zea Mays
gggaacaactatggagtggcgcaggagtgccttgaccgcctttccatcgccattggtgggaacgcaattgtaccaattgcttctgagctgctaccacagtacctgtcttctgctgagtggcagaagcaccatgctgcgctcattacacttgcacagattgcggaaggatgtgcaaaggttatgcttaaaaatttggaacaagtcgtttcgatgatattgaatggatttcaacatccccacccacgtgtgagatgggctgctatcaatgccatcggtcagctttctacggatttgggcccagatcttcaagttcattaccaccagcaggtgctgcctgcattggccaatgctatggatgatttccagaatccacgagttcaggcacatgctgcttcagcgattttgaattttagtgagaattgtacaccggaaattttgacgccttacctggatggaattgtgaacaaattacttgttcttcttcagaatggaaagcaaatggtgcaggagggagcattgacagctttagcgtcagtagcagattcatcacaggatcacttcaagaaatactatgatgctgtcatgccatacctaaaatctatcttgatgcatgcaactgataagtccaataggatgctccgtgccaagtccatggagtgtataagtttggtaggaatggctgtgggtaaggacaagttcagagacgacgcaaggcaggttatggaagtacttatggctttgcaaggagctccaatggaaactgatgatccaattaccagctacatgttgcaggcttgggctaggctatgcaaatgtcttggacaggatttccttccttacatgagtgttgttatgcctccactgcttcagtctgctcaactcaagcctgatgttacagttacttcagctgaatcagatgacgatattgcatcagatgacgatagcattgaaacaattacacttggtgacaaaagaataggaattcgaactagtgtgctggaagagaaagcaacagcttgcaacatgctgtgctgttatgctgatgagcttaaggagggtttcttcccatggattgatcaggttgccccaacgttggttcctctgctgaagttttacttccatgaggaagtcaggagagctgctgttgcggccatgccggaacttctacgctcagcaaaattggctgttgagaaagggcaggctcaaggacgtgatgagtcttatgtcaaacagttgtctgactacataattgcagcacttgttgaagcactgcacaaggagccagaaacagaaatgtgctcatccatgctggattctttaaacgagtgtatgcagctttcgggtcttttgcttgatgaagcccaagtacgagctatcatagatgagattaaaaacgtcattatagccagtgccacccggaaaagagaacgctcggagagaacaaaagcggaagattttgatgctgatgaaggagagctactcaaagaagagaatgaacaggaggaggaagtatttgatcaggtcagtgagtgcctagggactttgattaaaaccttcaaaggttctttcttgccgttttttgaagagctctctatgtacattacaccaatgttgggaaaagataaaacacctgaagagagaaggatagctatctgtatttttgatgatgttgcagagcaatgccgtgaatcagctctgaagtattatgacacataccttcctttccttttggaggcatcaaacgatgaaaattcagatgttcggcaggctgctgtctatggtgtgggtgtatgtgccgagtttggtggtcatgtttttcgccctctagtaggagaggccttatcaaaattaaacaatgttataaggcatcctgatgcacgacttcctgataatatcatggcatatgacaatgctgtttcggcgcttggaaaaatatgccaatttcatcgggatggtattgatgcagctcaggttgttccagcctggcttagctgcttgcctataaaagacgacaaggttgaagctaaagttgtacatggacagctttgctccatggtggagaggtcggatgctgaaattcttgggcctcacagtcagtatcttcctaaaattgtttcaatttttgcagaggttttgtgcaatggaacagaacttgccactgatgaaactagaaacaggatggtgaatgtcttgaggcgtttccagcagactttgcctcctgattttcttgcatcgacgttttccaacttgcaaccgcagcaacagctactgctacagtccatcttgtcgacatagttgttttttctgtcgctgcaaggtgggggtttgttatttttcttgatgttttatcagccaattctttatgtcgtatctttttctggtggggtactttgtgaatgcattgtttgcttcaacgaactggaggctgtcaccacacatggttttgatagagtgtatattgtctgtcttgtattcgaaatatggtttgagatgtgctgcaacagaggtgcaagggaaacggtgggatttattgtcggatgggttggacatttgcagttttttggtaatgagatcactataagtggagttactttctgcttctctttgaagccattttaattctgttgaaaattattaaaatgtgctctgttggaagatgcagaagctcctccgggttcatactggtaattggtgaaataaaaagcagtcttatctttctgaatgaaccttgggttcgtgtgtatttaagctggatcgttaatttattctgagataaaaccgtagcaattcgct

SEQ ID NO: 144673 - DNA, 1927 bp, Zea Mays
aagaagcagacgaacaccattctgggtggagccacttggaggcagcagcgaacaccattcttcgtgcaattattatctctctagataatagcacacttaactacagtacacatatatagcgaagagccttgacgtcgagggcagcaccgatcaagagctgcagtgcggagcagctcaatccagagctgtaatggcgacggtcctccttccgctgctgctcttgctcggctcggcggtgacgctcctaacgtgcgcgggcgcgggcgcgtcgttccccgtcaatgtctggccaaagccgacgtccatgtcatgggcggagccgcacgcggccgtaccggtgtcgccgtccttccacatcgtggcgtcatcgggtaacccgtacctcgcctcggccgcggagcgctacgccaagctgctgttcagggagacgtaccgacccatcgttcggccggcggtcaacgtcaccgcggggaacgcgctggagaagctgaccgtggcggtgtccgacctcgccgccccgctgcagcacggcgtggacgagtcctacacgctggagatcctccccacgggcgccgccacggtgaccgcggccaccgcgtggggcgccatgcgcgggctggagacgttctcgcagctgtcgtggcgggccggccgcggggacctcctgctggtggccgccggcgtgcgcgtcgaggaccggcccctgtacccgcaccgcgggctgatgctcgacaccggcaggacctacttccccgtggccgacatcctgcggaccatcgacgccatggcggccaacaagatgaacgtgttccactggcacatcacggactcgcagtcgttccccatcgtgctgccctccgagccgtcgctcgccgagaagggcgcctacggagagaacatgcggtacaccgtcgaggatgtcgagcgcatcgtcgagttcgccatgagccgcggcgtccgcgtcgtgccggagatcgactcgcctggccacacagcttcgtgggccggcgcgtacccggaggccgttacctgcgcgggcaagttctggctgcccgacggcgactggaaccaccgcctcgccgccgagccgggcgccggccagctgaacccgctggcggccaagacgtacgaggtcatcaccaacgtggtcaacgacctgacctccctcttcccggacggcttctaccacgccggcgccgacgaggtcaccccgggttgctgggaggcggaccccacgatccaggccgacctggagcgcggcgccacgctgagccagctcctggagcggtacgtgagcgcggtgcacccgctggtggtgtccaggaaccgcacggccgtgtactgggaggacgtgctgctggacgcggccgtgaacgtgagcgcgtcggcgatcccgccggccaccaccgtcctgcagtcgtggaacaacgggcccaacaacaccaagctgatcgtgcaggccgggtaccgcgccatcgtctcctccgcctccttctactacctcgactgcgggcacggcgacttcgtcggcaacaacagcatctacgacgaccccaacagtgacttcgacgcgaacggcgggtcctggtgcgggccctacaagacgtggcagcgggtgtacgactacgacatcgcgtacgggctcacccccgaggaggcccagctggtcctcggcggcgaggtggcgatgtggacggagcaggtcgacacgaccgtcctggacggccgggtgtggccgagagcctcggccatggcggaggcgctctggtctggcaaccgcgacgcgtcgggcaggaagcggtacgccgaggcgaccgaccggctcatcgactggcggcagcgcatggtcgggaggggggtccgggccgagcccatccagccgctttggtgccgaacacgacccggaatgtgcaacgcggtccagtga

SEQ ID NO: 144674 - DNA, 2291 bp, Zea Mays
attcagcctgcaaagggtaagggcttttgctcaagagagcattgagcattaaggcttatgaaggcaaaccaaaatatgtctgctaagctcctatccttagtcgtcctgctccttctgatccatgtgagtgtcccctcgtcgtctgccgacgtcggccaccagtttatttaccaaggtttcgccgcgtcggacctcgcgctaaacgggctcgccgccgtgacgcccggtggcctcctcgcgctgaccaacgccacattccaggcgaaagcgcacgcgttccgccctgcccccgtccacttcctcaacgcgtcctcctccgccgcggcggcgacggcgcgggcgcgggcgcggtcgttctcgacgtgcttcgtcttcgccatcgtgtccgcgtacgaggggctcagcgaccacggcctcgccttcgtggtcgccccgaccaccagcttctccgcggccaaggccgggcagtacctgggcatcctcggcgccatcaacggcacggcgagcgaccccgtcctggcggtcgagctggacaccatcctgaacccggagctgagcgacatcgacagcaaccacgtcggcgtcgacgtcaacagcctcgtgtcggaacaggccatgccggccggctactacgacgacgcggccggcggcgccatacgggagctgcagctgaacagccggaagccgatgcaggtgtggatcgactacgacggccaggccgggcggctcgacgtgacgctcgctccggtgcgggtgccaaagcccagcaggcctctggtctccacggccgtcgacctctccacgatcgtcgggcggggcggaccgatgtacgtcggcttctcctcggcgacgggggtcgtggccacgcaccactacgtgctcgggtggagcttcggcttggacgggccggccccgccgctcgacatgtccaagctacccgtcctgccacgcgtgggtcccaagcctcggtccaaggtgctggatgtcctgctgccgctcgccaccgcgctggtcgtggccgcagcgctcgcagccatctccttcgccatgtggaggcggcgccggttcgccgaggtgcgggaagactgggaggacgagttcggcccgcaccggttctcgtacaaggacctgttccacgccaccaacgggttcgacgccgtgaacttgctcggcgtcggaggattcgggagagtatacaagggagtgctcccagcatcacccgccctggagatcgccgtcaagaaggtgtcgcatggctcgaggcaaggcgtcagggagtttgtcgcggaggtggtgagcatcggccgcattcggcaccggaacctcgtgcagctgctaggctactgcaggcgcagaggcgagctgatcctggtgtacgactacatggcgaacgggagcctcgacaagtacctgtacgaccaacacgtgccggcgctctcgtggcacgagaggtaccggatcatcaaaggcgtcgcggcgagcctcctgtacctgcacgaggactgggagcaggtcgtcatccaccgggacgtgaaggcgagcaacgtgctgctcgaccacgagatgaacggccggctaggcgacttcggcctggcaaggctgtacgaccatggcaccgatccgcagacgacacacgtggtcgggaccatggggtacctcgcgccggagctcgtgcgcacggggaaggcgacgccctctaccgacgtcttctccttcggcgtgttcctcctggaggccgcctgcggacggaggcccatcgaccgcgaccggcaggtcgtgctggtggactgggtgatcgagcaccaccgcgatggctcggtcctggacgtggtggatccacggctcgtggggaagtacgaggcggaggaagcgacgctggtgctgaagctgggcctgatgtgcgcgcacccgttgcctaacgtgaggcccagcatgcgtagggtcgtgcagtacttggactccgaccaggccgttcctgacctgtcaccgaactacacgagctacagcatcatgtcactgatacagaacgacgggtttgattcgtacatcacgtcgtcccacccgtatatgactaacagcatcgttgtatcctctgcaagtgttctatcacaagggagatgatcgatttgtgagaaaaaaatgtagcgcttccccattttgaaatggcatatattgaatgcaaacacgctaagcattgttttagaaccgtatctttttgggactaataagcacttattttctcatatgaatgccccatacttatattcaaactctcctcgagtcttaaactt

SEQ ID NO: 144675 - DNA, 190 bp, Zea Mays
gcgggggccgagccctggggtcgggcgaggcggaaacttctcctaaggccgaggcccaaggtcgggcaaggcggagcttcctgtggcacctgaggctggactcagctgctgtcagcctcaccctagcgggtggcacatcagtcgtagcggggcaggcggcgctgctttcctgtcaggtcggtcagtggaa

SEQ ID NO: 144676 - DNA, 2234 bp, Zea Mays
aatcaaccgtatcgttgaaggaatgctgtttgagaccttcgtcgtggctactctgctgatccttctcctcgttcctgttggccgctgcgccgacgccaccgccggcagcgatgacgagcggttcgtctacaacggcttcaagggcgcgaacctcaccctcgacggcgcgtccaccgtgacgccgaacggcctactggtgctgaccaacggcaccatccaaatgaagggccacgcgttccacccgtccccgctgccgttccgtgaccggggcgcccagaacgccaccgccgcgcggtccttctcgaccaccttcgcgttcgccatcttcgggccgtacatcgacctgagcagccacggcctggccttcttcgtctcctcggacagggcggctctgtccaccgcgctgccggggcagttcttgggcttgctcaacagcaccgacaacggcaacgggagaacccacgtcttcgccgtggagctggacacgctcttcaacgccgatttcctcgacagaaacagcaaccacgtcggcgtcgacgtcgacagcctagtgtcgcgtgctgctgcggacgccggttactacgacgacggcaccgggcagttccggaacctgagcctggtcagccggaaggccatgcaggtctgggtggactacgacagcgggtcgactcaggtcaccgtgaccatggcaccgctgggcttggccaggccgaagaagccgctgctgcagaccaccgtcgacctctccggcgtggtgcagggcaccgcggcgtacgttgggttcacgtccgcgacgggcatcctcttctcgcgccacttcgtgctcggctgggccttcgcgttcgacggggcggccccggcgctaaacatctcggcgctgccagccttgccgcccgcggggcccaagccgcggccgaaggtgctggagatcgtgcttcccatcgcgacagccacgctggtgttcgccgtgggcgtcctggtttacgccctgctgcgccgccgggccaggtacgccgagctccgcgaggactgggagaccgcgttcgggccacaccggttctcgtacaaggacctgttccacgccaccggagggttcagtgacaagcggctcctcggcgccggagggtttggcagcgtgtacaggggcgttctccgcaaatccaacacggaggtcgcggtgaagaaggtgtcccacgagtcaaagcagggcatgaaggagttcatcgctgagatcgcgagcatggggcggctgcggcaccgcaacctagtgcagctgctcggctactgccggcgcaaaggtgaactcctcttggtctacgattacatgcctaatggtagccttgacaaacacctctacgatcgaagcaagggcgcacgtgcgctgggatggcctcaaagacttcacgtcatcagaggagtggcgtccgggcttctgtacctgcacgaggactgggagcaggtggttgtccatcgagatgtcaaggcaagcaatgtgctcctcgacggcgaaatgaacgggcggttaggagacttcggcctcgcgaggctgtacgatcacgggactgatgcgcatacgactcatgtggtcggcactatggggtacctggcccctgaactaggccacaccggcaaggcaacgccggcaactgatgtcttcgcctttggggcattccttctggaggtcacctgtggacgaaggccagtcgagcaggacgagcacaacagccacacggtgctcgtggattgggtggctgagcgctggcgtaggaggctgatccttgacgcggcagacacgatgatcccagacggtttcaatcctgatgaggtctgtctggcactaaagcttggtctgctctgctcgcatccgttgcccaacgcaaggccgaccatgcggcaggtcatgcagtacctcgacggcgacatggtcctcccggacttgtcaccggagtatttcggcttcaccgcagtggagcggatgtatagcagggaggtaagcaaggatacgatggcatacgtgtcgtcgtccacgagcatgggtgccatttctgatctttctagtggaagatgaattttttttttggtgcaccgggggagtgtgagtactggttcctgttctcgtagtaataaaagttgaccttgttgcgtcttgaatactcttgatacgtttatatttggtacgagtgatttgatcttcatagcagtaggtcaatatttactataagggctagtttggg

SEQ ID NO: 144677 - DNA, 1560 bp, Zea Mays
ccaattcgcttcgaacagggcagaggtgagacttgagagaaggaagaaggccatgtcgtcggcggcgcagcagcagcagaaggcggcggcagcggagcaggaggaggtggagcacgggccattccccatcgagcagctccaggcttctggaatagctgcattggatgtgaagaagctgaaagattctggtctccacactgtggaggctgtggcttacactccaaggaaagatcttctgcagatcaaagggataagtgaagctaaagctgacaagataattgaagcagcatccaagatagttccactgggatttacaagtgccagtcaacttcatgcgcagcgactggagataattcaagttacaactggatcaagagagcttgataagatattggagggtgggatagaaacaggatctatcactgagatatatggtgagttccgctctggaaagactcagttgtgtcacaccctttgtgttacatgtcagcttccactggaccagggtggtggtgaaggaaaggctctatatattgacgcagagggtacattcagaccacaaaggctcttgcagattgctgacaggtttggactgaatggtgctgatgtgttagagaatgtggcttatgccagagcttataatacggatcatcaatctagacttctgctggaagcagcttccatgatgatagagaccaggtttgctcttatggttgtagacagtgccacagctctgtacagaactgatttctcaggaagaggggaactatcagcgaggcaaatgcacatggctaagttcctgaggagccttcagaagttagctgatgagtttggagtagctgtggttatcaccaatcaagtagtggcccaagtggatggatctgctatgtttgctggaccgcagttcaagcccattggtggaaacatcatggctcatgcttcaaccacaaggcttgctcttcgcaaggggcgaggggaggaacggatctgtaaagtaataagctctccctgccttgctgaagccgaagcaaggtttcagttagcttctgaaggtattgcagatgtcaaggattgagaccatacctgctttacaggcatcttcagatccattggtctgctatttgctttgtcattccttgggccaactttcgtgttgcctcaccttgatgtacaaaacggtttcgttcacatatgtgaatgcacgcctgtgactgatttaggcgtcctgttgtaaataaaacgatgcctgttgccctgttgtgtgttgcatgtaatcgacaactctacatatcacaattatgatgtattttaggttttattgttcgcttagcacagccattgctggatgtgcaatgtgggattatagacaagaatccacacaacaacaatggccaatcctgataaagtagttagtgacttgggcaggtagcattgtggtgatctttgagttcacttgtgataagaacagggctggtggctggtggtgaaaactaacttgtgatcggaacaggtttaatagggaaaactaaggattctatatgattggctgttatctgacca

SEQ ID NO: 144678 - DNA, 1178 bp, Zea Mays
tttcccttgccgctctccaattcgcttcgaacagggcagaggtgagacttgagagaaggaagaaggccatgtcgtcggcggcgcagcagcagcagaaggcggcggcagcggagcaggaggaggtggagcacgggccattccccatcgagcagctccaggcttctggaatagctgcattggatgtgaagaagctgaaagattctggtctccacactgtggaggctgtggcttacactccaaggaaagatcttctgcagatcaaagggataagtgaagctaaagctgacaagataattgaagcagcatccaagatagttccactgggatttacaagtgccagtcaacttcatgcgcagcgactggagataattcaagttacaactggatcaagagagcttgataagatattggagggtgggatagaaacaggatctatcactgagatatatggtgagttccgctctggaaagactcagttgtgtcacaccctttgtgttacatgtcagcttccactggaccagggtggtggtgaaggaaaggctctatatattgacgcagagggtacattcagaccacaaaggctcttgcagattgctgacaggtttggactgaatggtgctgatgtgttagagaatgtggcttatgccagagcttataatacggatcatcaatctagacttctgctggaagcagcttccatgatgatagagaccaggtttgctcttatggttgtagacagtgccacagctctgtacagaactgatttctcaggaagaggggaactatcagcgaggcaaatgcacatggctaagttcctgaaggtattgcagatgtcaaggattgagaccatacctgctttacaggcatcttcagatccattggtctgctatttgctttgtcattccttgggccaactttcgtgttgcctcaccttgatgtacaaaacggtttcgttcacatatgtgaatgcacgcctgtgactgatttaggcgtcctgttgtaaataaaacgatgcctgttgccctgttgtgtgttgcatgtaatcgacaactctacatatcacaattatgatgtattttaggttttattgttcgcttagcacagccattgctggatgtgcaatgtgggattatagacaagaatccacacaacaacaatggccaatcctgataaagtag

SEQ ID NO: 144679 - DNA, 1319 bp, Zea Mays
aagcgtgaggttgttgagccgctcaagcagcgaagcatgccaaaatgtgatgacgacgaggcgcccatggcatttctctacttttttgttgtgacgccaaattcttcggttatgggcttatgacaaatacaggaaacacgtactaactctcggctctagcccgtgcccgtggacgcatggcagtggcaccaccactttgcatgtgcgagcgtcaaacaatctcggctagtcaaccttctagagaatttccatggaaacttttcaaacttctccggccaccattaatgtccacccacgatgcaggtacggacgcgatgacagctcccagtgcaccatgtttgatcttttccgcatctgatccatatccgattctacaggtcatgcagtcggtcatgcagtctccagacccactataaaacccaaagcaaagcagaagcactccacacgcttcagcattcttcaaatacttgcataagatggcaggttccgtggcaatcgtgggcatcttcgtcgccctcctcgccgtggccggcgaggcggctgtgttcacggtggtgaaccagtgcccgttcaccgtgtgggccgcgtccgtgccggtgggcggcgggcggcagctgaaccgcggcgagagctggcggatcacggcccccgcgggcacgacggccgcgcgcatctgggcgcgcacggggtgcaagttcgacgcgagcgggcgcgggagctgccgcacgggggactgcggcggcgtgctgcagtgcactgggtacgggcgcgcgcccaacacgctggcggagtacgcgctgaagcagttcaacaacctcgacttcttcgacatctccctcatcgacggcttcaacgtgcccatgagcttcctccccgacggcgggtccgggtgcagccgcggcccgcgctgcgccgtggacgtgaacgcgcgctgccctgccgagctgcggcaggacggcgtgtgcaacaacgcgtgccccgtgttcaagaaggacgagtactgctgcgtcggctcggcggccaacgactgccacccgaccaactactccaggtacttcaaggggcagtgccccgacgcgtacagctaccccaaggatgacgccaccagcaccttcacctgccccgccggaaccaactacaaggtcgtcttctgcccgtgaggccgctgaactagcatcagcgtgcgcgcgtcgaccaagaacaagaaataaacgaccgaggctgtgtatgttgcccgccgtgtgctcaactggagcaaaaataaagccaacaaaacaagcacgtgtgatctctatgtcaccaactctatcaccttaatt

SEQ ID NO: 144680 - DNA, 2028 bp, Zea Mays
aaccgacgaggatatgtttccctcaccttcgaccaccactaacctcaacctccgcatctctctctctcgcgcgcgccgcccttcccagcgccgtcggctgccgctcctcccctccaccgccgcctctgctccgcccgtcctcgcgccgtctcgaccgctgcggcttcgtctctccccattgtccgtcccctctcaacgcactctacgacggaccgatgacttgacggatctgggggtttgtctagggtgggtgaacggaaggggatggagttcacggagtcgttcaagcagacgggcccgtgctccttctcccccgactcgcgcttccttgctattgccgtagactaccgtctcgtcgtccgcgacgtactctcactgaaggtggtacaattattttcatgcgtggacaagataagctctgtagaatgggcaccagattcagaatacattttatgtggactttacaagcgacccatggtgcaagcttggtcactgagtcaacctgattggacctgcaagattgatgaaggtccagcagggattgcatatgctcgctggagtcctgacagtcgtcatatattaactacatctgagtttcagctccgtctcactgtgtggtctctcgtaaatacagcatgcgtacatgtccagtggccaaaacatggttctaaaggtgtttctttcaccaaagacgggaaatttgctgcaatctgtaccagacgtgattgcaaggattacattaatttactatcatgtcactcttgggaaataatgactgtctttgctattgacacggtagacttagctggtgttgaatggtcaccatatgatagtgctattgttgtttgggattcacttcttgaatataaggttctgatatattcgccagacggaaggtgcttgttcaagtatctagcttatgaaagtgggttgggtgtgaaaactgttgcttggtcaccatgtggacagtttttagcagtgggcagctatgatcaagcagtacggactttgaatcacttgacgtggaaaacttttgcggagttctcacatgcagggtatattcgtagtccttgcaatgctgctatatataaggaagtggatgacccatggcaacttgatatgtcagaattatgtctaagtgaaggcctctctcgaaacatgccagacaatggtgcagaaaatggcaccgagggaggaggctctagagttaaatatgctgtgatggatgttcccatcaccttaccttcgttgaaaccagcttttgacaagcctaaccccaaacaaggcattggtatgctgtcatggagcagcgacagccactatttcttcaccaggaatgacaacatgccaactgttctctggatatgggatatatgccgccttgagcttgccgctgtgctcgtgcagaaagatccaatccgtgctgcagcatgggaccctacctgcacacgccttgttttatgcacagagagccctcacttgtacatgtggacgccatccggtgcctgctgtgtcaacatcccctttctgaacttccgaatcgttgatttgaagtggagctcgaatgggagctgtctcctcctgaaggagcgcgaatctttctgctgtgccacaatcatatctgccctgcctgaggaagaacctgatcattctgatgatacttctgaagatgaatgagtggcctcatggtatgtctagcagcttatgcgaatggaactgggaactaacagtacaaatgatcttgtgatggtgaatgagtgacactgactgactacttagctacttgtagaatccagagtggattgcgataccatgaatcgataaggtcatttcgctgcttagatggcaaatgctctatcaccaggcactacagaatggacagagaactgtgtggttctatttgttgtattcttgctcttgtttgtctgttgtagtttctccaaggttgtactgcttgaccttacttgttggatcttaatcttacatatccagtcaccagggtattttcaatctgggagtacatactta

SEQ ID NO: 144681 - DNA, 2270 bp, Zea Mays
tctaccccggaattgtggagtccccaatcgcgagaccacggttcctccctgcggctcctctgccgcgtccggcgttggctaccggccgttactgcaatcgcgacagaccggtcaccacggttcctccctgcggctcccctgccgcgtccggcgttgggctaccggccgttattgctggtggcgagcgccacccccccacccccaacctctcaaagtctcaagtgattaaggatgtctctgtccaaaccgtgcgccatgccggagcggcgcatcgtgccggttcccgcgacgtccgacatcggcgttctgcccatggacgccctgcgcgagattctactgcgcctccaggccaaggagctctgccgcctccgcctggtctgccgtctgtggcggtccctcctctccgacccgcacttcgccgcgccccactacgcgcggcatcgggcggtgctcatcatcgccgcctacaaggacgacgcggggcgcgacgtgctcgtggacatcatggatctctccgggcaaatcgtgaagaaggtgcccacaatggagggcgacagagccgccgtgaggggcggggggacccttgaccgcgtctgtgttaggaaaatcgacgacagccgcagcagctaccgagtgttcaacccgattcgcgaggaagtgtactacttaccggacagattattcgatccggctactggagctgtgtaccgcataccagacagctacgcagaagagcatgtggagctcgcttcgagcttgatcaccgagcccaagtatctgtttggacaggtcgcccggacaggagagtgcaagatgtttcgaatgctattccatttttccgttggcattggaggtcgggggatgtttgaggtctgcacgctcaactccgataacagtagcagccgggcagcagggtggaggagagccgcgccccttgaaaaaggcattcagattagtaggtttaccagtgtggtaatcgatggggttgtctactgcctttgctttggtccacaccattctatcaccttcgacaaccgagttaccgagcaagatttgatatttacattcgaccttgagactgaggcatggggaccgtcaatccgggggcccccgatcaccttccctgatgacgctgatctcatgttctactaccttggtcttcctaatgtaaagcaactgacaatagccaacctgaatcgctccttggctgttgtgcatggcccagctccgtatgttgatgtttggattctactggactttgcaaagggtctctgggtcaaaatgtacagcatacagtttgagaaatacaccattcttaagcccgtgcatcccttgtttgtgtttggcgacgggaggatcatcctgtataaacaagaccatgattacctgcagatttatgatccaagaaccaacacacttgctgatttactggagtcaaagcatttctctgcagttgctaggtacacaggaaacctactgagcttagagcgctgagtactaatgaggggctttggaggattgggggccctgttcgtgggcaccggccacacatgcgtccgcccgggcctgcatgaagactcaaaaccgcgatggctctttcttgagcggctgcgataactgaagaaagatatgaatgagattctttcgatgaataattccagcaaaaataatggtttcttctgttgtgtatacttggcagaaggaatggataatccatgctatgcagcttgggtgattgcaacagtactgcaagtgcttttatttttcttttttgctaggttgttttccagtttgctttggtgcatttgtggtactgcctcttctggttaattaaatggtgttacatttttggcttacatttttgtggtgacggtcaggccaaattctttaaccctattctggttaattaaatggtgttaccaagggacagacaaatccactttatcggtttagcttatgtttgctggacagtgtggaagacccaaaaaaacggtttataaaaaggagtcatctcagctcagctggagcatggcgcagaaatttcaagaagacggcgctgcactttcatcagtgagatcgaatggatggaggtgacaatagggtgacgatcatctgaaggcagagcattccatgctgagagacttttgttgaaaactgagcacagcctgtgcgctgttaaaagccatctggccatgtaaaggttcagatgttgtgtgtggctatgaacgctttacgttgtgaggtaacgcctctcagtgtagttcatgttg

SEQ ID NO: 144682 - DNA, 1588 bp, Zea Mays
cccactcccgcattctaccccggaattgtggagtccccaatcgcgagaccacggttcctccctgcggctcctctgccgcgtccggcgttggctaccggccgttactgcaatcgcgacagaccggtcaccacggttcctccctgcggctcccctgccgcgtccggcgttgggctaccggccgttattgctggtggcgagcgccacccccccacccccaacctctcaaagtctcaagtgattaaggatgtctctgtccaaaccgtgcgccatgccggagcggcgcatcgtgccggttcccgcgacgtccgacatcggcgttctgcccatggacgccctgcgcgagattctactgcgcctccaggccaaggagctctgccgcctccgcctggtctgccgtctgtggcggtccctcctctccgacccgcacttcgccgcgccccactacgcgcggcatcgggcggtgctcatcatcgccgcctacaaggacgacgcggggcgcgacgtgctcgtggacatcatggatctctccgggcaaatcgtgaagaaggtgcccacaatggagggcgacagagccgccgtgaggggcggggggacccttgaccgcgtctgtgttaggaaaatcgacgacagccgcagcagctaccgagtgttcaacccgattcgcgaggaagtgtactacttaccggacagattattcgatccggctactggagctgtgtaccgcataccagacagctacgcagaagagcatgtggagctcgcttcgagcttgatcaccgagcccaagtatctgtttggacaggtcgcccggacaggagagtgcaagatgtttcgaatgctattccatttttccgttggcattggaggtcgggggatgtttgaggtctgcacgctcaactccgataacagtagcagccgggcagcagggtggaggagagccgcgccccttgaaaaaggcattcagattagtaggtttaccagtgtggtaatcgatggggttgtctactgcctttgctttggtccacaccattctatcaccttcgacaaccgagttaccgagcaagatttgatatttacattcgaccttgagactgaggcatggggaccgtcaatccgggggcccccgatcaccttccctgatgacgctgatctcatgttctactaccttggtcttcctaatgtaaagcaactgacaatagccaacctgaatcgctccttggctgttgtgcatggcccagctccgtatgttgatgtttggattctactggactttgcaaagggtctctgggtcaaaatgtacagcatacagtttgagaaatacaccattcttaagcccgtgcatcccttgtttgtgtttggcgacgggaggatcatcctgtataaacaagaccatgattacctgcagatttatgatccaagaaccaacacacttgctgatttactggagtcaaagcatttctctgcagttgctaggtacacaggaaacctactgagcttagagcgctgagtactaatgaggtgagtattctgttacttgttttcgtaatgaacacctgtcatttactgataaaggaagaatattattgat

SEQ ID NO: 144683 - DNA, 2617 bp, Zea Mays
ttttgtttagtaaaattatttgtggttacattggtgagaataataaaaaacctaatttatccttccctgttagaccgtctgtagtccctttcaagggaccagagctcggcctctataaaggttcacaccgggcagtcattctttcaccacgaacacacggcccgcgcacacatccatcactccatcagcaatggcgacaaccatcaccaggctcttgcaccacctagcgctgttcctcctcattgtcgagttcgccgacgcagttctcatcccaaagaccaagaaccacgctgcgttgaagcctcaggcatcgagcaccacctacatcgttcatgccaacgacctcgccaagccgccccactttcgctccctggaggagtggtaccgttccatggtgatcacccacgcctcttccactcgggcggcgagctccagcagcatcctgtacacctacgacaccgtcatgcacgggttcgcggtccagctcactggcgacgaggcccggctcatgtccagcgcgcccggcgtcatcggcgtgtacgaggacagggtgctctaccctcaaaccacgaggtcgccggggttcatgggtctcgaacccggcaacggcgcctggaagcaggccgacttcggtgacggcgtcatcatcggcttcgtcgacaccggcatatggcccgagagcgcgagcttcgacgacagcgggctcggccccgtccggtcgagctggcggggcaagtgcgtcgacgcccacgacttcaacgctagcttgtgcaacaacaagctggtcggagccaaggccttcatcactcctgctgcggacgccgtggaagagaggaagagccgtggcgtctcctccccgagggacaaggaaggacacggcacgcacgtggcctcgacggccgccggtgctgaggtccggaacgccagcctctacatgttctcccgggggaccgcgcggggaatggcacccaaggcgaggatcgccatgtacaaggcatgcggcgtgggaggctactgcaggaatgcggacatcgtagcggcggtggacgctgcggtgaaggacggcgttgacatcatttccatgtccgtcggaggagctcgtcccacagccttccacgacgacgtcgtcgcgatcgccctcttcggtgcggagcgcaaaggcgtcttcgtcgtcctctctgctggcaacaacggcccgcaggcaactacggtgatcaactcggcgccgtggatgaccaccgtaggcgccgccaccgtggaccggcagtacccggcgcagctcacgctcgggaacggcgtcgtgctcgccggtcagtccctttataccatgcatgccaagggcacacacatgatccagttagtgtccacggacgtcttcaataggtggcacagctggacgcccgacacggtcatgggaaaaatcatggtgtgcatgcacgaagcaagcgacgtggatggcatcatcttgcagaatgctggtggagcagggatagttgatgtggatcctcaggagtggtctcgagatggttccgtggcatatgccttcactcttccgggtctcacgcttagctacaccgctggcgagaagctcagggcgtacatggcatcggtgccctatccggtggcgtccttcagcttcgcctgtgagacggtcattggccgcaacaaccgggcgccggtggtggcgggattctcgtcgcggggccccaaccttgtcgcactagagctcctcaagcccgacgtcgtcgcgccgggagtgaacattcttgcggcctggtcgggcgacgcatctgtctcgggatattccgacgacggcaggagagccgactacaacatcatctccggaacgtccatgtcgtgcccccacgtcgctggcatcgcggcgctgatcaagaagaagcacccaagctggacgcctgccatggtacggtcggcgctgatgacgacggcccgtacggtcgacaaccgaggcggatatatcctcgacaacggtcatagcgtcatcgtgggccgcagaatcgacaacttcagggtcgcgacgccgctggtggccggggccgggcacgtccagccggacctcgcgctggacccgggcctcgtctacgacgccggcgagcacgactacgtccacttcctgtgcgccctgaactacaccgctgagcagatgcggcggttcgttccggacttcgtcaactgcacaggaacgctcgccggcggccccgccagcctcaactacccgtcgttcgtcgtggccttcgagaactgcaccgacgtacgcacgctgacgcggacgctgaccaaagtgtccgaggaggcggagacgtacagtgtcaccgtcgtggcgccggagcacgtgaaggtgaccgtcacgccgacgaccttggagttcaaggagcagatggagacgaggagctactcggtggagttcagaaatgaagccggagggaacccggaggcaggcgggtgggacttcgggcagatcagctgggagaacgggaagcataaagtcaggagcccggtggcgttccactggaagaactgacgacttattacttaagtattgcacagaaataagctatatcttgagctatcatggttaaaggacttatttcagatg

SEQ ID NO: 144684 - DNA, 763 bp, Zea Mays
gcgtctgcctggtccaggtaacattttccagtcactgaccaggcaaacaggcccctggtcatctccggtttcctcgtttcctttcctcttcgtcccagtgacgtcagtacgtcacccatcggcacccgcgccgctgacccccgccaccgtgtcacgatcccgtccccgctcgcacgcctagcgcgatggcgcacccgatgtacggctccggaccgctccgatccaggaacgcggcgagctcggacgaaatccagctgcggatcgacccggtgcacggggacctcgacgaggagatcgacgggctgcactccagggtccgcatgctcaaaggggtggcccaggagataaattctgaagccaagttccagaatgattttcttcatgaactgcaaatgacccttgcaaaagctcaggctggagtgaagaacaacatgcggagattgaacaagagcatcatccagcagggctcaaaccatgttctctatgttgtcctctttgcactgttttgcttctttattgtctacctcttgtcaaagttctctagaagatagttccgtctttggtgggcaaatctaggataccatgacttgtatgtagtctaaagaaagaaaaaaactattgtacttctgcctggccttgtatcctcagtcttttcgtcgaaaatcgaatcaaactagaaatacccttcaaagatttatgctaacgtcatccactgatccctatgattggaactgttgggattgaattttttctaccgagacgc

SEQ ID NO: 144685 - DNA, 166 bp, Zea Mays
attttacaaaaaacgtatatacatatatacaatttatattcaatattaaaaacatttaagcatgatgttctactggttagacaacttcatccagtgtctcccgcctttcttccatcagggcatcggtttaaaccccacctcttgcaccgtttttttaacattttac

SEQ ID NO: 144686 - DNA, 1468 bp, Zea Mays
actacagcgccaccaggcagccacctccctcctctcagtcgcctccctcccgcctccactagtcgttgtagtcaacactgtgcagtacgccacccaccacctctccattaaagaaaaggggaggcaagtcggggcctcggggagaaggggctggctgagcatcagaccatgacgtccggggcggcggcggcgggaggtctggggcggacgccgacgtggaaggagcgggagaacaacaagcgccgggagcgccggcggagggccatcgccgccaagatcttcacgggcctccgcgccctcggcaactacaagctgcccaagcactgcgacaacaacgaggtgctcaaggcgctctgccgcgaggcggggtgggtcgtcgaggacgacggcaccacctaccggaagggttgcaggccgccgccggggatgctgagcccgtgctcgtcgtcgcagctgctgagcgcgccgtcctcgagcttcccgagcccggtgccgtcctaccacgccagcccggcgtcgtcgagcttcccgagcccgacgcgcctcgaccacagcagcggcggcagcagcacccacaaccccgccgcggcggccgcggcggccgccgcctccctgctcccgttcctccggggcctgccgaacctgccgccgctccgcgtgtccagcagcgcgcccgtcacgccgccgctctcctcgcccacggcggcggcggcgtcgcggccgcccaccaaggtccgcaggcccaactgggacgccgccgccgccgtcgtcgccgctgaccccttccggcaccccttgttcgcggtctccgcccccgccagccccacccgcgcgcgccggcgcgagcacccggacaccatcccggagtgcgacgagtccgacgtctgctccgcggtcgactccgcccggtggatcagcttccaggccaccacggcgcccgcgtcgcccacgtacaacctcgtccacccggcctccgactccatggagctggacgggacgacggcagccgtcgaggagttcgagttcgacaagggccgcgtcgtcacgccgtgggaaggcgagcggatccacgaggtcgccgccgaggagctcgagctcacgctcggcgtcggcgccaagtgaagcgattggcagcaagcaaagcttggatctttgagctcccgtactgcaatgccgcgattggcagataaaaaaaaatgtgtactactacgtagcgtcgtagccgcgtgaagaatcgtggatgcattcgtgctgagtttcgatcggaggcacattcggtgtagggcgtaggtgacgctgttgtttcattcatgaacagctgatcaggtgaaagaacaatcgttgttcgtccgtccgtccgcctgtattgcattgcattattgatcacagactgtatgctgactccattcggatgtagtactagctggatctttggcatctactcactgtttgttctgtaagtaaagaa

SEQ ID NO: 144687 - DNA, 1787 bp, Zea Mays
ggggtatggtcgtatggagagggaaggagaagaggaagcaagcccctgttcatcacatcacatgctgcgtcagacactggttcaacagaactgacccgagaacctgttcatatagatggaaagtgagacacggtggccgtagcgtcccacgctcgctcctttaaaaaggtgctcatgccgtcgtgccaacagcccaacaccaccacgcctagcaccaagcaccaccaccgcccgggcggccactccacgtctccacttgccgtgctgcaccgacgcggccagcgccaaagcttctcttcacctcaagaattcaagacaaggcagatcgcaacctctcgaggccacccccaatctccaacgttgccgtcccccgcactttacccccaagcccaacccaactcgccacccatggccatggcgtttcacttccacccgctggtcgcctcgcgcgtccacttctctccgctcccgttcgccgccgctacgggggcaccctccccctcttcctccgtcgccatcgcggcgcactaccaccaccacggccgccgccgcttctccgccatcgtggccacggccaccaccacggagttcaacttcaaggcatacatggaggagcgcgcggtcgcggtgaaccgggcgctggacgcggccatccccgccgggggcctccccgcggcgctgcacgacgcgatgcggtacgcgctgctggcgggcgggaagcgcgtgcgccccgcgctgtgcctggccgcgtgcgccgtggtgggcgggccggagtcctgggcgatgccggccgcggcggccgtcgagatggtgcacaccatgtcgctcgtccacgacgacctaccctgcatggacgacgacgacctccgccgcggcaagcccacctgccacgtcgtctacggcgagcccatcgcggtcctcgccggggacgcgctgctctcgctctccttccaccacatggccagcgtcggatcctaccctccggccgttgacccggagaagcaccccgcccgcgtcgtccgagccattggcgagctcgcgcgctgcatcggatcggagggactcgtcgccggccaggttgtggatcttgagatgacaggcacgtctcaaactgtgccccttgaactcctcgagtacatccacctccacaagactgctgcattgctcgaggcctcggtcgtgatcggggcgatcatcggaggcggcacggacgagcaaatcgaggcgctgcggaaatacgcgaggtcaatcgggctgctgttccaggtggtcgatgacatactcgacgtcaccaagtcgtcggaggagctaggcaagacggcggggaaggacctggcaagtgacaagacgacgtaccctaagctactggggctagccaagtcgcgggagtttgcagagaagttggtctctgacgcaacagagcagctcgcttgcttcgacgaggagaaggcagcacccctgttgcacttggccaactatatcgcccacaggcagaactgaagatttgtggtgatgcttattctgttcttgctcactgtcgatctgtaacattgtataaggcagttgatattggttctgagaaatatttccaaatcgtcatttggtgtatactagctgtagctctgtaccttgatgtaatgaggctgttatattttttttctccattgaagaatgcaaataaatatggaagaattgtacacatgccttattgtgacgtagacctttgatatgtttcaggaagcattggtgtactgtgaatatgtataatactacctcggttcataaat

SEQ ID NO: 144688 - DNA, 3605 bp, Zea Mays
cgtttccggcccccccagccccccacccagttcgaaagcctccctccctccccgttctcccttccttgcctaggcggcaacgcaacacccccccgtgctttattataacccagcggcccctcccgcatgaggcaaccgagacgggacgagtccagcagccggccaccagcccatccgaaccctgctgcccccctctccgggttcgcgtgaggctgtgtgctgctgggaggagggagggggaagcggcggcggggcgccatggaggccgagaagaaggcgccggcggtgtcagacgtgggcgcgtgggcgatgaacgtcgtcagctccgtcagcctcatcatggccaacaagcagctcatgtcctcctccggctacgccttcgccttcgccaccacgctgaccgggttccacttcacggtcacggcgctcgtcgggtggatctccaacgccaccggctactccgtctccaagcacgtcccgctctgggagctcgtctggttctctctcgtcgccaacacctccatcaccgggatgaacctcagcctcatgctcaactccgtcggcttctaccagatctccaaactgagcatgattccggtggtctgcctcatggaatgggtgctgaacagcaagcactacaccaccaaggtcatctcggcggtggttgtcgtggccgccggtgtcgggatttgcaccgtcacggatgtcgaggtcaatgccaaggggttcatctgcgcttgcgtggcagtgttctgcacgtcgcttcaacagattgtgagctcttctccttttttcaccagtcttcttgctatagcccctttttttggtattgtgtattccattatgatgatatggagaattctagttttgacagccataatgctattctgcaatttgcaacgagatttggttatgtgactctgaatttgagctgtcagccttatgtaaaccgatttggtcaataatgatgaaatattttgaaattgattagaggttgttcatcctattagatgccttcccttgtgctcctaagttgtgaaaaggggaggcaaaacatgccgttttgggtctgagattcccctcataagttgttctgttgaagatgcccatcactgcttagttttgttgcaaaaaccacccgctatgcacacattcagccgattatgccattgtagtgccatgacaggccaagctagccgagtgaagtttgttcaagtgcttggattagctttattatcatgttgcagtcctcttttttcccgcaaatagcaagcctcagtttgtcaacatttaagctctcatcaggattgttttggtcgaatccctgaaaagtgccgggattatactttagtgattacattgacagttcgtaattgataaaagcaggttgaataggttaagcatacctgggatagaaccaagtaggggagtgggtatgatgcaacaaaatggcttatgggaggaactcaaaatccagatgatatgggttggtttttgcaattttccccttcaaacaattgagctgttttgggcatcacttaattgatttatctgtagcttgtagcctaactggttataactactcagcaaggcactgttactggaagccaaactttgcaactcagccctgaaatacaataatgcaggtcaatggtaaaaaggtactaaaagatcatcagttgagacatatcatgatctgccaattcatatactacattataagctgcacattgacagttctcatagatactactatgcttcctcactttttgtgttttcttgtactgtacaaatgtatttgcttgtttcgttgtatccttcaagatcagactacctgcaattaatttgaagatttttttgttgttttacattcttctcgtttcatcttcatttctacttctactatctatataaggagatgctttactaacaacaatatcgtctttgaagtttgtgttttactaacaaaaatctgatttttgaagtttctggaaaatttctaaactttagtaatacttttaagttgtacatgaataatttaatatttttagtatcgaatactgaaaagaaagttactttctacaacaatacttgtctcacagttacgcttatgcaatctactaagttccactatactctgagggggtgagctgatgatgtgtttcctcttcccagacaattggttcctttcaaaagaagtacaacattgggtcatttgagctgctgagcaaaactgcaccaatccaggcaatttcactcattatactgggcccctttgtggactactatctaaatggacggtcattgttgaactaccctttttcgggaggggcaactgtaagttatcctagtcacaattctcggttcttgagagcattgctatctttatgactactacttgtcctgagttatctatcttctactttaagttcattggcagtattctcatctcttcagcctatatgcttaactctattattttttgccattctactatagtgaaaaacccagccagtggccccgcctgtagtaaattcttgttgctgggatcatataagacagcttattctgacatggaattgccagaacacttatcctttttccttttcctatatcatttgcttaatattcttaatgacaatttgcatattggttgacttgactatataggttttcttggttttgcaccttaatttcttgattgccaaatgtaagcaaaatgtttgtagcagttgattgcagctacaaatgaagttactcattatgctcccttttaaacgttttgcagttcttcatcttgctttcctgctccctggccgtcttctgcaacatgagccaatacctctgcatcggccggttctcagcgacctcgtttcaggtcctgggccacatgaagaccgtgtgtgtgctgatcctcggctggatcctgtttgactcggccctcaccgtgaagaacatcctcgggatgctgctcgccgtgatgggcatggtggtctacagctgggccatggaagcggagaagaaggtggcagcccctgtcccccggatcaagagcgaaatgctcgacggggaggacgtacccctcaaggccagggtgagcggcgtgcccgcggtcgacctcgaggacggcgagatgaagagctagctgccgccgccgccgctgattcgttcattcttcttgttcttttgtaactgtgcgcgcgcgatcgctcgatccaaagttgcttgtccgtcagctctcagctatcgacactacactgttaattttggccccttgttggggagagtccagttcctaggtgacgacgaccacccccagttcggcgtagatcaaacacacactagcagaatgcagatttttaggattttttcaggcggcggggtggatccattcattgtcatgttgacaagactcataatagaaatacaggtaacatatgtatctccgctccgtggtaggattgataaggaatcatttatccagccggcgatgtagtccttattttttatgtttcgctgtccggttctggttgctggggttctgcacaccgcccacgggcatcatcggtttcgtcggcctcttgcgtagttgtttttgcctgcca

SEQ ID NO: 144689 - DNA, 1696 bp, Zea Mays
cgtttccggcccccccagccccccacccagttcgaaagcctccctccctccccgttctcccttccttgcctaggcggcaacgcaacacccccccgtgctttattataacccagcggcccctcccgcatgaggcaaccgagacgggacgagtccagcagccggccaccagcccatccgaaccctgctgcccccctctccgggttcgcgtgaggctgtgtgctgctgggaggagggagggggaagcggcggcggggcgccatggaggccgagaagaaggcgccggcggtgtcagacgtgggcgcgtgggcgatgaacgtcgtcagctccgtcagcctcatcatggccaacaagcagctcatgtcctcctccggctacgccttcgccttcgccaccacgctgaccgggttccacttcacggtcacggcgctcgtcgggtggatctccaacgccaccggctactccgtctccaagcacgtcccgctctgggagctcgtctggttctctctcgtcgccaacacctccatcaccgggatgaacctcagcctcatgctcaactccgtcggcttctaccagatctccaaactgagcatgattccggtggtctgcctcatggaatgggtgctgaacagcaagcactacaccaccaaggtcatctcggcggtggttgtcgtggccgccggtgtcgggatttgcaccgtcacggatgtcgaggtcaatgccaaggggttcatctgcgcttgcgtggcagtgttctgcacgtcgcttcaacagattacaattggttcctttcaaaagaagtacaacattgggtcatttgagctgctgagcaaaactgcaccaatccaggcaatttcactcattatactgggcccctttgtggactactatctaaatggacggtcattgttgaactaccctttttcgggaggggcaactttcttcatcttgctttcctgctccctggccgtcttctgcaacatgagccaatacctctgcatcggccggttctcagcgacctcgtttcaggtcctgggccacatgaagaccgtgtgtgtgctgatcctcggctggatcctgtttgactcggccctcaccgtgaagaacatcctcgggatgctgctcgccgtgatgggcatggtggtctacagctgggccatggaagcggagaagaaggtggcagcccctgtcccccggatcaagagcgaaatgctcgacggggaggacgtacccctcaaggccagggtgagcggcgtgcccgcggtcgacctcgaggacggcgagatgaagagctagctgccgccgccgccgctgattcgttcattcttcttgttcttttgtaactgtgcgcgcgcgatcgctcgatccaaagttgcttgtccgtcagctctcagctatcgacactacactgttaattttggccccttgttggggagagtccagttcctaggtgacgacgaccacccccagttcggcgtagatcaaacacacactagcagaatgcagatttttaggattttttcaggcggcggggtggatccattcattgtcatgttgacaagactcataatagaaatacaggtaacatatgtatctccgctccgtggtaggattgataaggaatcatttatccagccggcgatgtagtccttattttttatgtttcgctgtccggttctggttgctggggttctgcaca

SEQ ID NO: 144690 - DNA, 814 bp, Zea Mays
cagttcgaaagcctccctccctccccgttctcccttccttgcctaggcggcaacgcaacacccccccgtgctttattataacccagcggcccctcccgcatgaggcaaccgagacgggacgagtccagcagccggccaccagcccatccgaaccctgctgcccccctctccgggttcgcgtgaggctgtgtgctgctgggaggagggagggggaagcggcggcggggcgccatggaggccgagaagaaggcgccggcggtgtcagacgtgggcgcgtgggcgatgaacgtcgtcagctccgtcagcctcatcatggccaacaagcagctcatgtcctcctccggctacgccttcgccttcgccaccacgctgaccgggttccacttcacggtcacggcgctcgtcgggtggatctccaacgccaccggctactccgtctccaagcacgtcccgctctgggagctcgtctggttctctctcgtcgccaacacctccatcaccgggatgaacctcagcctcatgctcaactccgtcggcttctaccagatctccaaactgagcatgattccggtggtctgcctcatggaatgggtgctgaacagcaagcactacaccaccaaggtcatctcggcggtggttgtcgtggccgccggtgtcgggatttgcaccgtcacggatgtcgaggtcaatgccaaggggttcatctgcgcttgcgtggcagtgttctgcacgtcgcttcaacagattcttgtagcctaactggttataactactcagcaaggcactgttactggaagccaaactttgcaactca

SEQ ID NO: 144691 - DNA, 948 bp, Zea Mays
cagttcgaaagcctccctccctccccgttctcccttccttgcctaggcggcaacgcaacacccccccgtgctttattataacccagcggcccctcccgcatgaggcaaccgagacgggacgagtccagcagccggccaccagcccatccgaaccctgctgcccccctctccgggttcgcgtgaggctgtgtgctgctgggaggagggagggggaagcggcggcggggcgccatggaggccgagaagaaggcgccggcggtgtcagacgtgggcgcgtgggcgatgaacgtcgtcagctccgtcagcctcatcatggccaacaagcagctcatgtcctcctccggctacgccttcgccttcgccaccacgctgaccgggttccacttcacggtcacggcgctcgtcgggtggatctccaacgccaccggctactccgtctccaagcacgtcccgctctgggagctcgtctggttctctctcgtcgccaacacctccatcaccgggatgaacctcagcctcatgctcaactccgtcggcttctaccagatctccaaactgagcatgattccggtggtctgcctcatggaatgggtgctgaacagcaagcactacaccaccaaggtcatctcggcggtggttgtcgtggccgccggtgtcgggatttgcaccgtcacggatgtcgaggtcaatgccaaggggttcatctgcgcttgcgtggcagtgttctgcacgtcgcttcaacagattgtgagctcttctccttttttcaccagtcttcttgctatagcccctttttttggtattgtgtattccattatgatgatatggagaattctagttttgacagccataatgctattctgcaatttgcaacgagatttggttatgtgactctgaatttgagctgtcagccttatgtaaaccgatttggtcaataatgatgaaata

SEQ ID NO: 144692 - DNA, 615 bp, Zea Mays
cgtttccggcccccccagccccccacccagttcgaaagcctccctccctccccgttctcccttccttgcctaggcggcaacgcaacacccccccgtgctttattataacccagcggcccctcccgcatgaggcaaccgagacgggacgagtccagcagccggccaccagcccatccgaaccctgctgcccccctctccgggttcgcgtgaggctgtgtgctgctgggaggagggagggggaagcggcggcggggcgccatggaggccgagaagaaggcgccggcggtgtcagacgtgggcgcgtgggcgatgaacgtcgtcagctccgtcagcctcatcatggccaacaagcagctcatgtcctcctccggctacgccttcgccttcggtaccccccttcctctcctctcctcgcctcgcctctcctccccgcggatctggaacccggatccgccggccgctagtgggggggattggtcgcggatctggcggaggcgtctgactgttcgttttcgggctgcctgtgttgtgaatgcgcgcagccaccacgctgaccgggttccacttcacggtcacggcgctcgtcgggtggatctccaacgccaccggctactc

SEQ ID NO: 144693 - DNA, 666 bp, Zea Mays
ttccaaccggggtgaatttaataagatagattgagttgcatagtcacctacatcaagctaacaaacagtccaccgcacacaccgcgccttgggtcagggtaacagcaacctgaacaagaaagacgcatcataaatatacgccacgcggtacatactataacccacacacaccatgtaaaggaaagttcatctacgattgcatggcgtcctctccatctgcttgccccggcacttcgttgaacatgtactggctctggtactccatcaggtactgcgtcgatcgcttcacgtccaggaacagctggtacacccggctaatgtcctccatctcgaccaccttccccttgcgcctctggcaggctagcgcggcagatgtgataaggttgatggcataccgcagagaggtctccacaccgatcttggtgagcagaaccttggcgtccgcggacatctccacgtcttcctcgtcgcaccggatatccaggatcttccggatctcatcctccgtgtagggatgcgtcgtgataatcagtagccggtcaaggaagtctggcgggatcccatgcggcgagcggtagtttgtcccgcggatagacgtgatccctcggttcgttgcgattactaagatcggcgccatgtcgttttccaacgcgcggttcaggaagg

SEQ ID NO: 144694 - DNA, 1657 bp, Zea Mays
ccccgcccccggccccgcccgccgtgcccacctcgcggtccggctggccttgcctcctcctcctcgcttctctcagcctcaggccaacacgcagcccagggccgccgtcgccacggaggtgaggtggaaggagcgtagggcctccgcgcttggctcgctgcagcgagccgcggtcaggcgcaactgcacacgggaggacgccggcgtggcgtgggaggaggagttcgagagcgtcgtcaccctcgcggcgatgtcggagcgagagggcgccgcgttccacccatgggagctcgccttctgcgtcatcagcatgagattatgcattgacggctggagagacaattgagataattcttccgttgtctatacctggtggtgcacctgaacgagcctcatcccttcatctcactctgagtatggttgaattaagagcttttcaagaaacatctgatgcatcacagcgatctgctgcaaccttgccattgtccccatcacctagtgattctcttcctggaggaaaatatgaggttttggttattaaagcagggttgaggaaggtaaaaattctcacagatctggtgtcgacacgaaggcctaagaagacttgccagggaggtggcgaagataagttctgtgttaacagtgatagtgttgaatatccatgcgatactgagtctcttgatgacgatctagatgacagagttgaggaagatgaatttggagattcaactatcaggaagtctttcagttatgggtatctgcaatctgtcaactatgttggtggcctagtttatgcccatgcaaagattgatggggagcatgaggactggatatattatagtaaccgaaaaactgatgtcggtttccatgtagagaaagtattgccatcaaccacagagaatggttgctaactgctaagcgcagtatacttccttggagaaagaggaaactgagtttacggtcgttgaaggctaaaggtgaacctctcttgaaaaaggcatatgggggaagagggaggtgatgatattgactaggatcgacgcttgctaacatcatctgatgaatctgtttcagagggatcaagaggatatggattagcaaatactatggtgtcagaatttggtgatgacaattttgtcattgaaaattgggagttgaaggagataattagttgtgatggtcgtatgaagctttcatcccagatgttctttgcatcaatagaccagagaagtgagcgagcagctggggagactgcatgtacatcacttgtagctattattgcagactggttccaagcaaatcagaatattatgcctatccagtcacagtttgacagccttatccgtgaaggatcactagagtggagaaacctttgtgagaacgagacatatagaaagcgttttcctgataagcactttgatcttgaaactgtccttcataccaaaattcacccgctgacagtttcccccagcaatcttttatttgatctgtcttattatgactatggatgagacttttgtgatataattgatgagactatggatttaaatattgttatgtgattatgtgtgagatgttttatgtgaaaatatgttgtgctatatagttgttgatatatttgttatgttgtggaatgtggtgtaaaataaaaataaac

SEQ ID NO: 144695 - DNA, 1658 bp, Zea Mays
ttctcttgtaaacttgtaggagaaataatccgctcacatttcatttcaattgaaatggaaaaaaacacgagttgattctgatgtcatatggtccatgatcaatcataggaactaaatctctgtatccatcttcctcttagtatggactaagtttaccttcctgacaataacatattaccttgtgatggtgagtattgaataacgacgtactaaatgaacaagataatttccttgtcaagtcaatcagaacattttgttttttattttagctttgaagatgtcatcccttggcaactttgtgtatatttcttttgagctgatttcatcttttcaagcaagtctcatcttccttctccatatttcttcggcataggatattaacaaaggcccaaagaacaaaccatcaattctgggaactgtttctctcaatctagcagattatgcattgacggctggagagacaattgagataattcttccgttgtctatacctggtggtgcacctgaacgagcctcatcccttcatctcactctgagtatggttgaattaagagcttttcaagaaacatctgatgcatcacagcgatctgctgcaaccttgccattgtccccatcacctagtgattctcttcctggaggaaaatatgaggttttggttattaaagcagggttgaggaaggtaaaaattctcacagatctggtgtcgacacgaaggcctaagaagacttgccagggaggtggcgaagataagttctgtgttaacagtgatagtgttgaatatccatgcgatactgagtctcttgatgacgatctagatgacagagttgaggaagatgaatttggagattcaactatcaggaagtctttcagttatgggtatctgcaatctgtcaactatgttggtggcctagtttatgcccatgcaaagattgatggggagcatgaggactggatatattatagtaaccgaaaaactgatgtcggtttccatgtagagaaagtattgccatcaaccacagagaatggttgctaactgctaagcgcagtatacttccttggagaaagaggaaactgagtttacggtcgttgaaggctaaaggtgaacctctcttgaaaaaggcatatgggggaagagggaggtgatgatattgactaggatcgacgcttgctaacatcatctgatgaatctgtttcagagggatcaagaggatatggattagcaaatactatggtgtcagaatttggtgatgacaattttgtcattgaaaattgggagttgaaggagataattagttgtgatggtcgtatgaagctttcatcccagatgttctttgcatcaatagaccagagaagtgagcgagcagctggggagactgcatgtacatcacttgtagctattattgcagactggttccaagcaaatcagaatattatgcctatccagtcacagtttgacagccttatccgtgaaggatcactagagtggagaaacctttgtgagaacgagacatatagaaagcgttttcctgataagcactttgatcttgaaactgtccttcataccaaaattcacccgctgacagtttcccccagcaatcttttatttgatctgtcttattatgactatggatgagacttttgtgatataattgatgaga

SEQ ID NO: 144696 - DNA, 110 bp, Zea Mays
cttaactctttacttgtatattgatgtcttcgttacatcagctttacgacactattaagcagcagacttcccacgtcacgtttagtttgattgaccggctctcgattttt

SEQ ID NO: 144697 - DNA, 1343 bp, Zea Mays
gcaacctgggcacctgccattggcggcctcggcgacttcatcaacaacttgcgggcaaaacaaagtgtgaaatacagtccacgaacttagagacatgatttaaaaaactttaagagccacgagctggccggcctgagcttgctggccgtcgctctccagctgcgccggaccagcgagcgaatcttcccacgttgcttcagcctagcttagctcatatggcaacaatggcagctagctagctagctgcctactgcacaagttcttcgcacgaccaccctcaacaagaccctctaataatgtgaagttagttggtgccggtggcggccagttcgagcttctgcttgtctttcgtggccccgtcctggggtttcagctcgtcgtcggtggcgccgaacagcttgctcatcgcctccagcgtccggccgcgggtctccgggaggaaggtgaagaagaacacccacgcgagcaccgcgacgccggcgtagaggaagaaggcgccgccgatggtgatggccttggacagcgagatgaaggtcatggagatcacgccgctggtcaggcggttggaggccacgcccagcgcgcagcccatcgcgcgcacatgcagcgggaatacctccgagctgtacacccacgtgatggggccgaggccgatggagaagaaggccacgtaggccatggtagacgcgatggccacgccgatggcccatgggatcttttcgtcctggtagtgcccgatgacggtgagcccggcggcgagcccgaccagcgagaagatcatgccgcccacgctgctcaggaggagcggccgccggccgactctatcgagcaggaacgtggccaccaggatgaagagcgtcttggtgacgcccaccgcgcaggtcgttcccaggagctggttgtcgctggtgatgccggcggccttgaacacgcgcgggctgtacagcaccacggcgtcgatgccggacgcctgctggaagaagtggatgccgatgcccgagaggaggatgcgacgcatggccggggtcggggacaggatgagctccttccacacccgcgcctcctcgctgtcccgcttctttggcacggccaccacgtcgccgtcgagctcctgcgggatgccggcggcggccttgatgtcagcgagcctctccgcggcctcctccggcgtgtcggaggtcttccccagcaccaccttggcgtccgccaggcggcccttcatgacgagccaccggggcgactcgggcatgccgagcaccatgagggcgagcaccacggacggggccgcgccgatgccgagcatcacgcgccagcccaggcggagcgggaggcgggagaaggcg

SEQ ID NO: 144698 - DNA, 1642 bp, Zea Mays
acgtgaagaaaaaaacccacccgaccgcggcgatgccggagtagagaaagaagctgccgccgatggtaatagccttggagagggacaggaaggtcatggagataacggcgctggttacgcggttgcacgccacgccgaccgcaaagcccagcgcgcgcagctgcagtgggaatatctccgagttgtacactcccgtgatgggcccgaggccgatagagaagaaggcgacgaaggccagggtggacgcgatgcacagagcgacgaccgacgggatcttggcgtccgggtgatgccccacgacggtgagcgccgtcccgaggctgatgagcgagatgaccattccacccgtgctggtcagtagcagaggccgacgccccacgcggtccaacaggaacgtggccaccaggatgaagagcgtcttggtgacgcccacggcgcaggtgacgcccaggagcttgttgtcgccggtgattcccgcgctcctgaacacgctagggctgtacagcacgacagaatcgcagccagaagcctgctggaagaagtgcaggccgacggccgatagcaatatgcgtcggatcgccggggtcggggacaagatgaggtccttccacacctgcatctcaccgctgtttcgctccttgggtacggtgaccacgtctccgtcgaggtccttcggaatccccgcggcaaccttgatgtcagccagccgctctgcggcctcctctggcgaggcggaggtcttctctagcaccgccctggcgtccgcgaggcggcccttcatgacaagccaccgaggcgactcgggcatgcagaaaaccaggagcgcgagcagggcggacggcgccgcgccgatgccgagcataacacgccagccgaggtggagcgggaggcccgcaaatgcgtagttcgacaggtagccgagcaggatgccgaggttgatgaagacttcagggaaggacgtgaggaagccgcgggacgccgccggcgagatctcggcggtgtacacgggcgcgatcatgcccccgtagcccacgccaactccggccacgaagcggcccaccatgagcatgccgtagttgacggagaagcccatgagcaacgcgcccacgaaaaagatgaccgcggcgaagacgacggtcaagcggcggccgatcctgtcggacgtccgcgcgccagcgaaggatccgatgagcgagtagagactgatgatgcctatcaggatctccagctgcacgtccgtgatcttcaggtccttcttgatgtaaatcgccgctccactcatcacaccaatgtctacagagttggtgaacagtacacagagtcacatacgaattcttggaaagagaaatgaaaggagatgtttcgacaacggaagaatggctaccgtagccaaggatgacgcaggccatggaggccatgatggcacagacggaagcatacttgacgttgctcttcttcccgggctccatggcctctgcgaggtcggcggaagccatcgttaacttaacggctacctctttgatctctgatcagagttcagagacaaggcgtggggtgttgtgatttgctcaaggagacgcatatatatagagtagacaaagagcaatgggctaacgcgtctgatacactgttttatttagcc

SEQ ID NO: 144699 - DNA, 2038 bp, Zea Mays
gaggcaggcaaaggcactgcacgccaccttatctctagccggagatcaaagaagtagccgttaacgatggcttccgacgagctcgcaaaggccgtcgagcccaggaagaagggcaacgtcaagtatgcctccatatgtgccatcctggcctccatggcctctgtcatccttggctatgacattggggtgatgagtggagcggccatgtacatcaagaaggacctgaatatcacggacgtgcagctggagatcctgatcgggatcctcagtctctactcgctgttcggatccttcgctggcgcgcggacgtccgacaggatcgggcgccgcttgaccgtcgtgttcgccgctgtcatcttcttcgtgggctcgttgctcatgggtttcgccgtcaactacggcatgctcatggcgggccgcttcgtggccggagtcggtgtgggctacgggggcatgatcgcgcccgtgtacacggccgagatctcgccggcggcgtcccgtggcttcctgaccaccttcccggaggtgttcatcaacatcggcatcctgcttggctacctgtccaacttcgcgttcgcgcgcctcccgctccacctcggctggcgcgtcatgctcgccattggcgcagttccgtccggcctgctcgcgctcctggtgttctgcatgcccgagtcgcctcggtggctggtcttgaagggccgcctcgcggacgccagggctgtgctagagaagacctctgccacgccagaggaggccgccgagcggctggccgacatcaaggccgcggcggggattccgaagggcctcgacggggacgtggtcaccgtacccaacaaggagcaaggcggcggtgagttgcaggtgtggaagcagctcatcctgtccccgaccccggcggtccgacgcatcctgctctcggccgtgggtctccacttcttccagcaggcttctggcagcgactccgtcgtccagtacagcgcccgcctgttcaagagcgcggggatcaccgacgacaacaagctcctgggcgtcacctgcgcggtgggcgtgaccaagacgttcttcatcctggtggccacgttcctgctggaccgcgcggggcgtcggcctctgctgctgatcagcacgggcgggatgatcgtctcgctcatctgcctcgggtcggggctcaccgtcgcggggcatcacccggacaccaaggtcgcgtgggccgtcgccctgtgcatcgcgtccaccctgtcctacatcgccttcttctccatcggcctcgggcccatcacgggcgtgtacacctcggaaatattcccgctgcaggtgcgcgcgctgggcttcgcggtgggtgtggcgagcaaccgcgtcaccagcgccgtcatctccatgaccttcctgtccctctccaaggccatcaccatcggcggcagcttcttcctctactccggcatcgccgcggtcgcttgggttttcttcttcacgtgcctcccggagacacgcggccggacgctggaggagatgggcaagctgttcggcatgccagacacgggcatggctgaagaagcagaagacgccgcagccaaggagaaggtggtggaactgcctagcagcaagtaggtggctatcccagagcacaggtcaagtgaagtagatggacaagatcattgtcttttcaactaattagatgggcaagaataactaagactgccctatgaggtgtcgtggttcaaccagagatcattctgctccttttcttttcccttcctttttcgagtaccattcccattcgtcgtggtcagtacgatgttgggtcgttgggagttagtggtgtcagagtccgcgtgtgctttgcaagccagggctgaacccacaatcatcagtaacaaaaattcttccgtttgctttgcaagccaggacttgtgcttccgtgttgtgttgtgtgtgttccaatttccaaatatcatgctcaagattccttctgcgattccccaattttacctagcaaaccctggattttactatctgtggcaggaacaaaagacaaaaa

SEQ ID NO: 144700 - DNA, 1229 bp, Zea Mays
acttcacacgtagcgcgcagccgcagagtcaccgtctcgcttcgcagtcctactcgcactgtcgcacacacccgtccccatcctcttccggtctcgccctcccctcacgccgctcgccgcgtccggccgcggcaacccgacctgcgtcaatcgccatgactacctcaaggcgtcttgccgataggaagatagcacgatttgagaagaatatcacaaagaggggctctgttcctgagacagtcaagaaggcaaatgattatcctgttggacctattcttcttgggttctttgtcttcgttgttgttggatcatctctctttcagatcatcaagacagcatcaaacgctggtttattctgaggacaattggtcacttacttttagtcactctaaagtcgaggaacagggttgacatatgcagtttgtcacttaaaaactatacaagtgtatggcgtagctggtactctacaatgtcgcctttctaatgctgtaccatggagagttttaagttataatgtatagtccatatatatatatatatgcaatggaagtgctaatttaagtcacttagctgacagggaatacgttcaatccataatacattacatatcgagtaaggtctagtttgagtattctagtattaacctcaattcacatgtattgaggtagtttgatgtgtaatttaaactaatttacacttcaacacatgtggaacatgtggattgaagtctaaagtactcaaacaaagactaaagttatttttatgctcaaattggtcttaccattggggtactgtactgtttgatctgcggactaacctggtaatcctccgcgaaattttatattgggtgtactatattttaaactgtagtattctaaaactgttgtaaaaaataccatgagtacgtcatgacattccaaaactgtggcgtggtatttcgaaactgtggttttgaaatattttactcccaaactttagtattgtctgcattctgaatttgtgtttgctattatttatatcgtagcttcaacctcgaagaacgttctgcctaacagcaacttacatcggacaccgcgtaagtacaattaatgtgggcttcgtgggccgctttgactttgcacatgctcgaaagcacattcattataaatacaaatacatgttcgtagttttacgatactatatttgaaattgtcgtgacagcattatagtttttatcagcaccaaaaata

SEQ ID NO: 144701 - DNA, 1805 bp, Zea Mays
acttcacacgtagcgcgcagccgcagagtcaccgtctcgcttcgcagtcctactcgcactgtcgcacacacccgtccccatcctcttccggtctcgccctcccctcacgccgctcgccgcgtccggccgcggcaacccgacctgcgtcaatcgccatggatactttccagaggtgatcgagagtactaattcgccatgctttagttatttgtttctgataagatggaacggccacaagttcatttttggcagcaccaatgaaaagcagcgggctcaatgttccgtttaaattatttctcataagagtttgcagtatatttcttataagactttgttaggctaactgctcacatggatgagatgcagttagggaactgaggacttcccctcctgccaaggcccaagtggagcattctcccactatctctgcaactatagcctgaggagattttcgacttcttgaagattatcacgtttctctgtttccaattctaagtttcggtagcatatcaattattttcttttagggctcgtttgttttccttcattttaatgaattggaatctaactaatggaatagactatttttttagaatgtgacattccactactttccaaagtttatatataagcctatctcaaattcatgaggtgagagatgaaaattgattctatagattaacataattacatgctacttctctaatgtacaacttatagcacactcttttatttgcttgtctatagcataagtgtagtgtataactatctctctcatgtgatttaggataatatacaaatatattacatatacaaatatattaacttaagtagtttgtgtctaaattatgattattagaatggaattcaaatccaatgaaacaaacgggccttagggaaatgggaattttattgccttaacaaagcaaatagaagaaacctctggttttcaaatgataggccagatctgagcaaatctgccaatggcactgtaggactttgtacatcaattatcctttcccgaagtatacagggtgtgtaacatatttgtttaagttactgttccatgtgtcatgttaatttgcatttcagttccttgcattgcactgaccaaacgcagtgtttctttgtatcatctctttggacatgttattgtcacatcatgtggaatgatttttttaacgattctgaacagactacctcaaggcgtcttgccgataggaagatagcacgatttgagaagaatatcacaaagaggggctctgttcctgagacagtcaagaaggcaaatgattatcctgttggacctattcttcttgggttctttgtcttcgttgttgttggatcatctctctttcagatcatcaagacagcatcaaacgctggtttattctgaggacaattggtcacttacttttagtcactctaaagtcgaggaacagggttgacatatgcagtttgtcacttaaaaactatacaagtgtatggcgtagctggtactctacaatgtcgcctttctaatgctgtaccatggagagttttaagttataatgtatagtccatatatatatatatatgcaatggaagtgctaatttaagtcacttagctgacagggaatacgttcaatccataatacattacatatcgagtaaggtctagtttgagtattctagtattaacctcaattcacatgtattgaggtagtttgatgtgtaatttaaactaatttacacttcaacacatgtggaacatgtggattgaagtctaaagtactcaaacaaagactaaagttatttttatgctc

SEQ ID NO: 144702 - DNA, 1157 bp, Zea Mays
acttcacacgtagcgcgcagccgcagagtcaccgtctcgcttcgcagtcctactcgcactgtcgcacacacccgtccccatcctcttccggtctcgccctcccctcacgccgctcgccgcgtccggccgcggcaacccgacctgcgtcaatcgccatgactacctcaaggcgtcttgccgataggaagatagcacgatttgagaagaatatcacaaagaggggctctgttcctgagacagtcaagaaggcaaatgattatcctgttggacctattcttcttgggttctttgtcttcgttgttgttggatcatgtaagtccttatgtttctgatgttttgtggttgatggtcttcctggacactctttcgcctttaacagttgaatgcatctgctgtctgccatcctaccaaatcagctcggaatcatcatcaatcctaagttcctaacacagtttcttgtcagttgttatttgtattacagtaacatgcttattattctgaagggtaatgctttatgtgccttggccagctaaattgtggtacatgactaatgagcagcagttctttgcaaagtaatcagcacttctgtgctttgaattttgaatttggaagtttggacttgttggacctaaaatgttctcttggtttactctaagatgtattggctaacaaccatagccattaactgtaccactctgataacgacttacagtggaatagagaagtacaaaaattgcagggcaagggttttataccgtagttatatacttgctcaatctaatatgaatatgatgcttccagagaattgtgagttttatgtagcctgatcattttttaccctagtgttagaaaaatgcttatgagctatttgaatttgcggtctgagttatttactctctccttcatgcagctctctttcagatcatcaagacagcatcaaacgctggtttattctgaggacaattggtcacttacttttagtcactctaaagtcgaggaacagggttgacatatgcagtttgtcacttaaaaactatacaagtgtatggcgtagctggtactctacaatgtcgcctttctaatgctgtaccatggagagttttaagttataatgtatagtccatatatatatatatatgcaatggaagtgctaattt

SEQ ID NO: 144703 - DNA, 375 bp, Zea Mays
atggcgcacgcgcacatgagccggcctaggggggcgcgacgagggctgctggtacaaataatggaggctggaagaaggaaaagaaaagagaatacagagagggcatgctcaccggaagaagaagaacgccagcagagaggtgtggacgtcgatgaacagcagcgatactccatggcgacgatagcgcaacagcccagacatcgaggggagggcgcgtgttgccctgcgcacgacgaggaggcacagttccgaccgtggcgaggcaaggtgcagcgagggcatggcgtggctggcaagttgtggggaggcggcgtgctgggcgaccaacgtggagacaacgataggagaagagacatgcagggtggaatggaatga

SEQ ID NO: 144704 - DNA, 1517 bp, Zea Mays
ggcataatgttgtcccagtggaagatgctcctaagtatatgactggtggttttgtattagagatgcctcctgctagcagtgcttctaacaagatttttattaccttcaactgtatacacatattcactcatacatctgtccagaaatacttcagccagtatggtactgttaatgaagtgataattccaataatgcaaaagaggcccgatttcggttttgtaagtttcctggactctgagtccgtaaaacagatcttatcagaaaggggccctcatttcatctgtggaaatgaagttcatgtcaaagcatacagggaaaagcatgaattggagtacatgatgttaactgagaaagatatccattgtaactgcggtgtacgcgatgtgtcagatgtgggcgatttgcaattttgccaccattggcagtggacttcgctaatttgctatcggacacacaaatcatagacacataccggacccacaaatcatagacacttgggggtggcgacattgcaaatatttcgtcagatgtagatgcagttggtgagcatcatacagtgactattggtgactttgggcttcagacgaccttggaatttgactactgagactctgagaggaagcttcgtccactaacaaacattgacaaaagactcaagtgcaagtgctctgatcagtgacttagaagacttcaaatacagttcatttttcagttaacaaaaggaggaagttagaactacgccgtataacaaatcaaaatacaatacaattcatttttttcagttaacaaaagaggacatgacagaacatgaacatttcatacgaaacctgtatgaccggcagatacatctaggtgtagttgaagtatgttagcaactcgtaatacacgacctccaaaccaatagctagaggaacactctgtatactattctggcaaatcagggtacaacagaatgtattagagatagaagaaccggtaacatgagaggaaaggagaggaggcagatgagagtaatggggaaatgtagtcttcagtttgtaaattgattctttgatgatcctccacagcttcaacatgtctccttttatagctgaatatgcctaattgccacctgtcaaagaccccacatgacagtatgctgacattccccaccgcttgaaatgcggcttgcccctaagccgctgatagtgtagacaagattggtggatcaacttcttcaagcgtgcaagtgtgcagagaattgtagcaagaatgtcgaacgttccatgagcttggagatagaatgggaacccttgatccgaacccctaagtagcagtaacttggacttcgcgacagcgtcatatcaacagcgtcaaaggcattgcagaggcattatggtcctttaatgtggtaacaagtggacatgtgcaattccaagcattggctctgaatattcctagcaacaagaaaaggtgcaatgcgtactgtaacgaagcacctgtggtactgtagctgcaatccactttgaacaggctgc

SEQ ID NO: 144705 - DNA, 2939 bp, Zea Mays
aagtcccaacgaaccttgcggccggggaatatcatttatcgcccgagtctgcaggggtggggacgtggtgtacatcattgctggtcatgccccaacaatcccccctgtgttcgttggtgtcgcgggtgttgttgttccgagatggaggaaaacgaggaaacaaaaaatggatatagaggagtgcaggacgaggttgcaggataaggtccgcctacttcatccaaagaatgccgaagggatcgttgactacatgattgcaaacacaccacttgagaatatcagatcatatttgttgactgccacagataatgtactaatgaacctatttgagggtgcaaaccgcctgcaaaatatcctgaatttgtccgaggaaaatgagcccctatttggtctattcaccccctttgatcagattggaccacagaagcagcaccagttttcttcaagaaaccattctcaggtccttcaggctccattgtaccccattggcccaagtggagcttttcagaatccatactcgaaactcactggcttcagggatcatttccagtctttgagcattctggatggtgacacgccgagtcactacaaatgtgctagtataaatgttggtggctatcccagtaatggcaaggtccaaacaaagacttgtcgtttttacttgtccattagaaagtgtaagtatggtgagaattgtcacttttcccttgtgtgcggttacccagagattaatgacatgaggcaagttgaccaccttggttcattgcaaatgttggagatggagatcgatctcctgttgctgcagccatcatcacaagtcccggtagatcatcttgaaaaaaaattccttgagatttatacaaagcttctggaaattgatggattccatacagaggaccagaggaataggaagactggttacggcctcacagatctgttcatgcaacttaacgccaccagagagactgagagacgaggacggtattatgttgtcctggtgaaagatgctcctaagtacgtcactcatggtttccaaccggcggtgcctcttgctggcagtgattttaacaagatttgtgttaccttcaaatctgaaagcatattcactcacacagatgttcagaactacttcagtcagtatggtactgttagtgaagagagattttcagaagagagacacatgcacggtcatgtgagttttgtggaccttgagactgcaaaacggatcatatcagaaagtggccctcatttcatctgtggaaatgaagttcgtgccaaagcgtacagggaaaaacatgaactgaacttcagacaaggacggcataatgttgtcccagtggaagatgctcctaagtatatgactggtggttttgtattagagatgcctcctgctagcagtgcttctaacaagatttttattaccttcaactgtatacacatattcactcatacatctgtccagaaatacttcaggtgtcccgtctaacttcagttcttggtgtatgtttacatgaagactcttacctgttatgtcattatgaagatgtaaataatatttttgtgatatttctaccagccagtatggtactgttaatgaagtgataattccaataatgcaaaagaggcccgatttcggttttgtaagtttcctggactctgagtccgtaaaacagatcttatcagaaaggggccctcatttcatctgtggaaatgaagttcatgtcaaagcatacagggaaaagcatgaattggagtacatgatgttaactgagaaagatatccattgtaactgcggtgtacgcgatgtgtcagatgtgggcgatttgcaattttgccaccattggcagtggacttcgctaatttgctatcggacacacaaatcatagacacataccggacccacaaatcatagacacttgggggtggcgacattgcaaatatttcgtcagatgtagatgcagttggtgagcatcatacagtgactattggtgactttgggcttcagacgaccttggaatttgactactgagactctgagaggaagcttcgtccactaacaaacattgacaaaagactcaagtgcaagtgctctgatcagtgacttagaagacttcaaatacagttcatttttcagttaacaaaaggaggaagttagaactacgccgtataacaaatcaaaatacaatacaattcatttttttcagttaacaaaagaggacatgacagaacatgaacatttcatacgaaacctgtatgaccggcagatacatctaggtgtagttgaagtatgttagcaactcgtaatacacgacctccaaaccaatagctagaggaacactctgtatactattctggcaaatcagggtacaacagaatgtattagagatagaagaaccggtaacatgagaggaaaggagaggaggcagatgagagtaatggggaaatgtagtcttcagtttgtaaattgattctttgatgatcctccacagcttcaacatgtctccttttatagctgaatatgcctaattgccacctgtcaaagaccccacatgacagtatgctgacattccccaccgcttgaaatgcggcttgcccctaagccgctgatagtgtagacaagattggtggatcaacttcttcaagcgtgcaagtgtgcagagaattgtagcaagaatgtcgaacgttccatgagcttggagatagaatgggaacccttgatccgaacccctaagtagcagtaacttggacttcgcgacagcgtcatatcaacagcgtcaaaggcattgcagaggcattatggtcctttaatgtggtaacaagtggacatgtgcaattccaagcattggctctgaatattcctagcaacaagaaaaggtgcaatgcgtactgtaacgaagcacctgtggtactgtagctgcaatccactttgaacaggctgc

SEQ ID NO: 144706 - DNA, 2069 bp, Zea Mays
cttcactcacctccccccgcggcccgcgccaatggccgattcgccaaaccctagctccggcgaccttcccgccggcgctgggtgctcgccggagaagccggtcctggcggatcgacgtgtgtctgcgctcgccggcgccggcgcgaggtacaaggccatgtcccccgcgcggctgccgatatcgcgggagccgtgcctcaccatccccaccgggtttagccccggagctctcctcgagtcccccgtcctcctcaacaacttcaaggctactgcagtcaacaatcaaaatcatcatgacattcctatgcaaaatcatggctcaaatcatgcctcaccatctagcaatttgatgactgaaaataaacctctatgctcacgggaatcgagtcacacagcaaatgtttcaagtgctccaaaccaacctgtttcaatagtttgtccatctgacaacatgcctgctgaagttggtacatcagagatgcacctgataaatagctctgaaaatgctgcccaggagacacaaactgaaaatgtagctgaaaaatcagcagaggatggctataattggcgcaaatatggacagaagcatgtcaagggaagtgaaaatcctagaagttattacaagtgcactcatcctaattgtgaagttaaaaagctattagagcgttcgcttgatggtcagattactgaagttgtttataaagggcatcataatcatcccaagccccaaccaaatagaaggttagctgctggtgcagttccttcaagccaggctgaagaaagatacgatggtgtggcacctattgaagacaaaccttcaaatatttattccaacctctgtaaccaagcacattcagctggcatggttgataatgttccgggtccagcaagtgatgatgatgttgatgctggaggtggaagaccctaccctggggatgactctaatgatgatgatgacttggactcaaaacgcaggaaaatggaatctgctggtatcgatgctgctttgatgggtaaaccaaatcgcgagccccgtgtcgttgtacaaactgttagtgaagttgatatcttggatgatgggtatcgctggcgcaaatatgggcagaaagtagtgaaaggaaaccctaacccacggagttactacaaatgcacacatacaggatgcccagtcaggaaacatgttgagagagcatcacatgacccgaagtcagtgatcacaacatatgaaggaaaacataaccatgaagtccctgcttccaggaatgcaagccatgagatgtctgcagctcccatgaagccggtggtgcatcctattaacagcagcatgccaggctttggtggcatgatgagagcatgcgatgccagggccttcaacaatcaatattctcaggcagccgaaagtgacaccatcagtcttgaccttggtgtaggtatcagccctaaccacagcgatgcaacaaaccagatgcagccctcagttccggaacctatgcagtatcagatgcgacacatggctcctgtgtacggtagcatgggacttccaggaatgcctgtgccagcaatacctggaaatgtagtagctagcagcatatacggctccagagaagaaaaaggaaacgaagggtttactttcaaagctgcacctttggaccgatcagctaacttatgttacagtagtgctggtaacttagtgatgggtccatgagtgcctcttctgatggctatacctccatgaatcacacctatcaccgtcgtcatgaagttctcttcggaagatgctctaccgtgtatcatcttcacataattggaggcggtcaaggtatacctgggagctgcagcgatggcacatgatgtcttttgctgtgtggatgaactcgctgtatgtgacgctgcagctaaacattcgttgtacagcaaaccagttatgattaattagattatgataatttggttatgtaaacttctttctggacagaaccgaagagccatctggtggcaaagctttgttatctcctgcatatgaacgatgccagtttgatattcatatgaaatgaaatatatcatttcac

SEQ ID NO: 144707 - DNA, 2237 bp, Zea Mays
cttcactcacctccccccgcggcccgcgccaatggccgattcgccaaaccctagctccggcgaccttcccgccggcgctgggtgctcgccggagaagccggtcctggcggatcgacgtgtgtctgcgctcgccggcgccggcgcgaggtacaaggccatgtcccccgcgcggctgccgatatcgcgggagccgtgcctcaccatccccaccgggtttagccccggagctctcctcgagtcccccgtcctcctcaacaacttcaaggttgaaccgtctcccacaaccggtactctgagcatggctgcaaacatgaacaagagcactcatccggacatactgccttcgcctagggataattcagctgatagtggccaagaagatggaggctctcgggagtttgaattcaagcctcatctcaattctcaatcgtcggctactgcagtcaacaatcaaaatcatcatgacattcctatgcaaaatcatggctcaaatcatgcctcaccatctagcaatttgatgactgaaaataaacctctatgctcacgggaatcgagtcacacagcaaatgtttcaagtgctccaaaccaacctgtttcaatagtttgtccatctgacaacatgcctgctgaagttggtacatcagagatgcacctgataaatagctctgaaaatgctgcccaggagacacaaactgaaaatgtagctgaaaaatcagcagaggatggctataattggcgcaaatatggacagaagcatgtcaagggaagtgaaaatcctagaagttattacaagtgcactcatcctaattgtgaagttaaaaagctattagagcgttcgcttgatggtcagattactgaagttgtttataaagggcatcataatcatcccaagccccaaccaaatagaaggttagctgctggtgcagttccttcaagccaggctgaagaaagatacgatggtgtggcacctattgaagacaaaccttcaaatatttattccaacctctgtaaccaagcacattcagctggcatggttgataatgttccgggtccagcaagtgatgatgatgttgatgctggaggtggaagaccctaccctggggatgactctaatgatgatgatgacttggactcaaaacgcaggaaaatggaatctgctggtatcgatgctgctttgatgggtaaaccaaatcgcgagccccgtgtcgttgtacaaactgttagtgaagttgatatcttggatgatgggtatcgctggcgcaaatatgggcagaaagtagtgaaaggaaaccctaacccacggagttactacaaatgcacacatacaggatgcccagtcaggaaacatgttgagagagcatcacatgacccgaagtcagtgatcacaacatatgaaggaaaacataaccatgaagtccctgcttccaggaatgcaagccatgagatgtctgcagctcccatgaagccggtggtgcatcctattaacagcagcatgccaggctttggtggcatgatgagagcatgcgatgccagggccttcaacaatcaatattctcaggcagccgaaagtgacaccatcagtcttgaccttggtgtaggtatcagccctaaccacagcgatgcaacaaaccagatgcagccctcagttccggaacctatgcagtatcagatgcgacacatggctcctgtgtacggtagcatgggacttccaggaatgcctgtgccagcaatacctggaaatgtagtagctagcagcatatacggctccagagaagaaaaaggaaacgaagggtttactttcaaagctgcacctttggaccgatcagctaacttatgttacagtagtgctggtaacttagtgatgggtccatgagtgcctcttctgatggctatacctccatgaatcacacctatcaccgtcgtcatgaagttctcttcggaagatgctctaccgtgtatcatcttcacataattggaggcggtcaaggtatacctgggagctgcagcgatggcacatgatgtcttttgctgtgtggatgaactcgctgtatgtgacgctgcagctaaacattcgttgtacagcaaaccagttatgattaattagattatgataatttggttatgtaaacttctttctggacagaaccgaagagccatctggtggcaaagctttgttatctcctgcatatgaacgatgccagtttgatattcatatgaaatgaaatatatcatttcac

SEQ ID NO: 144708 - DNA, 464 bp, Zea Mays
tttgccaaccaacctctgtttgaaagaatcagcacgcaaagtcaaatacagcgcttcatctggcgcaaagccaacaacaattattggtacaggtacagtgaaaactagccaatcgccggggagacgtaaaaataaacaataatctatacacacttgcaggcagtcgctcgccggccaggaatccacttctaataaaacacgtctaacacgcgccggaatcccggtactgatgaaaggcagaacgctgggagggacggtcaggtcagtccagccggagcccggcgaggtcgtcgacgtagctcctggggcgcggcacgggcgcggcggcgacgacgctggaggcgtcggcgagcgccgcggcgtcgtcgtcgtcgtccccgccacggacgccgttgaagaaggggtcctgcaggaggtcagcggccgagggccggttccggggctggccgatgcagcgctcgatg

SEQ ID NO: 144709 - DNA, 109 bp, Zea Mays
tgcaaaaagaggaaaggagagatggagcaccggttttatactaaatacatatgtattcaaatacggtatgaactacaagatgaaggaagagatcggcaagaaacaaacg

SEQ ID NO: 144710 - DNA, 970 bp, Zea Mays
ggaacaatgattgctagggatgtttatgaaggaacaaggatggctacagcggaagatcttcctggcattagaaaaattattcggccgctggaggattctggtgttttggtgcggagaacagatgcacagcttcttgaagcgctagagtcattctatgttgttgaaagagatggttcaatcattgcttgtgctgctctatttccattccctgaggaacaatctggtgaagttgctgcaattgctgtatctgaagaatgccgaggaagaggtcagggggacaagttacttgattacgtggaaaagatggcattatccctgggtctcaagaaattattcttgcttactacacgaactgcagattggtttgtgcgacgtggcttttcagagtgctcaattggatctatccctgagcagaggagaaaacgtatcaacttgtcccgtggatccaagtattacataaagcagctgtagccaaagcctgctgggattatcgccaacaattttgtcatcaggtgactcagcagcatgcacagagtttggttccacacttccacttaattaagatggtaccagccaagattacaccaatttcgcggttgcccaaaggcatataattgcacaaagaaacaaaacaccattttactgtcactgtgtttgaaagatggttgtctttgtttaagtatgtgacagaagtttgttttgccaatagaatcaaggcagagaagaaatagctgattgaattatatgtagaccctatttaacaagcaataccaaagatgaagtgctcgtacagtatcatctctggttggtgcctcattgtgtgcatcatagatgattgaacttgccttttccactcatagctgattggccttatcttttctacttttgttgagagaaaaaaaagagctagtgaaacaattggttctcttgtatcagatgtcaaagtatccttgaatgaaaacaaaaaata

SEQ ID NO: 144711 - DNA, 933 bp, Zea Mays
acgaaacctgtgtgtgaatgtgtgatgagggcaaaaagcaagtaacccatctatctagggttggaagcttgtacatggccacctcggtggttgtggcacgcctcgcgggcgaggcctcgcagcccaaggtcctaccttctgcgaatggagtctcatccgagagctattggcgggtagctgctacgcgccgttggcagggccgcggtgtccggtgctgcgcggccggtttccgcggtgggggcgccgacgccgacgccgtgatcgccagcgaggactttgtggggttctttcgggaggcgtggccgtacatccggggccaccgtgggagcaccttcgtggtggtcatctccagcgaggtcgtgtgcgggccgcacttctaccgcgttctgcaggacatatcacttctccatggtctggggattaaatttgttcttgttccaggaacacatattcaaattgataagctgttgtcagaaagagggaagaaggccaagtatgttggtcagtacagaattactgatgaagatgcaagaaaggctgcaatggatgcagctggtagaatacgattgacaatagaagctaaactttctcctggtcctccaatgttaaatcttcgtaggcatggtgttattggacgctggcatggtcttgtggatagcattgcaagtggcaatttccttggtgctaagagaagaggggtggttaatggtattgactacggattcaccggggaagttacgaaaatagacgtttcacggataagagaaaggcttgatagtgatagcatagttgttatcagcaacatgggcttcagttcatcgggagatgtgttaaattgcaacacctacgaggttgctactgcatgtgctttagccttggaggcagataaacttatctgcgttgtagatggtcaggtatttgatgatcatggac

SEQ ID NO: 144712 - DNA, 1899 bp, Zea Mays
ttatcacccagccagaccaggcctgcaagagatccattgttgcaagggaagcccaacctaaggcctaacccgcacagggcatagtacccatcaattctttgctggcggcctaagaagaaggatgtgctccgccatactctcgatccaacaaccaggtcgttcagccgcagattagcaggccgcctgcgctcccaagctcctcctttcccctcagcctcccctcctctccggtgtacgtctccgtcgagatggccgccccgctccggcggagcctcccctcccttggccgcgcgcttctcacgccggcgccggcgcggatgctctccgcggaggcctctgatgccctcgttgagatcaagcccggggagatcgggatggtctccggcatccctgaggagcatctccgccgtaaggttctaatttattcaccagctaggactgcatcccagcaaggttcaggcaaagtcgggaggtggaaaattaattttttgtcaacccaaaagtgggagaacccgttgatgggatggacatctactggggatccatatgctaatgtcggtgaagcaggacttacgtttgacagtgcagagtcagcaaaggcgtttgccgaaaaacatggatggaattatgtggttcggaaacgccatgcacctcttctgaggcctaaggcctacgctgagaacttcaagtggagaggccctccaaaagcggagcaagcatgagctcgagacatctgtgatgctgacattggcacgatgtcgttttcctcctggctcgattttattttgctttcaaccgtgcccattgttaaagtacgaactagagaatgcatctatcaaacttgtaataagcatgatgtgcaatcaaacaaaatggtgtacttgtacttccaaaacgttaattcgtggatgacattgcttttgcaaccttgtgtgctttcttggctggtatctgaaaagatacatcatgccatttctgagttgaatgatgacgcctacttgcttttggccctatcacacattcacaaatgagctgccagtcgctacgcacgaccactcttgcatgtccgtgtgttcatgggcaacccacgcagttatgaaatgagagtcgggtaggtcagtttcctgaaagggcaggttatacttcctttgcattctccagtcaacatcttatatttactcaggatttcagaactgggtctacatcctattggacttcgcgaaagaggaagctgctcagttttaacatgcagctagcggcttagtctatgcacttggtttcattggatgcagctcaagcttccctaactctcactaatctcctcggagctgtgtccaacggatgcgtcggcgtcggcggcggcggtgcggaacctccaggcgaagaggtaatccctggactcgcactgcagccggctgacgtcgcagggtgcagcgatggaggtgaccttcccgtcgtcctcccactcgatctttgccgtgcatgtgaacgccccgtacgagtccggcagagaggaccggtccgctaccaccagcgccacctccccgctgatcctcctcgacgtggcagccacggcgtcgagccacgggcactcgggctgccccaccatctccttgtacgcgtcgttcacgagccggacgcggttgcctgagtcggagaccaccgccgggagcgcgtcgacctccagctccgcctccacctgaaccgccgtcttcgagacggcggcgtcggtgcaggccgcgtcgtcggtgcggtggatgcacccgacgtggatggcagaccacaccgggcgcaccgcccgcggcgatatgaccctgggctccagcagcttccgcagcaggtcgcgctccacggggacgtccctcccctcctctgtcgccgccgccgccgccgccttcg

SEQ ID NO: 144713 - DNA, 1461 bp, Zea Mays
gatctagtcatcggctccgacttctccggtcaagtcctccccctacctctaccagctgcccgtcgcacacaaaaccccaggctgcccgccgccgccgcgacccgccacgccgccatgtccgctgccgcggcgctccggccgatcgagccacttcccctcccgactgggctctccctctcgccgcgcctcaagcttctgctcaccttctttcgcgccgacctcaccgtccggcccctggacgagtggcagctcaagtccgccctcctcgcgtttctccgcgacccacctctccccctcccgctcctccccgactcagacctctccgtgagccgcctccctgacctccagaagcgccgtcgcgaggagcccgtagcctctggggtcctccacgtccgcgacctctccttcctccgcccccgcaagggagacggcgaggccgaggagatgaccggggagcaggagaagtacttcgagtggcggagcaccctggttcagaagctcgaaggcatcgagctcaacctcgagggagtgaagttccggatgaccgtcgagatcccatcgtctgacgacttcagaacgatgaagaagtcatgggaggatttctactcctccgagctactcaataccaggaatcctgtgagaaagatagctaaaaggccagacacaattgttgtccgtggcgtgccttccaggtggtttgcagagacaagagtatcatccaaaccttccacgctggtcacccacactgttttctcagcgcttggtaaaataaggaacctaaatatttccaatgatgatgagatagaagcaaaaggacatggagtcaacaaggggctcatatctggacttaattgcaaagttcaggtgcaatttgagagctacaatgacttccaggatgcaatgaaggcattatgtggacgttctttagagaaggaaggatcacggttgaaagtagactatgacgtgacctgggactgtgaaggtttctttcgcatttctcaatatgagccagttcgtaacaatttagaggagagggattcattagcatcggttaatagccagaggaaacatcacacttcgcgaattgaatcagattataggaagagattcagggagtgatgacataagcccatggtatgagcgagatttctttgtcctctggagagggaaaacagctgcattgtaccatcgtattgtttcgttctcagatttcaagttatatttctcatttgttcacaattaaccgaacagaaaaacccattctgatacttactaatttgtatttattattagtatcggttttatccttgatgatacccagaggccagagagcgccacaaaacgaactgtttttttattccaaagaattcttagatgttgagcattggcgcctggacccatgctcatcgatcagtcacagtggcgtctgagttcagacttcagagtaatgaatgatttcag

SEQ ID NO: 144714 - DNA, 825 bp, Zea Mays
cctgtctctcttcctcctcgctccctccgccttgtccctctgtaggtcacttggtcaggttctcatccccttcttgctccctctgcatcgtccctctgtaggtccacgcgctcctcccgtccacgcctgcgagtatctcttctcagagtctccagatcggggcctccggcagccgctcgcgccaacgctgtcgccgcttgtccgctccttcaccagacaccagcatgcgacacacttctagaatcaaacaggcggtgggaaagagaaaaaaagggaggacgatctcggctctctcacgccgttaaggtcaacaaaggtggggagggccgaccctccggcgttgtcgtcggcgcttgtgcctggtggcggcaggcacagccccgtggacggtaaggtcggcgcgtctgcgagggtattcgacggtggcttccaggaggcgtatgctttatctcattatctgctctgcttccaggcaagattaggagtgggggagtcttcaaccatccatcgcaccgcggtcaaagggtctgcgccgcctgcatccagcaggccatggcagtcagtcttcaaccagctactgcctactgtgccaccgtcaaaggggcccgcgccgcacacttccagcagaacaggcgagcaagcccgtcagtcttcaagggcctaaatcggattgaagtaatacatttggtttcttttttttggcctatcaaatatatatgctactgcatgtttaccatggccaactcgagagggaggcatgcaacttgctaccggaggggagctacgcaccactgcaccgtgcgcgcgtcctggggaggccctggc

SEQ ID NO: 144715 - DNA, 688 bp, Zea Mays
aggaggattcttgtggcctcggaaactgcttccgtttgccgatatgcttcacaggaacacctcccatcgcgacggagcccaaggggaagggccgtcttcgtcgtcgccgtccgcgagcaggtcttctgccgctgggccgacgtcgcctccgtcgtcggcgcgcgaggccccggaccctccgccgccggccaggggcttcgtcgtcggattgtaagccacaaaaccatcatggcggtatgttgctgctgcctagccgacgagacgatcatgtgatgtgacgagggtgtgaacatctccgtcagacacgcgttgtgtacataaaataacctctgacagtacagtatttaactgtggtctgtgctaggaataggctgcattttcccgtcgcggccgcgcgcgccccgtatatgtatgtgattcgaatgaacatgtacgttctgaaaataatgcaaagacggtgaatgatttgctagacctgaccatgcatgcgattcgtggtagcagccgtcgccaagccaacagcccaacaccagaggctgctagccgtacccgtacgcgacacgcggtggctgctggtatcgggctccgtacgtgtctatacgtcaaagacaagaggtttcactacaaagtgtcagattggcttgcagttgtatcagttgtttcatctggcgaaaaatcaaagcactag

SEQ ID NO: 144716 - DNA, 1324 bp, Zea Mays
ttcggcgtgatccttccttcctggccacccctgcgctccgggtccggggtataaattgcgctcctcccttgccacgccttccctacgacacccaacggcagctgcagcacagcagaggaaggcaggaaggaagaagatatcagaccagtgtgaagccaagccagcgcgtctctctctctctctctctggtcgcttggtcggtccatcggaggatcagctcggcggtggccatggcaatggcgcagcaagcgagcctcccctgctcgactgccaccacatggagagagctcacgaacacgagctggagggacgacgactacaggcggatggtgatggcgtacctgatcgaggcggtgtacctgctggagctggagcggcaggagcgccgggacgcggcggcggtggcgcagcagtggtggaagccgttccacttccgcctggcgcacgagctggtggacgaccgcgacggctccgtgttcggcgccgtcttcgagcgcgaccaccagggcggcaggccggggccggggccgagcccgagcggcgcgcccagcgccgtcatcgcgttccggggcacgctgctgcgcgcgcccaccatccgccgcgacgtagaggacgagctccgcctgctggcccgcaacagcctgcggggctccgccaggctggcgcgcgccgcgcaggcgctccgcgccaccatcgaccgcttcggctccgagaacgtctgcgtctgcggccactccctgggcgccggcttcgcgcgccaggtcgtccggacgctcgtggcctcctcctcctcctcgccgcggcaaccgcgccagcaggcggccgccttcgccgccgcgacgctcgagtcccacctcttcaacgcgccctacctgtcgctgcccatgggcgtcaggagcgtggtcaggacggcggactgcctgctcaaggcgctccgctccggcgtcgccaccgtcggcaagtggcacggcaaggcgctccggaacgtggcctacgccagctgcgtcctcggatacaccaggctcgagagcaccaggaagttgtgaggatcgatcggatcgaatgcctccgccacctcgcgtcctcctcgatgctgcctctggcttcaacggttgaaccgtcctgccagtgccagccaaactgtatctatgctcgatcaccttgtagtaggaagtactcggaaattaattcaattctagcaggagacgaataaagcatctgaccggaggatgcaaggccttgcgtgcatatgctttgctttgcttttgtacaatctttttaaatgtgaattacagtagctataagttgatctccgttcatcatg

SEQ ID NO: 144717 - DNA, 1425 bp, Zea Mays
atgggggacaacaggcggaggggcgaagtaggttgtcgggagtatgggagcagtagcgttgaaccttgtggtcagggcatgcagcttggcgaggccgatgggagcagaggcgggttcagcgatcgcaccagcagggaagggcgttggcggctgcgcctgcaggggggactagtgaagcttctgaagtcatgtgactatcgaactttggcaatcggtgatggtgggaatgatgtaaggatgatacaacaggctgacattggtgtaggaattagtggtagggaaggtcttcaagctgcaagggctgctgactatagcattggcaaattcaggttcctgaaaaggttgattcttgttcatgggcggtactcctacaatcgcactgccttcctgtcgcagtactctttctacaagtcattgttaatttgctttattcagatacttttttcttttctttcaggcattgctggaacaagcttattcaactcagttagtttgatggcttataatgttttctacacaagcattcctgttttaactactgtactggacaaggatttatctgaaaagacagtgatgcaaaatccagagatattactttactgccaagctggaaggcttctcaatccaagtacctttgctggttggtttggtcgatcattgtatcatgcaatcattattttcttaataaccatccatgcatatgctaatgagaaaagcgagatggaggagctctcaatggttgcactctcaggaagcatttggttgcaggcatttgttgtgacgttggagatgaattccttcacatctgtgcaacttctggccatatggggaaacctcattgccttctatgtcctcaatttctttatcagcagtatacccacttctggaatgtacactatcatgttcggcctttgcagacaaccgtcatactggataacgctggtgttgatcagtggagttggaatgggtcctgtattggctctgaaatatttcagatatacatacagacctagcgtgatcaacattcttcagaaggccgagcgttcacgggggccaatgtacaccctgctgaatctagagtctcagttgagatcagacaaagatagtatgatggtagccggttccacagcgccagccaagaataagagctctgtttacgagccgttgctttctgactccccgatggcatccaggagatctcttgcaccagcatcttcatttgatatcttccagccagcacattctagaacatctcacccaagaaacataaaagccaattaattttttggaacaacagttaactcgtaacagtatggcataccagaatgacaaaaaaaaaagatgtcagtcgaattagatatgttgcatatttctgttaatgatttagtagatattgcccaaaaagatataacgaaaagtcatact

SEQ ID NO: 144718 - DNA, 1320 bp, Zea Mays
caatggtatgttaagtatgatgacaatgaaccatggtatcagattctggttatacctctgcggtttgaactattgtgctctattatgattcccatttcgataaaggtttctttggactttgttaaaagtctctatgcaaagttcatagattgggatgatgatatttatgacctggaaaatgacacacctgcccgtgcagcaaacacagcaattagtgaggacttgggacaggttgaatatattttgacagataaaactgggacattgactgagaacaagatgatcttcagaaggtgctgtattgggggtaccttttatgggaatgaatctggagatgcgctcagagacgttgaattactgaacgctgtcgccaataattctcctaatgtcatcaagtttttgacagtcatgacactctgcaatacagtaattcctataaaaagtcctactggaccaattttgtataaagcccagtcccaggatgaggatgccctggttaatgcagctgcaaatttgcatatggttcttgtcagcaagaatggaagcaatgcagaaattcacttcaaccggcgagtgatgcaatatgagatacttgacattcttgagttcacatctgaccggaaaagaatgtctattgttattttggattgtcagagtggcaagttttttctcttgtccaaaggagctgatgaggcaatgcttccttgtgcttattctggacaaaagacaaagacatttgttgatgcagttgacaaatatgctcagctggggttgcgcacactctgcttgggatggcgtgagctggaaccagaggaatacactaaatggtctcaatcatttaaggaggccaatagctcattgaatgacagggagtggaaagttgctgaggtttgccaaaagctagaacatagcttggagattctaggtgtcagtgcaatagaagatcgcctccaggatggggtaccagaaactatcgaaatactgaggcagtcaggaatcaacttctggatgttaactggtgataaacaaagtactgccattcaaattgctcttttgtgcaacttgatttcttcagaacctaaaggacagctcttgcatatcaatgggaaaactcaagatgaagttgctagaagcttggaaagagttcttcttaccatgaggattacgtcatcagagcctaaggagctggcttttgtagtggatggctgggcactagagattattctatcacgctatactgaagcttttactgaactagcagttctttcaaaaactgcattatgctgccgtgttacaccttcacaaaaagcacaggtaatt

SEQ ID NO: 144719 - DNA, 1748 bp, Zea Mays
cgcaacgaatcccacaccacttcgctcgagtcagttcgtccggccgtcccattcgaaagcacgacgacaaaacatcgagcgtcaccgtcacgctcacgacttcgcccaaacttctccccggggagacgagaaaggaaccgaggatctcgttcccgcggcgcggcggacagaggcctcgccgtgggagatggccggccggcgcgagtcgcccctgatgcgcggtggcggggcggggccaccgctgtcccgagggtcccgcatcgccgcggcggtcgtggtcggcgtcgcgctcggctgcctgtgcgcgtttctctacccagacggcctcttccaccgtgcccctgactccgccatccattggccgcgacgggttgaatcagttgcctgtgatacatctcgggaagttgccaaactaaagtcacgtctggtattgttggaaaggaaaaatgctgaattcaagaagcagatcaatgaattgtcaatgaagcttcaattggccggacaagggaaaaatgaggccctgtataaggctggtccatttggtacagtgaaagctctgagaacaaatccaacagttactcctgatttatccatcaatcccagattggccaacatattggaacaggttgctgtgaagaaagaactgatagttgcattggcaaattctaatgtgaaagagatgcttgagatgtggttcactaacataaaacgagctgggatttcaaattatttagtagttgcattggatgacagcatagagaacttctgcaagtccaatgatgtcccagtttaccgacgcgatccagatgatggcatcgacaatattggcaagacaggcggaaaccacgctgtttctggactcaagttccgcatattgagggagtttttgcagctcggatacagtgttctgctctctgatattgatatcattttcttccaaaatccatttgattatctttacagagattctgacgtagaatcaatgagtgatggccacaacaacatgacagcttatggattcaacgatgtgttcgatgagccttcaatgggctgggcaagatatgcacatacaatgcgcatatgggtttataattctggattcttcttcataaggccgacgattccttcgattgagcttcttgacagggttgcttatcgcctttctcacgagcccaaatcatgggaccaagcagttttcaatgaggagctgttttttccctcacatcctggttatgaaggtcttcatgcatccaaaagaaccatggatatctacctcttcatgaacagtaaagttctcttcaagacggtgaggaaagatgcttatctgcggaatttgaagccggtggttgtgcatttgaactaccatccagataagtcggatcgcatgaaagcagtgattgaattttatgttaacgggaaacagaatgcccttgaacgcttccctgatggatcagaatgataggcaccagcttttgtagaacagaaaaatgataacctagtatctagtcgtcttgaaactgtgcgcgattatattgacttatacatgcattgtcattataaatcctgtgtgcttgagatgcaaacattcactgagcatgaaaactcgtataattctctacttagaccatgtttgtttcctcttagattatataagttagattgtgctggaaaggtagaaacgtaaaatacaactttgtgatcacaaataagctagaaaatatgctaccaatattagcttattttgactt

SEQ ID NO: 144720 - DNA, 267 bp, Zea Mays
gctccttattatcataaaaacatttatttatttcttgacccgttctttgctaatgaaagtttcttgtgtttttctttttagtctgtctgatcaactttcgctctcgcgttcatcttcacaagaaatggagcagcaacatttggacgatccacagcctgttgtagccctacctgcaagcctgtacctgtggtctctctagctattgtggtactttctcttatgcctgtggaagcccgcttcagtttcgtcgccagttcgacagttcag

SEQ ID NO: 144721 - DNA, 2222 bp, Zea Mays
acatgcacgcattcattgccgccccgatttaacacaccccttgtaacgccgtcgctgggccacaaccctactaccacaacaagcgcagccgcagcggcagcctccggaggaccggatacagtcatacagagagggggagggcatggagatgagcatagggtggcaggagctcggcgtcgtcgacaccatctacgaggacgaccacgaggaggaggaggaagacgacgacgaccacgagggacaagaggaggagcgcttcgactcgcccaccggcaccatgtcgtcctcgccgcccacctcgcgctcctcctccccggaggtggaggacgccgcggcggtggcggaggcgcacccgtcgtccctgccgccggcgctcaggcgcgcagtgcaagcgtggtgccgggagaacgggtcgcgcaagcccgacgtggtcgtccgcgtccaggagcatcgcctccctctgcacagggacgtgatcacgtcgcggagcagctacctgaggcgcctgctgtcagagtccagcgacgtcgcgatcacgctgccggcgggcctcacgttcgacgcgttcgtgcaggccatcgcgacctgctacgtcgtccccgacgatgcagcggcggcggcgctgtccccggcgagcctcgccgcggcgtgggtggcgggggcctggctggagctgggcgcgggaccgggcccggggcgggacccttgcgggctgacccacgccgcggaggactacttccatgaggtggccaccgaccacggccgagccgcgggcgtgctgcggtgctgcgcggcgttcctgggcggcgaggcggccgggcccgccgcggacctgctcgcccggtgcgtcgaggtgctcgcggcgtccgacagcgggagcgggaggtggctcgacgacgtggccgcgctccccgtggaggagtttctggtggtcgtggaggccatgcgcgcgcggtccgcgcacgaccacgacctcatgtacacagtcgtcgaccactacctggagaaccacaaggggaagcttacggaggaggacaaatcccggttgtgctacaacgtcaactgcaccaagctgtcgcagcacctcttcatgcacctggtccaaaaccctcgcctcccgctccgcttcgtcgtgcaggccatgctcgtggagcagctccactcccaccacaccatgctcctcacccatcaccaccaggccgctgcactggcgccgacgcgatcggcagcgccgctcctcaagccaaccccatcgggcgtcttcagtggcggcgtcgcgggggaggacgccagcatgacgctcggcgacatcctccagcgcgacgccgcgctgcaccagtccgcgcacatccgcgcatccatgcaggctaccagcctccgcatcgagaccctcgagcgcgagctggccggcctccgcacccgcttgcgccgctccgagcagcagcaggcggagaccgaggcagcggccgcggccgcgactggcgcctcctcgaccgactgcgcgcccggcaagtccgccagcttccggatcccgcgaagccggctctgggaaggcgaggagctcgcgcccgttggcctccggcgcgccgcagctagggacagcagtgcgaggggcttcaagtcacggttggtgcacggattcaagaacctgttcggcaggaggcaagcggccaccggcgcgccgtccgcgaccggcgaggactcgagtacccgatgcttcggtgataaaggcgcggccgctgctacgccggagctggagagcgacgacgatgaggtggtgagcatggaggagaggcggcggcctcaccggagaaaccactctcttgtgtgatcatcgtcgccgtccatgcgctagctggcaaacaatgtttgcaaaacatgcaagcagggatagggacacggagtcgtagagatccttggtatatggtgacatcactattttcacacggctatatatgagtatatgacatcgtcgttgattgttagtttatttctttggacggatgcaccgtgtaaggttcttggatgcaaggctcaagaactagccttgtgtttttaacatgtcgatgttttcacaatgacaggttagttgcttggaagggtctggggcaagatttcaagtagaagcccatttattttttatatatgaatgttatcgaaaaatattcatataaaaacatgtaaataaaaaaattaatatattatgtatgcataccttttgg

SEQ ID NO: 144722 - DNA, 1396 bp, Zea Mays
cctactaccacaacaagcgcagccgcagcggcagcctccggaggaccggatacagtcatacagagagggggagggcatggagatgagcatagggtggcaggagctcggcgtcgtcgacaccatctacgaggacgaccacgaggaggaggaggaagacgacgacgaccacgagggacaagaggaggagcgcttcgactcgcccaccggcaccatgtcgtcctcgccgcccacctcgcgctcctcctccccggaggtggaggacgccgcggcggtggcggaggcgcacccgtcgtccctgccgccggcgctcaggcgcgcagtgcaagcgtggtgccgggagaacgggtcgcgcaagcccgacgtggtcgtccgcgtccaggagcatcgcctccctctgcacagggacgtgatcacgtcgcggagcagctacctgaggcgcctgctgtcagagtccagcgacgtcgcgatcacgctgccggcgggcctcacgttcgacgcgttcgtgcaggccatcgcgacctgctacgtcgtccccgacgatgcagcggcggcggcgctgtccccggcgagcctcgccgcggcgtgggtggcgggggcctggctggagctgggcgcgggaccgggcccggggcgggacccttgcgggctgacccacgccgcggaggactacttccatgaggtggccaccgaccacggccgagccgcgggcgtgctgcggtgctgcgcggcgttcctgggcggcgaggcggccgggcccgccgcggacctgctcgcccggtgcgtcgaggtgctcgcggcgtccgacagcgggagcgggaggtggctcgacgacgtggccgcgctccccgtggaggagtttctggtggtcgtggaggccatgcgcgcgcggtccgcgcacgaccacgacctcatgtacacagtcgtcgaccactacctggagaaccacaaggggaagcttacggaggaggacaaatcccggttgtgctacaacgtcaactgcaccaagctgtcgcagcacctcttcatgcacctggtccaaaaccctcgcctcccgctccgcttcgtcgtgcaggccatgctcgtggagcagctccactcccaccacaccatgctcctcacccatcaccaccaggccgctgcactggcgccgacgcgatcggcagcgccgctcctcaagccaaccccatcgggcgtcttcagtggcggcgtcgcgggggaggacgccagcatgacgctcggcgacatcctccagcgcgacgccgcgctgcaccagtccgcgcacatccgcgcatccatgcaggctaccagcctccgcatcgagaccctcgagcgcgagctggccggcctccgcacccgcttgcgccgctccgagcagcagcaggcggagaccgaggca

SEQ ID NO: 144723 - DNA, 788 bp, Zea Mays
cacagcacacacgcacggcaccgagcggatcgcggtcggtcactgcatacagaagcactctttgtcttggcgagagcaacaaaggaaggcgacccaccaacgcgagaaggatagatggaaggtctgatcccgttcgtgatcgacgtgatcaggaggagccacgggcgcggcggcagcggctaccgctccgtctcgtcggacggcggcagctcccgcggcgggggcagcaggcgccacctcatcgactactcggagctgcccgacgccgcagccgcttccgcggcgagcgtcggcgccgccgactggccgccgtccggcacggtgcaccgccgcgcgcggtcggagtacgcggactcgacggtcgtcgggcgtcgcagcgaggagcacgccgggccggcttatcgccggaaatgagggggccggcgacgcgcatgcagcctctcaactttggaggatgcatcgtgagcgtcagccgttcagcatgtttgggttgctggttgattagttcgctacagatttgctctgtttgataattcgtttagcaccgcattgtaatctaaacaaaggtgcgaacttgtgagcgaaacaaggtgctcacggcttgcgttctcagaaggtcaaagtgaaagcatctctagttctctactactagtatacagtattcgttgttgttccgaatgggggataaaagagaaatgtatatacgctcctatatctcgccgttctttttgactatgtattcgaatcatgtctgaaatgaacagcagaagtgcagaacggtggaaaac

SEQ ID NO: 144724 - DNA, 262 bp, Zea Mays
gatgattccagatccataatgtcatggaatggtctactgaatgccacaatggtgatccacggtactacctcgtcagcacagataggtgacagcaaatgcgcgagggacagagaccaaatcacattggccctctatcagattatggatgagtttttttcagtagttttctaacgttgagttggactcatcttggagtatgtatgaataccatctccttcccaatttcatattctcttacagattagatgtcacggggaaattg

SEQ ID NO: 144725 - DNA, 2556 bp, Zea Mays
tcatttaggtgctccactgtgccagctcaacatgcgctctctggccggggcgtcgcgggcgtgcgcctgggtcgagtcgaagcacgcctccacgctatgccgcggccaccgccgccgcacggggtcacctccttgccccatcaatgctccgtcctcctgcggcgcctcgccgcgagccgttccctggcctcttcctcctacttcctccgcgcactccgctgcctccacgcgcgcctcctcacctccgcgctcctccatgcgccgccgcacccgcacctcaccctccgcctcatccacctctacactctctcccgagacctccccgccgccgcgaccctcttctgcgccgacccgtgccccgtttccgccacttccctcgtcgccgcgtacgccgccgcggaccgcctccccgccgccgtctccttcttcgacgccgtcccgccggcgcgccgcgacaccgttctccacaacgccgtgatctccgcctacgcccgcgcgtcccacgctgcgcccgcggttgccgtgttccgctccctgctcgcctccggctcccttcggcccgacgactactcattcaccgcgctactgagcgccgggggccacctgcccaacatttctgtccggcactgcgcgcagctacattgctcagtgctgaagtccggcgccgggggtgccttgtcggtgtgcaacgcgctcgttgccctgtacatgaaatgtgaatcgcccgaggcgacacgagatgcacggaaggtgctcgacgaaatgccgaataaggacgaccttacgtggactactatggtcgttggctatgttaggagaggcgacgttggtgctgcaagatcagttttcgaggaggttgatgggaagtttgatgttgtgtggaatgccatgatctcagggtatgttcattcaggaatggctgtggaggcgtttgagctgtttagaaggatggtattggaaagggtgcctcttgatgagttcacatttactagtgttctgagtgcttgtgcaaatgttggcctctttgcacatgggaaatctgtccatggtcagattattcggctgcagccaaattttgtacctgaggcagctctccctgttaacaacgccttggtgaccttctactcaaagtgtgggaatattgctgttgcaagaaggatatttgacaatatgacattgaaggatgtcgtttcttggaacaccattttgtcggggtatgttgagagcagctgtttggacaaggcggtcgaagtatttgaggagatgccatataaaaatgagttgtcatggatggtgatggtatcaggatatgtgcatggaggatttgctgaagatgcacttaaactgtttaacaagatgaggtctgagaatgtcaagccgtgtgactacacctatgctggtgctattgctgcatgtggcgagctcggggcactgaagcatggaaagcagcttcatgggcatattgtgcagcttggttttgaggggagcaattctgcaggaaacgcactcattaccatgtatgctagatgtggtgctgtgaaagaagctcatcttatgtttcttgtgatgcccaatattgactctgtttcgtggaatgctatgatttcagcccttgggcagcatggacatggaagagaggcactagaactctttgatcgcatggttgctgaaggcatatatcctgataggatctctttcctcacagtattgacagcttgcaatcactctggtctcgtagatgaaggctttcgatatttcgagtccatgaagagggactttggcattatacctggagaagatcactatacgcgactgattgatttgctcggtcgagctggacggattggagaagctagagacttgatcaagacgatgccttttgagcctaccccatccatttgggaggcaattctttctggttgccggactagtggagatatggaacttggtgctcatgctgctgaccagctctttaagatgacaccacagcatgatggtacatatatccttttgtctaacacttactcagctgcgggatgttgggtagatgctgccagagtaaggaagctaatgcgtgatcgaggggttaagaaggaacctgggtgcagctggatagaagctggaaacaaagttcatgtgtttctcgttggtgatacaaaacatccagaagcacatgaagtttacaaattccttgaaatggttggcgccaagatgagaaagcttggatatgttcctgatacaaaggttgtattgcatgacatggagcctcatcagaaggaacatatattatttgcgcatagtgagcgactggcggttggttttggactcctaaacttgcctcctggagctacggttacagttcttaagaacttgagaatatgtgatgattgtcatgctgcaataatgttcatgtcaaaggctgtcggaagagagattgttgttagagatgttagacggtttcaccatttcaaggatggagaatgttcgtgtggtaactattggtgaatacttttgtcatagcatatgttcttcaggtcctggcctgaacttcaattt

SEQ ID NO: 144726 - DNA, 555 bp, Zea Mays
atggagcctactggggtcgtcgctttgctgctccgacgcggcggggacgttctgtccgcggcgcggcacggcgcggaaacagagctaccgacaggtggggagctgtctaagcctgagatcctgtcttcgaccacggactcacgctttgcgaggcagctgggcatccctgccctcgggttttctccgatgaccagtacgccgatactgctacatgaccataacgagtttctggaagacagagtgttcctgaggggcatccaagtttttgaaacaaccctgaaagatcggttgactactattcagagccatcagaggcctcctcctcctcgtcctcgtcgtctgatgatgatgatacaccttcaactgcagcccgtagcactagatcaagtaatcctgtgttgtcctcatggtcctctgatgaaccttcttcggctgactgttgcctattttccgataccagtatgtgttggatcaacaggtctcgtacgccaaagcgccatagcttggctcttctcttgcgaggtctcaactgaagctgccaaaagagatacttaa

SEQ ID NO: 144727 - DNA, 344 bp, Zea Mays
agctggtgcagaaaggtccggcgacggatgtggccggacgtcccgtatccacagcgacgaacgcgtcgaacccgtggtggctgacgttcgagaaggccatcgcctccgcaggtggggagctgtctaagcctgagatcctgtcttcgaccacggactcacgctttgcgaggcagctgggcatccctgccctcgggttttctccgatgaccagtacgccgatactgctacatgaccataacgagtttctggaagacagagtgttcctgaggggcatccaagtgtacgaacatgtcatcagagcactaagctcgttccaaggctgattcgtaaacacaaaaaaaaga

SEQ ID NO: 144728 - DNA, 1917 bp, Zea Mays
atgccgcatctagcgctggttcgcataggagccttggtgcggcacagccgcagggattttttcccccaatctcgaatgcgcggctttgtgtttgtgtcccaggagcacatgaaaattattgaagacaacggtccaggtgcagccttctatgccagtgctaaggccatgaccaatggaaatcacactttctatgtgagcaaactgatacagagatacattatgaaatgttcttcatggaacattaatgatgaccaattgaagctggaggaaacagctcttacaaaatccatgtttgaaagtaccaaatgtttcttacttgactatggggctaaaatatatgtatgggttggccaggttgtctgcaaggattttccaagacctccactagaaagcacaataaactatttggaagctggacagctctcttcattttttagaaacagcgaacgccccagtaagccgttgcaggtcgtggttgctggtgcaggattggctggtctatcaacagcggagtatctggcagatgctggccataaacccatattgcttgaggcaagagatgttttgggtggaaaggtagctgcttggaaggatgaagatggagattggtacgagactgggcttcatatattttttggagcttatcccaacatacagaatctgtttggcgagcttaggattgaggatcgtttacagtggaaagaacactctatgatattcgccatgccaaacaagccaggagaattcagccggtttgatttcccagaaactttgccagcacctataaatgggatatgggccatattgagaaacaatgaaatgcttacttggccggagaaggtgaagtttgcaatcggacttctgccagcaatggttggtgctcaaacaatcgtattccttaatctagaagggcgtacctcgaataccaccagatgcctcaacctgggctcctacaactaccttggctttgctgcagcagatgaatactgcacaccacgtgttattgagtctctcaagaaatactcagcaagtacctgcagtgttcgtgtcgatggtggtacgaccaagtttcacaatgagctagaggagttgcctgcgcgttttgttggaaagcttgctgctatcctatttggcatgggttatgttacaaactctgccatcattccatgcctaattggaaagggtggactgataattagtgactctctgaatcataactcaattgtcaatggcgcaagaggatccggtgcaactgttagggttttccagcataactcccctgctcatttggaagaggtcctgagagagcagatagctagtggtcaaccacggacacacagaccatggaagaggatcattgtcattgttgagggtatctatagcatggaaggggagctgtgtaaactccctgagattatagttgtctccaagaaatacaaggcctacacatatctggatgaggcccatagcattggtgctgttgggcagtctggccgcggtgtttgtgagctccttggggttgacctagctgatgtagacataatgatgggtgcccaaaaacttgctcgcatccgcgagaatagtaatttcttcaggtcagagctcaagaagatgggttttgaggttcttggtgacaatgactctcctgtcatgcccataatgctctacaatccggctaagattcctgcattctctagggagtgccttagacaaaaggttgttgttgttactgttgcgtttcctgcgacacctcttcttcttgctagggcacgcatatgcatttctgcttcacatactagggaggacctgattaaagcccttgatgttatcagcagagttggcgaccttgtgggcatcaaatacttccctgcagaaccaccaaagattgctggagctgatcatgataagctggagtag

SEQ ID NO: 144729 - DNA, 1517 bp, Zea Mays
atggaaatcgacatgatggctcagtttcttggagcagatgatgaccactgcttcacctacgattacgagcatgacgtggatgagtccatggaagcgatagcagctctgctcttgcccacccttgacactgactccaactcctcctctagctgcttcaacgacgacgtccccccacaatgctggcctcagccaggccatagttctagcgttaccactttgctcggtccagccgagagctttgagttccccgtcatggacctgtcgttccccacgagcgacttcgatccacaatcacattgcgctaccccctaccttaccgaggacctgggctctctgcagcatggcaaacattcaccagtcatggaggaagaagcagccgacgttgaacctgctgctaagaagaggaaagctagtgctactgctactgctaccgccaagggatcaaagaaatccaggaaggcgagcaaaaaagattgtattgtcgatgacgacgatgtctatgttgacccgcaaagctccggtagctgcacctccgaggaggggaattttgaagggaatacgtattcaagcgcgaaaaagacctgcaccagggccagccgcggaggagcaactgatcctcagagtctctatgcaaggaagaggagagagaggatcaatgaaaggttgagaatcttgcagaacttggtccccaatggaacaaaggttgacattagtacgatgctcgaggaagcagcacagtatgtcaaatttttacagcttcagattaagctgttgagctctgacgacatgtggatgtatgcgccaatcgcgtacaatgggatcaacatcagcaatgttgatctgaacatccctgcactgcaaaaggcagtggggatacaccggagaccgtccatgagggcgtccagttgtgttgatggcgacctttcgatgccgcttcggtatgccacacgcatgtctagacgtgtcttggtgatggttgaagctgttacagtacatgtgactcagaagtattttgtgagtgcttccaaggataactcttggtgcttctatgatatttcaacaggatcttgcctgacacatgttggcgaggcttcaggacaagagggatatacatctgcgtctttccatccagatggtcttatccttggaacaggaactactgatgctgttgttaaaatttgggacgtgaaggctcagtcaaatgtcgcaaagtttgagggtcatgtcggaccagtcactgctatgtctttctctgaaaatggttacttcctagcgactgctgctcatgatggtgttaagctttgggatcttcgtaaattaagaaattttaggactttctcttcctatgatttggacacgccaaccaatactgtggaatttgattttagtggaaactatcttgccattggtctgatatgatgtatgctatttgtctcatatggaggaactctttatacttccagattgttttacacttggtgcaattatcaatggactctgtctgaaaggtgagactg

SEQ ID NO: 144730 - DNA, 2209 bp, Zea Mays
ccaaacacccccagagtgtatactagtctagcaccaaagcgaccgagccgcggatttcacccctgcctttccttcaccccgtgtccaggccctggtgcccgcgcgttcccgtgcggcaactggccgccgccgccgcactacgccaggtgcccaattcctcgtcgggtcctccgccggcgacgagcacccaccagaaaactggagtggactctacatgtcaagacagtatggcgccaggaagcaaggcggagaggaaagcagcactagacgctggcgcatggatgttcaatgtcgtcacatccgttggtatcatcatggtcaacaaagccttaatggcgacgcatggttttagtttcgctacaacgttgaccggacttcatttcgcgatgacgaccttgatgacattagtaatgaaatggctgggatatattcagccgtcctatctaccgttacctgaactagtaaaattcgccttttttgcgaacctgtctattgttgggatgaatgtaagcttgatgtggaactctgttggattctatcagatcgcaaagctgtgtatcattccagtcttatgcattctggaaatcatgttcgacaaagtccgttactctagagatacaaagctcagtatagtgcttgtccttgtaggtgttgctgtatgcacagtcactgatgttagtgtgaactctcaagggttactagctgcagtaatagctgtttggagcacagcactacagcagcattggagcctgtccatttgtggcctgaggtcctgagtttgaagtttgaaccaggcttcttgcaaaattatgcaagggtgggctttttagaaattcccttccccaggcctcaccttgtgtgggagctctcattgggcacactcccttttttcctgaactaagtaagcaaaataatccagtaccctgctgctgctttgagtacgacaactttggtaatagactaacagctcaacaaactttgaccttttggaccttgttaatctttacgtaactagtgttgggcctgttggccgtgccctcccccctgccatgatatccttattagggcatattatcactgtgttctatttggtttactcctctttgctgcagtatgttcaccaccttcaatggaagtactcgcttggctcattcaacctcttaggccatactgctccagcccaggcagcatcgttgttagtattgggtccttttgtggacttctggctgaccaacaaaagagtcgatgcttttaactacacatcaatagttacgttctttatcgtgttgtcgtgcataattgctgtcgggaccaacctaagccagttcatatgcatcggaagattcacggccgtctcgttccaagtcctaggtcacatgaagacggttctcgtgttgaccctggggttctttttctttgggaaagagggtctcaatttccacgtcgcccttggcatgtttctggcagtgatcggcatgatctggtatgggaatgcctcctcgaaacctggaggcaaagagcgccaggtttactccacaccgagtgagaaaactcagaagcatggggtgctgtcatcccaatccgagcttgatcagaaggtctgaaatgagcaggggcggacccacaggggggtccgggtgggccctggcacaccctaagccaggcccactggggaccccacccgccgagcgccgaagccccaaggttgtttcaacttctccaatccttcagcacgactgcggctgttcgcctgttcctagcggctggagacatggctggctggctttctggcgaaggcgaagtggcgagtgcgcgctgtgcggctgtccgccagacgccagtcgccgactcagccagacgccgccactgcggcacatggatccagatcttagcagtagtagcttccctttccgctgctgattacctgctagctccaaaagcgattttctctcaagctaaattcagtggttctatctctaccactcaaattatataatatgtcaatgttttttctctcatggccttgttgcccctcttccttgaacccaacaaaaaaccaacgaattttattgattgtttagaattttattgatctgcctgctggttttagaatttaggatttttgtcttattgattgttgatttactaccattatttttgtagtgactaaaatatgaagaagcagggaaatattgtctctatttttcgt

SEQ ID NO: 144731 - DNA, 1921 bp, Zea Mays
ccaaacacccccagagtgtatactagtctagcaccaaagcgaccgagccgcggatttcacccctgcctttccttcaccccgtgtccaggccctggtgcccgcgcgttcccgtgcggcaactggccgccgccgccgcactacgccaggtgcccaattcctcgtcgggtcctccgccggcgacgagcacccaccagaaaactggagtggactctacatgtcaagacagtatggcgccaggaagcaaggcggagaggaaagcagcactagacgctggcgcatggatgttcaatgtcgtcacatccgttggtatcatcatggtcaacaaagccttaatggcgacgcatggttttagtttcgctacaacgttgaccggacttcatttcgcgatgacgaccttgatgacattagtaatgaaatggctgggatatattcagccgtcctatctaccgttacctgaactagtaaaattcgccttttttgcgaacctgtctattgttgggatgaatgtaagcttgatgtggaactctgttggattctatcaggtgcagacagaaacttcgatattctataagtatatcggaattaaacttgtatactgacgctgtctgtcttgcctttttcagatcgcaaagctgtgtatcattccagtcttatgcattctggaaatcatgttcgacaaagtccgttactctagagatacaaagctcagtatagtgcttgtccttgtaggtgttgctgtatgcacagtcactgatgttagtgtgaactctcaagggttactagctgcagtaatagctgtttggagcacagcactacagcagcattatgttcaccaccttcaatggaagtactcgcttggctcattcaacctcttaggccatactgctccagcccaggcagcatcgttgttagtattgggtccttttgtggacttctggctgaccaacaaaagagtcgatgcttttaactacacatcaatagttacgttctttatcgtgttgtcgtgcataattgctgtcgggaccaacctaagccagttcatatgcatcggaagattcacggccgtctcgttccaagtcctaggtcacatgaagacggttctcgtgttgaccctggggttctttttctttgggaaagagggtctcaatttccacgtcgcccttggcatgtttctggcagtgatcggcatgatctggtatgggaatgcctcctcgaaacctggaggcaaagagcgccaggtttactccacaccgagtgagaaaactcagaagcatggggtgctgtcatcccaatccgagcttgatcagaaggtctgaaatgagcaggggcggacccacaggggggtccgggtgggccctggcacaccctaagccaggcccactggggaccccacccgccgagcgccgaagccccaaggttgtttcaacttctccaatccttcagcacgactgcggctgttcgcctgttcctagcggctggagacatggctggctggctttctggcgaaggcgaagtggcgagtgcgcgctgtgcggctgtccgccagacgccagtcgccgactcagccagacgccgccactgcggcacatggatccagatcttagcagtagtagcttccctttccgctgctgattacctgctagctccaaaagcgattttctctcaagctaaattcagtggttctatctctaccactcaaattatataatatgtcaatgttttttctctcatggccttgttgcccctcttccttgaacccaacaaaaaaccaacgaattttattgattgtttagaattttattgatctgcctgctggttttagaatttaggatttttgtcttattgattgttgatttactaccattatttttgtagtgactaaaatatgaagaagcagggaaatattgtctctatttttcgt

SEQ ID NO: 144732 - DNA, 1840 bp, Zea Mays
ccaaacacccccagagtgtatactagtctagcaccaaagcgaccgagccgcggatttcacccctgcctttccttcaccccgtgtccaggccctggtgcccgcgcgttcccgtgcggcaactggccgccgccgccgcactacgccaggtgcccaattcctcgtcgggtcctccgccggcgacgagcacccaccagaaaactggagtggactctacatgtcaagacagtatggcgccaggaagcaaggcggagaggaaagcagcactagacgctggcgcatggatgttcaatgtcgtcacatccgttggtatcatcatggtcaacaaagccttaatggcgacgcatggttttagtttcgctacaacgttgaccggacttcatttcgcgatgacgaccttgatgacattagtaatgaaatggctgggatatattcagccgtcctatctaccgttacctgaactagtaaaattcgccttttttgcgaacctgtctattgttgggatgaatgtaagcttgatgtggaactctgttggattctatcagatcgcaaagctgtgtatcattccagtcttatgcattctggaaatcatgttcgacaaagtccgttactctagagatacaaagctcagtatagtgcttgtccttgtaggtgttgctgtatgcacagtcactgatgttagtgtgaactctcaagggttactagctgcagtaatagctgtttggagcacagcactacagcagcattatgttcaccaccttcaatggaagtactcgcttggctcattcaacctcttaggccatactgctccagcccaggcagcatcgttgttagtattgggtccttttgtggacttctggctgaccaacaaaagagtcgatgcttttaactacacatcaatagttacgttctttatcgtgttgtcgtgcataattgctgtcgggaccaacctaagccagttcatatgcatcggaagattcacggccgtctcgttccaagtcctaggtcacatgaagacggttctcgtgttgaccctggggttctttttctttgggaaagagggtctcaatttccacgtcgcccttggcatgtttctggcagtgatcggcatgatctggtatgggaatgcctcctcgaaacctggaggcaaagagcgccaggtttactccacaccgagtgagaaaactcagaagcatggggtgctgtcatcccaatccgagcttgatcagaaggtctgaaatgagcaggggcggacccacaggggggtccgggtgggccctggcacaccctaagccaggcccactggggaccccacccgccgagcgccgaagccccaaggttgtttcaacttctccaatccttcagcacgactgcggctgttcgcctgttcctagcggctggagacatggctggctggctttctggcgaaggcgaagtggcgagtgcgcgctgtgcggctgtccgccagacgccagtcgccgactcagccagacgccgccactgcggcacatggatccagatcttagcagtagtagcttccctttccgctgctgattacctgctagctccaaaagcgattttctctcaagctaaattcagtggttctatctctaccactcaaattatataatatgtcaatgttttttctctcatggccttgttgcccctcttccttgaacccaacaaaaaaccaacgaattttattgattgtttagaattttattgatctgcctgctggttttagaatttaggatttttgtcttattgattgttgatttactaccattatttttgtagtgactaaaatatgaagaagcagggaaatattgtctctatttttcgt

SEQ ID NO: 144733 - DNA, 2024 bp, Zea Mays
ccaaacacccccagagtgtatactagtctagcaccaaagcgaccgagccgcggatttcacccctgcctttccttcaccccgtgtccaggccctggtgcccgcgcgttcccgtgcggcaactggccgccgccgccgcactacgccaggtgcccaattcctcgtcgggtcctccgccggcgacgagcacccaccaggtacgcccttctcttcccatcctaccgtgcgagacccagcacacgaaccctaacttaagctatttggctatttgcatccggatctgatctaattaccagtgtgtgcatgcctactaacttggattttttctggggaaaaatattcttgggacacccctgtcctttactgggctctcccctacagaaaactggagtggactctacatgtcaagacagtatggcgccaggaagcaaggcggagaggaaagcagcactagacgctggcgcatggatgttcaatgtcgtcacatccgttggtatcatcatggtcaacaaagccttaatggcgacgcatggttttagtttcgctacaacgttgaccggacttcatttcgcgatgacgaccttgatgacattagtaatgaaatggctgggatatattcagccgtcctatctaccgttacctgaactagtaaaattcgccttttttgcgaacctgtctattgttgggatgaatgtaagcttgatgtggaactctgttggattctatcagatcgcaaagctgtgtatcattccagtcttatgcattctggaaatcatgttcgacaaagtccgttactctagagatacaaagctcagtatagtgcttgtccttgtaggtgttgctgtatgcacagtcactgatgttagtgtgaactctcaagggttactagctgcagtaatagctgtttggagcacagcactacagcagcattatgttcaccaccttcaatggaagtactcgcttggctcattcaacctcttaggccatactgctccagcccaggcagcatcgttgttagtattgggtccttttgtggacttctggctgaccaacaaaagagtcgatgcttttaactacacatcaatagttacgttctttatcgtgttgtcgtgcataattgctgtcgggaccaacctaagccagttcatatgcatcggaagattcacggccgtctcgttccaagtcctaggtcacatgaagacggttctcgtgttgaccctggggttctttttctttgggaaagagggtctcaatttccacgtcgcccttggcatgtttctggcagtgatcggcatgatctggtatgggaatgcctcctcgaaacctggaggcaaagagcgccaggtttactccacaccgagtgagaaaactcagaagcatggggtgctgtcatcccaatccgagcttgatcagaaggtctgaaatgagcaggggcggacccacaggggggtccgggtgggccctggcacaccctaagccaggcccactggggaccccacccgccgagcgccgaagccccaaggttgtttcaacttctccaatccttcagcacgactgcggctgttcgcctgttcctagcggctggagacatggctggctggctttctggcgaaggcgaagtggcgagtgcgcgctgtgcggctgtccgccagacgccagtcgccgactcagccagacgccgccactgcggcacatggatccagatcttagcagtagtagcttccctttccgctgctgattacctgctagctccaaaagcgattttctctcaagctaaattcagtggttctatctctaccactcaaattatataatatgtcaatgttttttctctcatggccttgttgcccctcttccttgaacccaacaaaaaaccaacgaattttattgattgtttagaattttattgatctgcctgctggttttagaatttaggatttttgtcttattgattgttgatttactaccattatttttgtagtgactaaaatatgaagaagcagggaaatattgtctctatttttcgt

SEQ ID NO: 144734 - DNA, 301 bp, Zea Mays
agcagtgaagcagacccaattgagagtatcaaggttgtgtctgaattcctagatgtgtttccaaaggatttaccgggtatgccaccagagcggaaggttgaattcgctatagatagagatggcaatgggtacccgaaacccgactacccgacgggttttacccgttatgaaggcgggtatgggatgatttctctacccgcgggtatgttaatgggcaagatcctctacccgttgggtagacgggtacgggtacgggttggtactacccatacccatgtgcccatgggtagaatatacccgc

SEQ ID NO: 144735 - DNA, 858 bp, Zea Mays
atggcagagacagagtgccgcgcctcggactcggccgacggccccacctcggactcggccgacgacttcgagttctgcatcctgtcgtccggcggcatcgtcccggccggagagagcgcggggacggacatgtgcgtggccgacgaggtcttctgccagggcaagctcctcccgctccgcgcctcctcggccgcggccgccgacggcgccacgctgccgaggtcggagtcagtggcctccaccgtgggcctggtgtcgcggtccggcagccgcagcgcgagctcgagctcgagcggcagcagcagcgggtgcgtgagccggagccagtcgtccaagagcgcctcctccgaccacggcgccggggcgcctccgccgcggcgctcgctgtcgagcagcctgttctacgcgcacccgagcccgtcgccgcggctgcgctcggcgcgcccgcgccgcagcaccgggtccgcgcagcccgccgcggcggcgtggggcctgtttcgcttccgcctcggcgtcgtcggcgccccggacgtgtaccctccgccgccgccgcgccccgcggccgatgccaaggtcaccgccgcagcgaggggcggaggcagcaggagcgcgcggttcgaacaggtggccgccgccgtcgacaggaagcttggattggcggcgctgttcggggacaggctcggctgcaagtgctcgcccgacgccatcatcgagcccgtgcgcgcgcgcgtgccggaggcggcgaggcggagcagggagaagcacggcgccaagtgcggccgcggccggggcgtcgcccgccgtagcaggatcctggactggctcgaagagctctccattgtgaaggataagaagtag

SEQ ID NO: 144736 - DNA, 856 bp, Zea Mays
gccagaagcacccggagcagcgcacagcaacagagcacacgccgcacaccgccgcctccgcagcagcagcaatggcgcgcgccggcgctctctgcctggtgctgctctgcctcgtggccgcgcactcagccgcagcgcagaagtccacgacagccccggccgccgcgccggccgccgccaccaccccgccggcgaccccgaccaagaagtcgcccgcgcccgccgccgcgccgcccaccaccccagccaccctggccccggccgccgcgccgcccaccacgccggccacccccgcgcccgtcgctgcggcgcccactaccccggccaccctggcacccgccgcggcgccgcccaagtccgcccccaaggcgtcccctcccgccccgtcgcccaaggccaaggccaccccgccggtggccgagctgccgcccgccgcctcgcctcccgcccccgcccccgcctccccgcggcgctggaaggaccgtggcaggcggaatcatggcggccgcgctgggcctcgtggccctgctcgcctaggcacgggcgcgcgagcgggtggcgcctgcacggccgcaccgcaccgccgggacggacgacgacaggaattggtgacgcggatgcagccggtgcgcggcgccgcgctgtattcttggccggtgtagttgtagtgcagtaccactcacgttcggtggcgggtggtacgtgcggtgcggacgtaccaccgtcgcctcggattctttctcttctatcttccttttgttttttttttgctgtactatattgcgaccccattgagatgctttattttatatatttattttattgccgttgtttgtatggtccccatccatgcatg

SEQ ID NO: 144737 - DNA, 1147 bp, Zea Mays
tctttccctgccggctgccgctgctatttatcccccctctctctgcacccgtctctgccactccaaccgccgagccagaagcacccggagcagcgcacagcaacagagcacacgccgcacaccgccgcctccgcagcagcagcaatggcgcgcgccggcgctctctgcctggtgctgctctgcctcgtggccgcgcactcagccgcagcgcagaagtccacgacagccccggccgccgcgccggccgccgccaccaccccgccggcgaccccgaccaagaagtcgcccgcgcccgccgccgcgccgcccaccaccccagccaccctggccccggccgccgcgccgcccaccacgccggccacccccgcgcccgtcgctgcggcgcccactaccccggccaccctggcacccgccgcggcgccgcccaagtccgcccccaaggcgtcccctcccgccccgtcgcccaaggccaaggccaccccgccggtggccgagctgccgcccgccgcctcgcctcccgcccccgcccccgcctccccgcccaccaagcccgccgaggtccccgcgcccgcgccgtccaagaagaagaagaagccctcctcgtcgtccaagaacaagaagaagaagtccaaggccccggctccagcccccgtcgccgaggcacccaccagcaccaagcgctccaaggctaaggcaccttcggccagcgaagccgacgcacccggcccggtcggcgatggcgtggccgccgacaccgcgggcgctggaaggaccgtggcaggcggaatcatggcggccgcgctgggcctcgtggccctgctcgcctaggcacgggcgcgcgagcgggtggcgcctgcacggccgcaccgcaccgccgggacggacgacgacaggaattggtgacgcggatgcagccggtgcgcggcgccgcgctgtattcttggccggtgtagttgtagtgcagtaccactcacgttcggtggcgggtggtacgtgcggtgcggacgtaccaccgtcgcctcggattctttctcttctatcttccttttgttttttttttgctgtactatattgcgaccccattgagatgctttattttatatatttattttattgccgttgtttgtatggtccccatccatgcatg

SEQ ID NO: 144738 - DNA, 1620 bp, Zea Mays
tctttccctgccggctgccgctgctatttatcccccctctctctgcacccgtctctgccactccaaccgccgagccagaagcacccggagcagcgcacagcaacagagcacacgccgcacaccgccgcctccgcagcagcagcaatggcgcgcgccggcgctctctgcctggtgctgctctgcctcgtggccgcgcactcagccgcagcgcagaagtccacgacagccccggccgccgcgccggccgccgccaccaccccgccggcgaccccgaccaagaagtcgcccgcgcccgccgccgcgccgcccaccaccccagccaccctggccccggccgccgcgccgcccaccacgccggccacccccgcgcccgtcgctgcggcgcccactaccccggccaccctggcacccgccgcggcgccgcccaagtccgcccccaaggcgtcccctcccgccccgtcgcccaaggccaaggccaccccgccggtggccgagctgccgcccgccgcctcgcctcccgcccccgcccccgcctccccgcccaccaagcccgccgaggtccccgcgcccgcgccgtccaagaagaagaagaagccctcctcgtcgtccaagaacaagaagaagaagtccaaggccccggctccagcccccgtcgccgaggcacccaccagcaccaagcgctccaaggctaaggcaccttcggccagcgaagccgacgcacccggcccggtcggcgatggcgtggccgccgacaccgcggtacgtgtgtctgctctgctttttccaatttccatttgaaccccattgcgattgcgtgcctgaattacgattccgtgctctcatcaaacaacaactgctctgctcgttttgctttgatgttattaaagagcgaaaattaacaccgttgttagaatggcaccaaaccacatctgaccgtgtcgttattctacggccacactcatcaattctttatctgagaatgaatgcgcactcacgctcaatcgatttgacaattgattgtcttgtattgtatggtacgagcagcagcacctaacctgtgagccgtgaccataatgagcgcgtgaattatatagtagatccgatctgcaccgacatgtcgggcagggacgcatgtgctttcagcgcatcgcgtcacggacattgttaaataatgcggcattttgaggctgtcaccatttaagtattacttgcatcatgtactgtacagcacgtacgtcgtacagtgcaaaatgggattcacacagtgcgtgtatgtgtactacagtacagagccagtaaataaccctgcattctggaagcatctttgcacactaaaataacagccagcactaatcaaccaccatcaaactattattaggtacttgtaggcccccatgtgcacagaaagtcaggcaacaatgcaagtagtatacaaatagtagtactactactactgctacaggcgcaagggtagaactgttgtagtatacagctgtactgttagctacagacactgctacagggcagggtcacgtgacatggctacgttgctgactgacgagggcctcgttcttggtgaacctgcagggcgctggaaggaccgtggcaggcggaatcatg

SEQ ID NO: 144739 - DNA, 2147 bp, Zea Mays
ctctctcctccctccgctttatcttttcctcggccctgcctgctttttaccacttccgcccgtcgccttccacctctcgcactccctccctccctccctccctttcactccaactcaagcgcagcgctgtaccgtacgtccccgactccccccttcttctactccactcctcgccgcactctccatgcccaccccgtgaaggcgaagcgaaaaccaaaaacccctttgctacatcactttactagctagtcgtccccgttctctccttggtcgcggcgccggacgagggcgacggcattgtgagatatggataaggagaggaagcagggtttcttcgccgcgctcaaggaggaggtcgtacgggggctgtcgccgtcgaggtccagggggaagtccccggcgccgccgcggagcgcgtcgccggcgaggatgctgatcccgcgccggcgcaaggcgcccgcggctccgccgccgccgccgccggagaaggtgctggagcagtacctgggcgagcagctcgtcgcgcgctccggcagcctgcgccccggcggggaggctctggcgccgctcatcgaggggcccgacgccgagcgcctcgccgccggcgaccccgacgcggaggactccggccgccgcgaggggttcgggcactgggtccgcggccacctgacgcgcacgccgtccatggcctcctctgccgcaggtggtggtggtggtcccggcgggtcgagcggctcgttccggcggtccgacctccgcctgctcctcggcgtcatgggcgcgccgctcgcgcccatcccgtccaagacggcggagccgctgcccctcctctccatcaagggaacccccattgagtcgtcgtccgcgcagtacatcctgcatcagtacacggcggcgtccggtggctacaagctgctgcagtcggtgcggaacgcgtacgccatgggcaaggtgcggatggtggcgtccgagttcgagacggcgacgcgcgtcgtcaagaaccgcgggcccagcggccgcggcgccgccgccgtggagcagggcggcttcgtgctgtggcagatggctcccgacatgtggtacgtagagctcgccgtcggcggcagcaaggtccatgccggctccaatggccgcctcgtctggcgccacaccccctggctcggcgcccacgccgccaaggggcccgtccgccccctacgccgcgtcctccagggcctcgatccgctgaccacggccgggctgttcgcggaggcgcgatgcgtgggcgagaagaaggtgaacggcgaggactgcttcatcctgaagctgagcgccgacccgcagacgctgaagctgcgcagcgagggcccggcggagatcatccggcacgtgctgttcggctacttcagccagcgcacggggctgatggtgcagatggaggactcgcacctgacccgcatccagccgcacgccggcggggacgccgtgtactgggagacgaccatcagctcggccctggaggactaccgcgccgtggagggcgtcatggtcgcgcacgcgggccgctccgcggtgaccctgttccggttcggcgaggccgccatgagccacaccaagacgcgcatggaggaggcctggagcatcgaggaggtggcgttcaacgttccgggactgtccgtggactgcttcatcccgccggccgacatccggtcgggctccgtcggcgaggcctgcgagctgccgtcccagccccacggcgagcgcgccaggaccggcgccgccgtgcacccctcgcgcgtggccgccgtggagcgcgccggcactgctgccggcgccggaggccgcggcgagaagaaggtcatgtggagagtgcaagtgtgaggaatggcgcgcatcagttagcagcggcagagagaattgaaaccgattgcccgattctaatctgtgtccatactagtagagttttaattttcgccagcccaagtcatgaatcaaatcaatcgaatgaatcacactaactcgctgcatctagtagtagagagctggtttaggtttctgtaaataggagcataaacgatcccaggccgtccgtcactgatgtcttgtcctcgggctggatgaatcttttatcctctgaaaacgcagaagttttagcaccatcctccgtt

SEQ ID NO: 144740 - DNA, 1149 bp, Zea Mays
ctctctcctccctccgctttatcttttcctcggccctgcctgctttttaccacttccgcccgtcgccttccacctctcgcactccctccctccctccctccctttcactccaactcaagcgcagcgctgtaccgtacgtccccgactccccccttcttctactccactcctcgccgcactctccatgcccaccccgtgaaggcgaagcgaaaaccaaaaacccctttgctacatcactttactagctagtcgtccccgttctctccttggtcgcggcgccggacgagggcgacggcattgtgagatatggataaggagaggaagcagggtttcttcgccgcgctcaaggaggaggtcgtacgggggctgtcgccgtcgaggtccagggggaagtccccggcgccgccgcggagcgcgtcgccggcgaggatgctgatcccgcgccggcgcaaggcgcccgcggctccgccgccgccgccgccggagaaggtgctggagcagtacctgggcgagcagctcgtcgcgcgctccggcagcctgcgccccggcggggaggctctggcgccgctcatcgaggggcccgacgccgagcgcctcgccgccggcgaccccgacgcggaggactccggccgccgcgaggggttcgggcactgggtccgcggccacctgacgcgcacgccgtccatggcctcctctgccgcaggtggtggtggtggtcccggcgggtcgagcggctcgttccggcggtccgacctccgcctgctcctcggcgtcatgggcgcgccgctcgcgcccatcccgtccaagacggcggagccgctgcccctcctctccatcaagggaacccccattgtacgtccacttgttgcctagcatagcatttgattttgtttggtgtttgcttcgcttctacgagatgcggtctgtgcccgtgcatccggtacccctggcctggcctgggctgaccgcccccgcctgagataatgcaggagtcgtcgtccgcgcagtacatcctgcatcagtacacggcggcgtccggtggctacaagctgctgcagtcggtgcggaacgcgtacgccatgggcaaggtgcggatggtggcgtccgagttcgagacggcgacgcgcgtcgtcaagaaccgcgggccca

SEQ ID NO: 144741 - DNA, 780 bp, Zea Mays
ggttcgagttatgaatattacgagcccaaggaaattctactctgattaaatggggtatttttccagcaggatctgataatgctatgtccaacgcaacagcgatgggtatcatctatcggttaactcagcatcatgttcagttgcctgaaaatcttggcaattatcaattgctcgagtggaatgtgcagcccttgtcaagaaggtcatggtttcaagagcatgcagtttctatattgcttgggattttattagctattttggtcactttgtcagcctttttagtagtacttatttggagaaaaaaatttagtggtcaaactgcctacagacctgttgattcagtggttcccgagcaagaactccagccactataattcaaagctgtttggcggagcaacatatatatgattctttggtagagatacccttgtgcggggttacatatcacagcggcacgcatctgctgctggagtaagcccttctttgtatgtaacacaagctagaagcttacagaagaagcacattatgattacgtgacttcattcaaaacttagaagtgttgttcataaactgtctagtgattcagatcaagagctcctctcttatgcttacagtagaaggttctgttcatgtaatgtagattaagtaggggtagagaagagactaagcacacctgtggaacgaaacgatgtaatatctatttgataagtgctgagggtatttggcttcttaaaaggttttcagggcatgattgattctcttgcctactattaagaaagt

SEQ ID NO: 144742 - DNA, 971 bp, Zea Mays
tttttttcattgcctagaaattaatacctctacagtaagataatctgatgtttggttgatgtaggatccacgatttcaacctgatctctccagttcatattcaccagtaaaatgcaacgttgattgtacttgtgacagtgacaaaaaacagtgcacttatgagaggcagtatgctgaaatgagctccagcagtggggtgcttggtgaggacattgtgtcttttggcagagagagtgaacttaaggcacagcgggctgtctttggctgtgaaaattctgaaactggagatttgttcagtcagcatgctgatggtataatgggcctgggtcgtggtcaacttagcataatggatcagcttgttgaaaagggtgtcataaatgattcattctcattgtgctatggtggtatggatattggtggtggtgctatggtgcttggtggagtgcctactccttctgacatggttttttcacgttcagaccctctccgcagtccatattacaacattgagttaaaggaaatacatgttgctggaaaggcactgcgggtagattcaaggatctttgacagcaagcatgggactgttttggatagcgggaccacatatgcttatttgccagaacaagctttcatggcttttaaagatgctgtgacaagtaaagtgcattctctcaagaaaattcgtggccctgatccaagttataaggatatctgctttgcaggtgctcgaaggaacgtctcaaagctacatgaggtatttccagatgttgacatggtatttggaaatggacagaagctctcacttacacctgaaaattatttattccggcactccaaggttgatggggcttattgtttgggtgtattccaaaatggtaaagatccaacaacactattaggaggttagacacgtcttactgctgccatttgttttacgtctttgtacaatttgctgggttattggtcatctc

SEQ ID NO: 144743 - DNA, 1389 bp, Zea Mays
aagtcgtcgcctcggctcggcccccgcttcgctcctctcggcgcgacgacctctgcccccatcctccccctttctcaatccccgcgcgacgaggccgcttcatggcgagtcggggctggcctcggccggactcgctccaggccctcgccgccgcctccatcgccatccttctcctggccgccgcgtctggggctgccgctggatcccccgatcggcccgtgccgcggccgccgctgttcctcccgctcacgcgctcgtaccccaacgccagccggctcgctgcctcgttgcggcgcggcctcggcgacggggcgcaccccaacgcgcgcatgcgcctccacgacgatctcctcaccaacgggtactacacgacgaggctctacatcgggactcccccgcaggagttcgcgctgatcgttgactccgggagcactgtcacctacgtgccctgcgcctcctgcgagcagtgcggcaaccaccaggatccacgatttcaacctgatctctccagttcatattcaccagtaaaatgcaacgttgattgtacttgtgacagtgacaaaaaacagtgcacttatgagaggcagtatgctgaaatgagctccagcagtggggtgcttggtgaggacattgtgtcttttggcagagagagtgaacttaaggcacagcgggctgtctttggctgtgaaaattctgaaactggagatttgttcagtcagcatgctgatggtataatgggcctgggtcgtggtcaacttagcataatggatcagcttgttgaaaagggtgtcataaatgattcattctcattgtgctatggtggtatggatattggtggtggtgctatggtgcttggtggagtgcctactccttctgacatggttttttcacgttcagaccctctccgcagtccatattacaacattgagttaaaggaaatacatgttgctggaaaggcactgcgggtagattcaaggatctttgacagcaagcatgggactgttttggatagcgggaccacatatgcttatttgccagaacaagctttcatggcttttaaagatgctgtgacaagtaaagtgcattctctcaagaaaattcgtggccctgatccaagttataaggatatctgctttgcaggtgctcgaaggaacgtctcaaagctacatgaggtatttccagatgttgacatggtatttggaaatggacagaagctctcacttacacctgaaaattatttattccggcactccaaggttgatggggcttattgtttgggtgtattccaaaatggtaaagatccaacaacactattaggaggttagacacgtcttactgctgccatttgttttacgtctttgtacaatttgctgggttattggtcatctc

SEQ ID NO: 144744 - DNA, 225 bp, Zea Mays
atggcgcggggcatcgcccggtcatggctgcgctcagggaaggggttcgaacggatcgttgtgggcgaggggggaggtgatggcaaactcaattttaaacaaccggctactgaggacagggatttggaggtagcagggagcttccgtcgtccatccatggcgttagtgtgctgcaatagaggaatgagggagtcgaggcgagcagaatgcagagggcgaggctag

SEQ ID NO: 144745 - DNA, 180 bp, Zea Mays
atggcggcgctggccgagtttgccgccgtctcgggggcaacaccgacgctgttgcctgtcgggtcctcgagaacccacaccttcctagagatcccaatggcgatgactgacgaccgcggtggtgaacagaactccaactccatcgacaaccggaggagcatgagaaatctttcgatttaa

SEQ ID NO: 144746 - DNA, 1305 bp, Zea Mays
cgccgagcaagccattcctgatcccgccccaaccccaatcgacaaacgccgccccttctcgtctcgacctctccccaccggctaaccctagcagcggcacgcgggcgacggcgaccagtagagggctagtcgcgccaccggcgaagggattcagcggtctacccgtcctccgacacaggcgcggcggcgtcctgcaggtatcattgaggagttggttaagcggcacaggcaaattgatgcagttcatttcatacaagcttttgggctttcggagacattcccccctgcacctctgctgaagacatatgttgaggaacaaaaggatacaattgaaaataatggcgatgcaactgcgatctcattaacggatgaccccaaatctagggagctaattgctttgagggctgtgattaagtgtatcgaagagcataagcttcagaaggagtgttcacttggacctctccagaagcgtgtttctgagctgaagcccaagggtgagaaaaggccatcaagtgatgctgggcgtacttatgcaaagaagcctcgaggccctggcatttcatttcctaggagacctgccggttctgttggttcagctgctcgcaggcctccatttccgggctatacctggcagcgtgctcctgcgccgatgccctcccgtggtcctgctccagtgccctcccgtgcccctcttcctgcccctcttcctgatagatatggagctgctgaccggtaccattacacaccaccagccccagcatacgactctggtgcattttcgtcttacagtgaacctttcagtgccccaaaaccattccagtacactccagggtcagtggcagcatcatacaattcaagcccctataaagtcgcttatggtggcccaggagcaccagtcagaagcacctatccaggttatgccagcgcatctgggccggctgcttccagcagctatgcaaattatatgggatccgtatatcgccctccccagcaaccatagattcgactcctccctcaaaaaatgttgtgctggtgatgcaagacatggaaaccagtccctcccatccaactcccatggcggagatgtaaacttgagctattttcttgtttcatcgtccacaacagtggggtttggaggtgtatactgatgctctcatgtccagctacatctacaatgtaccttgcactcttgtttgcttttagctgtgcttattcctgagtcgttgaatgttttatattttctttccacaagtctgtctcatgtagggaactgtctcatctaggaatataactcctttacttgct

SEQ ID NO: 144747 - DNA, 2372 bp, Zea Mays
gattcctcagtcgccgagcaagccattcctgatcccgccccaaccccaatcgacaaacgccgccccttctcgtctcgacctctccccaccggctaaccctagcagcggcacgcgggcgacggcgaccagtagagggctagtcgcgccaccggcgaagggattcagcggtctacccgtcctccgacacaggcgcggcggcgtcctgcagattattattggtttgttgcaaaatgtctacggaagcgactttgaacaattctggtggttctgaatctgcattgctgttactggaacagcttgctgaagtttttggaaagttaaaaactcacaccgaaacatttctgcatttgcaaaatggcataaaatgggaagatattgaagggcatttcctcagccttgatgagtcgtacagaagcaagtttgatgaactggtagagaaggagaaggcattagaagaaaagaaagctgaagcttgtaggttgattgcagagaaagaggctaaagtttctacaaaagagcatgcctcactgaatcagcttcaggagctaagggatgctgctgtctcttctctagcagaggttcgacaaaaatataaggtggagcttgctgagatacttgaagcaagtggaagcaaagacaaaaaggtaagtacctcaatcaatgacaacaatgcatctcgtgcttcagaggagaatacccctgctagtgggtcgggtgaggcatctgaagctttacctgttgagactaagccgcgccctgtattgaagcaactttgtgaacagatggacaccaaaggccttctgaaatttctttcagaaaactgtagaaaacttgctagctttcgtgatgaactttctgttgcactaaaatgtgcaactgatcctgcacgcttcgtacttaattccctggagggtttcttcccaccagaccaaactaattcacctgggagtaaacataatgcccttgaggtccagcgcaagagctgcattcttttaatggaagctatagcacctgcactagggatgaaggagcctggtggcgacgacccttggagctctgaaattaaggagcaagccaaggaaattgccgaagagtggaagagtaagttagctgagattgacctggatgcttctaatggctattcattggaggcacaggctttcctgcagcttcttacaacttttaatgttgattcggtgcttgacgaagatgaactatgcaagatcgtagttgctgtctctcgtcgcaagcagactgctgtatcctgtcgctctcttggtcttaatgagaaagtaccaggtatcattgaggagttggttaagcggcacaggcaaattgatgcagttcatttcatacaagcttttgggctttcggagacattcccccctgcacctctgctgaagacatatgttgaggaacaaaaggatacaattgaaaataatggcgatgcaactgcgatctcattaacggatgaccccaaatctagggagctaattgctttgagggctgtgattaagtgtatcgaagagcataagcttcagaaggagtgttcacttggacctctccagaagcgtgtttctgagctgaagcccaagggtgagaaaaggccatcaagtgatgctgggcgtacttatgcaaagaagcctcgaggccctggcatttcatttcctaggagacctgccggttctgttggttcagctgctcgcaggcctccatttccgggctatacctggcagcgtgctcctgcgccgatgccctcccgtggtcctgctccagtgccctcccgtgcccctcttcctgcccctcttcctgatagatatggagctgctgaccggtaccattacacaccaccagccccagcatacgactctggtgcattttcgtcttacagtgaacctttcagtgccccaaaaccattccagtacactccagggtcagtggcagcatcatacaattcaagcccctataaagtcgcttatggtggcccaggagcaccagtcagaagcacctatccaggttatgccagcgcatctgggccggctgcttccagcagctatgcaaattatatgggatccgtatatcgccctccccagcaaccatagattcgactcctccctcaaaaaatgttgtgctggtgatgcaagacatggaaaccagtccctcccatccaactcccatggcggagatgtaaacttgagctattttcttgtttcatcgtccacaacagtggggtttggaggtgtatactgatgctctcatgtccagctacatctacaatgtaccttgcactcttgtttgcttttagctgtgcttattcctgagtcgttgaatgttttatattttctttccacaagtctgtctcatgtagggaa

SEQ ID NO: 144748 - DNA, 1717 bp, Zea Mays
gattcctcagtcgccgagcaagccattcctgatcccgccccaaccccaatcgacaaacgccgccccttctcgtctcgacctctccccaccggctaaccctagcagcggcacgcgggcgacggcgaccagtagagggctagtcgcgccaccggcgaagggattcagcggtctacccgtcctccgacacaggcgcggcggcgtcctgcagattattattggtttgttgcaaaatgtctacggaagcgactttgaacaattctggtggttctgaatctgcattgctgttactggaacagcttgctgaagtttttggaaagttaaaaactcacaccgaaacatttctgcatttgcaaaatggcataaaatgggaagatattgaagggcatttcctcagccttgatgagtcgtacagaagcaagtttgatgaactggtagagaaggagaaggcattagaagaaaagaaagctgaagcttgtaggttgattgcagagaaagaggctaaagtttctacaaaagagcatgcctcactgaatcagcttcaggagctaagggatgctgctgtctcttctctagcagaggttcgacaaaaatataaggtggagcttgctgagatacttgaagcaagtggaagcaaagacaaaaaggtatcattgaggagttggttaagcggcacaggcaaattgatgcagttcatttcatacaagcttttgggctttcggagacattcccccctgcacctctgctgaagacatatgttgaggaacaaaaggatacaattgaaaataatggcgatgcaactgcgatctcattaacggatgaccccaaatctagggagctaattgctttgagggctgtgattaagtgtatcgaagagcataagcttcagaaggagtgttcacttggacctctccagaagcgtgtttctgagctgaagcccaagggtgagaaaaggccatcaagtgatgctgggcgtacttatgcaaagaagcctcgaggccctggcatttcatttcctaggagacctgccggttctgttggttcagctgctcgcaggcctccatttccgggctatacctggcagcgtgctcctgcgccgatgccctcccgtggtcctgctccagtgccctcccgtgcccctcttcctgcccctcttcctgatagatatggagctgctgaccggtaccattacacaccaccagccccagcatacgactctggtgcattttcgtcttacagtgaacctttcagtgccccaaaaccattccagtacactccagggtcagtggcagcatcatacaattcaagcccctataaagtcgcttatggtggcccaggagcaccagtcagaagcacctatccaggttatgccagcgcatctgggccggctgcttccagcagctatgcaaattatatgggatccgtatatcgccctccccagcaaccatagattcgactcctccctcaaaaaatgttgtgctggtgatgcaagacatggaaaccagtccctcccatccaactcccatggcggagatgtaaacttgagctattttcttgtttcatcgtccacaacagtggggtttggaggtgtatactgatgctctcatgtccagctacatctacaatgtaccttgcactcttgtttgcttttagctgtgcttattcctgagtcgttgaatgttttatattttctttccacaagtctgtctcatgtagggaa

SEQ ID NO: 144749 - DNA, 2149 bp, Zea Mays
ggcaacacagcaagcagcagaaaacatctccgggagtccgaaccacccacaggcggcaggccacaccacaggagcgcgtgctgggggagatcctcgcccgcaacgccggcaccgagtacctcgccaagtacggcctcgccgccgctactacggaccgcgccaccttccgcgccaaggtgccgatggcgacgtacgaggacctgcagccgtacatccgccgcattgccgacggcgaccgctcgcccatcctgtcggggcacccggtgtccgagttcctcaccagctccggcacgtccgccggcgagcgcaagctcatgcccaccatcgaggacgagctcaaccgccgccagctgctgtacagcctccagatgcccgtaatgaacctgtacgtgcccgggatggacaaggggaaggctctccatttcctctttgtcaagtcggagacgaagacgccgggcggcctcgcggcgaggcccgtcctgacgagctactacaagagcaaccacttcaagaaccgcccgttcgacgcctacaacaactacacgagccccacggcggccatcctctgcgccgacgcgttccagagcatgtacgcgcagatgctgtgcgggctgtgccagcgccaggacgtgctgcgcgtcggcgcggtgttcgcgtcgggcctcctccgcgccattcgcttcctccagctcaactgggagcagctcgcggaggacatcgaagccggctcgctcaccccgcgcgtcaccgacccgtcggtgcgcgaggcggtcgccggcatcctccgcgctgaccccgagctcgcggcgctggtccgctccgagtgctccaagggcgactgggctggcatcatcacccgcatttggcccagcaccaagtacctggacgtcatcgtcaccggcgccatggcgcagtacatcccgacgctcaagtactacagcggcgggctcccgatggcgtgcaccatgtacgcgtcctccgagtgctacttcgggctgaacctccgccccatgtgcgacccctcggaggtgtcctacaccctgatgcccaacatgtgctacttcgagttcctgccgatggactccgcggcggcgtccggcggcgacgcgagccagctggtggacctcgcccgcgtggaggtcgggcgcgagtacgagctggtgatcaccacgtacgcggggctgaaccggtaccgcgtcggcgacgtgctccaggtgaccggcttccacaactccgcgccgcagttccggttcgtgcggcgcaagaacgtgctgctgtccatcgagtccgacaagacggacgaggccgagctgcagcgcgccgtggagcgcgcgtccgcgctgctccgcccgcacggcgccgccgtggtggagtacaccagccaggcctacaccaagagcatcccgggccactacgtcatctactgggagctcctggccaagggccccgcgggcggcgccgcggtgggcgaggggacgctggagaggtgctgcctggagatggaggaggcgctgaacacggtgtacaggcagagccgcgtggcggacgggtccatcgggccgctggagatccgggtggtccggccgggcaccttcgaggagctcatggactacgccatctcccgcggcgcgtccatcaaccagtacaaggtgccccggtgcgtgacgttcccgcccatcatcgagctcctggactcccgcgtcgtgtccagccacttcagccccgcgctgccgcactggacccccggccagcgctccgactccgactagacacgcgggccggcgtgcggcgaggcgtgtccggcgcgcttaattagactgggaattcgttccttgcgtatcgcagacgtagaatatgcccgtgaaattaaaatatttgttaattttggaattttgggtactgtcagttagcggctttgagggtaacctgtgatgtgacgagagttggagtcactactgaaggctgagctggtcagctgaagcaacagtcgacgcctgaaggtgttttccggcagtaatggcactgttgtccctatcactttagtagtacggaggacgcggctaacttaaacgttcttccaaatccaaatccaaatctgtacgagctatgcccctgtgcatgcagaagacattgctgcaacattctgatt

SEQ ID NO: 144750 - DNA, 2370 bp, Zea Mays
gacccaggcaagaggcaacacagcaagcagcagaaaacatctccgggagtccgaaccacccacaggcggcaggccacaccacaggttccgcttccgcacagctgctagctagctagcgttcgcaagtagcagtagcgttccatcgaggtcgaggcaatggcggtgatggccgaagtagtgtcgaccaccggcgcggcgctccggagcccggcctcgcagccgctgccggccgcggtgaagaacgcagacgctgagaagctccagttcatcgaggagatgacctccaacgtggacgccgtgcaggagcgcgtgctgggggagatcctcgcccgcaacgccggcaccgagtacctcgccaagtacggcctcgccgccgctactacggaccgcgccaccttccgcgccaaggtgccgatggcgacgtacgaggacctgcagccgtacatccgccgcattgccgacggcgaccgctcgcccatcctgtcggggcacccggtgtccgagttcctcaccagctccggcacgtccgccggcgagcgcaagctcatgcccaccatcgaggacgagctcaaccgccgccagctgctgtacagcctccagatgcccgtacgtgcccgggatggacaaggggaaggctctccatttcctctttgtcaagtcggagacgaagacgccgggcggcctcgcggcgaggcccgtcctgacgagctactacaagagcaaccacttcaagaaccgcccgttcgacgcctacaacaactacacgagccccacggcggccatcctctgcgccgacgcgttccagagcatgtacgcgcagatgctgtgcgggctgtgccagcgccaggacgtgctgcgcgtcggcgcggtgttcgcgtcgggcctcctccgcgccattcgcttcctccagctcaactgggagcagctcgcggaggacatcgaagccggctcgctcaccccgcgcgtcaccgacccgtcggtgcgcgaggcggtcgccggcatcctccgcgctgaccccgagctcgcggcgctggtccgctccgagtgctccaagggcgactgggctggcatcatcacccgcatttggcccagcaccaagtacctggacgtcatcgtcaccggcgccatggcgcagtacatcccgacgctcaagtactacagcggcgggctcccgatggcgtgcaccatgtacgcgtcctccgagtgctacttcgggctgaacctccgccccatgtgcgacccctcggaggtgtcctacaccctgatgcccaacatgtgctacttcgagttcctgccgatggactccgcggcggcgtccggcggcgacgcgagccagctggtggacctcgcccgcgtggaggtcgggcgcgagtacgagctggtgatcaccacgtacgcggggctgaaccggtaccgcgtcggcgacgtgctccaggtgaccggcttccacaactccgcgccgcagttccggttcgtgcggcgcaagaacgtgctgctgtccatcgagtccgacaagacggacgaggccgagctgcagcgcgccgtggagcgcgcgtccgcgctgctccgcccgcacggcgccgccgtggtggagtacaccagccaggcctacaccaagagcatcccgggccactacgtcatctactgggagctcctggccaagggccccgcgggcggcgccgcggtgggcgaggggacgctggagaggtgctgcctggagatggaggaggcgctgaacacggtgtacaggcagagccgcgtggcggacgggtccatcgggccgctggagatccgggtggtccggccgggcaccttcgaggagctcatggactacgccatctcccgcggcgcgtccatcaaccagtacaaggtgccccggtgcgtgacgttcccgcccatcatcgagctcctggactcccgcgtcgtgtccagccacttcagccccgcgctgccgcactggacccccggccagcgctccgactccgactagacacgcgggccggcgtgcggcgaggcgtgtccggcgcgcttaattagactgggaattcgttccttgcgtatcgcagacgtagaatatgcccgtgaaattaaaatatttgttaattttggaattttgggtactgtcagttagcggctttgagggtaacctgtgatgtgacgagagttggagtcactactgaaggctgagctggtcagctgaagcaacagtcgacgcctgaaggtgttttccggcagtaatggcactgttgtccctatcactttagtagtacggaggacgcggctaacttaaacgttcttccaaatccaaatccaaatctgtacgagctatgcccctgtgcatgcagaagacattgctgcaacattctgatt

SEQ ID NO: 144751 - DNA, 2381 bp, Zea Mays
gacccaggcaagaggcaacacagcaagcagcagaaaacatctccgggagtccgaaccacccacaggcggcaggccacaccacaggttccgcttccgcacagctgctagctagctagcgttcgcaagtagcagtagcgttccatcgaggtcgaggcaatggcggtgatggccgaagtagtgtcgaccaccggcgcggcgctccggagcccggcctcgcagccgctgccggccgcggtgaagaacgcagacgctgagaagctccagttcatcgaggagatgacctccaacgtggacgccgtgcaggagcgcgtgctgggggagatcctcgcccgcaacgccggcaccgagtacctcgccaagtacggcctcgccgccgctactacggaccgcgccaccttccgcgccaaggtgccgatggcgacgtacgaggacctgcagccgtacatccgccgcattgccgacggcgaccgctcgcccatcctgtcggggcacccggtgtccgagttcctcaccagctccggcacgtccgccggcgagcgcaagctcatgcccaccatcgaggacgagctcaaccgccgccagctgctgtacagcctccagatgcccgtaatgaacctgtacgtgcccgggatggacaaggggaaggctctccatttcctctttgtcaagtcggagacgaagacgccgggcggcctcgcggcgaggcccgtcctgacgagctactacaagagcaaccacttcaagaaccgcccgttcgacgcctacaacaactacacgagccccacggcggccatcctctgcgccgacgcgttccagagcatgtacgcgcagatgctgtgcgggctgtgccagcgccaggacgtgctgcgcgtcggcgcggtgttcgcgtcgggcctcctccgcgccattcgcttcctccagctcaactgggagcagctcgcggaggacatcgaagccggctcgctcaccccgcgcgtcaccgacccgtcggtgcgcgaggcggtcgccggcatcctccgcgctgaccccgagctcgcggcgctggtccgctccgagtgctccaagggcgactgggctggcatcatcacccgcatttggcccagcaccaagtacctggacgtcatcgtcaccggcgccatggcgcagtacatcccgacgctcaagtactacagcggcgggctcccgatggcgtgcaccatgtacgcgtcctccgagtgctacttcgggctgaacctccgccccatgtgcgacccctcggaggtgtcctacaccctgatgcccaacatgtgctacttcgagttcctgccgatggactccgcggcggcgtccggcggcgacgcgagccagctggtggacctcgcccgcgtggaggtcgggcgcgagtacgagctggtgatcaccacgtacgcggggctgaaccggtaccgcgtcggcgacgtgctccaggtgaccggcttccacaactccgcgccgcagttccggttcgtgcggcgcaagaacgtgctgctgtccatcgagtccgacaagacggacgaggccgagctgcagcgcgccgtggagcgcgcgtccgcgctgctccgcccgcacggcgccgccgtggtggagtacaccagccaggcctacaccaagagcatcccgggccactacgtcatctactgggagctcctggccaagggccccgcgggcggcgccgcggtgggcgaggggacgctggagaggtgctgcctggagatggaggaggcgctgaacacggtgtacaggcagagccgcgtggcggacgggtccatcgggccgctggagatccgggtggtccggccgggcaccttcgaggagctcatggactacgccatctcccgcggcgcgtccatcaaccagtacaaggtgccccggtgcgtgacgttcccgcccatcatcgagctcctggactcccgcgtcgtgtccagccacttcagccccgcgctgccgcactggacccccggccagcgctccgactccgactagacacgcgggccggcgtgcggcgaggcgtgtccggcgcgcttaattagactgggaattcgttccttgcgtatcgcagacgtagaatatgcccgtgaaattaaaatatttgttaattttggaattttgggtactgtcagttagcggctttgagggtaacctgtgatgtgacgagagttggagtcactactgaaggctgagctggtcagctgaagcaacagtcgacgcctgaaggtgttttccggcagtaatggcactgttgtccctatcactttagtagtacggaggacgcggctaacttaaacgttcttccaaatccaaatccaaatctgtacgagctatgcccctgtgcatgcagaagacattgctgcaacattctgatt

SEQ ID NO: 144752 - DNA, 1299 bp, Zea Mays
ggcaaggaagcagcacgccttgtctatcggcagccagcagtgggcagagttactcttgcacacaagaaccttcgcctctgcagttgtgctcattcatcctcgtcccgttacacagtggccatagtgctgaggcgatgtcgatccgtcaccagtgctgagcatagttttgttccgtctgctctttcgcgcatcatctcggtgtgctgttccaagttccgtgatttttgttccgatctgctgtcagcctcccacatgcgtaccttcctgttcctctgctttgtgagccatcccgcgacctatttgcctgatgaaactgaggtgtactatcatggagtgaaattgttggttgggccaatcagaaacgatggtgatcagtgttaagtaaccctagttagggttatgtgggcaaatatctgctttgcccctgaggggtctcacatctctatataaggaacatgtacaccccttcataatagagagatcagaaagaggccagaggcccaaccctatatcctgtgtcttgtgtgttcctctgtcgtgcttatgggaagggagacgggtcttctacaacttctcgcgcctctactactgacgggagggaagggagcggatctggtgatccgtggtaacgtagttctcaacacgttatcagcacgctctacctcaacgttgctgcgagatcagatctgcatcaactcttcgtcaagccggcaggtcctccggcctagccgaactgtcccacgcgacagacttcaattcctcctctacgcaatcgagcgagtggtatgcttaaattggatatactattcttgatctaccgatgtacacgcgttgtgatccatgcgccaagaacttgtcgtcaccgtcgttgtgctgtgtttgctccgggccacgcccacgccggaagcgtccgcatcggagcctcgccggagaggctgcgccagcaccctggcaagcgtcgtgctggaagcggctgctccacgccgcatcgttgactgcctggcctatagcctgctgggtcgcgtgctccactgctcctcccaccaaatcgagagaggttgagagcagttgaatctttgcactgtgccatgttcgcactgaatgggcggttcttggatggtgcacaaccgctcctccaaatttcttgcgtggacgattgcatgcggattgcatgcggaacgattagcacgctgatccgtttttccagtagacaaaggagacgtgcggttaatatttttttctataaaaaaagtgaccggctattgacccgctcgcctcgttttctgccgtccattccgc

SEQ ID NO: 144753 - DNA, 300 bp, Zea Mays
ggcaaggaagcagcacgccttgtctatcggcagccagcagtgggcagagttactcttgcacacaagaaccttcgcctctgcagttgtgctcattcatcctcgtcccgttacacagtggccatagtgctgaggcgatgtcgatccgtcaccagtgctgagcatagttttgttccgtctgctctttcgcgcatcatctcggtgtgctgttccaagttccgtgatttttgttccgatctgctgtcagcctcccacatgcgtaccttcctgttcctctgctttgtgagccatcccgcgacctat

SEQ ID NO: 144754 - DNA, 775 bp, Zea Mays
cacctgtcagcctccatacgaagccccctccgccgtcctctgcgtcaaaacgtcgaaaagctagctagcgcaatgcccgccgccaccagcgtctccctcgccgtcgccgacgccgtctgggcggagatcagatccgctggccgggcatccgacgagcacctatccatcctcgagacgctgttcggaaagaacatgctgcgggcctgcaagatcgtcgacgagcgcggcgtcaggcgcgtcaccggcgcgcccagtggccgctcggtctttctggtgatgggggagtcgaagaggaaggaggagtacctttgcttcccggagcacctctgcacgtgctactcattcttctacgacgtcgtcgggcgtggcgagcagctgagctgtaagcaccagttagctgcacggcttgcagaggctgtgggagagcaccaggaggttgaagtgaaagatgaggagctcgcaaatatgcttgtaattctatgaagctttgattacttcagtaatgcacataacatttatgaattgtatcttctccttacccggccactctgatagtctgatgcacgtgactggagtcacgcacacagactacaatagggaaatgatgtgccggaacccatggtagaatcagctcaatatcataatcctttttgtatgcatggtccttaaaactattgatgaattgagatgactggtttgttcattcactattgagacagtgtcatatacttctgtgtattatatcctcttctgaaagtataatgttatttctcta

SEQ ID NO: 144755 - DNA, 655 bp, Zea Mays
gctccagtcctcgcacgcacactgtccactctctctgccccccctccacctccacctccacctccatctccatgcatgggatgggcagtcaaagaaggcttctcctcctcctggctctcctcctgctgacgctggtcgccggagaaggcgacggcgcactgtccggcgccggcagcacggccacggacgacggggccaatgccaccgacgcgagcccaccggccggcgcgccgctcgacgtgcgggcaaggaagtggtggcggttcccggcgacggaaggcctcgtcacgggcagcgagcggagggtgcccaactcgtcggaccccctccacaaccgctgaagcgcctgtgtcagccgcctgccattcgtgctgcttccacctctgctgttagttatacatacggtacctctggtcgcatgctttttggctgcacaatgtggcttggtattcagacttcagagaatttaattgcgtatacgagagtaaatgtagctgattttggtctagctggtttgccgtttcgagcgcttgtaaacacaaattcgtcggcagtttacaccgtgccgtgtgtatataaatttcctgaagtctgtgtcttcgctcagttcacaagagtttcaagattctatgtatgtgaatccctgtttttttca

SEQ ID NO: 144756 - DNA, 276 bp, Zea Mays
cccttcaccatgggtttctcgacgcgctctaccatgtggtgatgcgccgcaacgccgtctatgtcaccttcgtcgtcatcgatgcttccgcaggcgagcaagtgcgtcctccctccctccccttcttccctggccaccagatcccgaatctgccattccctctcctcaaagggttgtctcttcgattcctaatcagttatctgtcgtttgcgggcggtggactacgacgttcacaagatctgggagatgaacaacattggggtaacatttctcttc

SEQ ID NO: 144757 - DNA, 133 bp, Zea Mays
tatatctaaattatttttccaatttttttcactaaatactagggccaatttttatgcagcaaatggatgatgtttatcctatcatcaacaaagatattaccaacccacttgaatcacctcaaaagagttctta

SEQ ID NO: 144758 - DNA, 110 bp, Zea Mays
gttctggaagtagccgaacagaggcggcgttccgtggaactcgcggtagcgacgacgacgaaagctgcggtcgtagcgcagacgccatgtcgccgccaaaagaacacgag

SEQ ID NO: 144759 - DNA, 1376 bp, Zea Mays
cgaacacatatgctccatgaacaggagataagttcccttaactgccgagaaaaaaaatcaaatccaatgaaaaagtaacaacagcagcccccggggccacagggcgcaggcccgcagccatggaccaggaccacaagaggctagtactcccgtcgccggcgccgcagtccccgccggcatccgccgcgtcggcgtcgaccacggcctcgccgtactccgcgctacaccctctcctcttgccctccccgaacccgcacctcttcctgaagcccaagacgctaactctctccctctcgtcctcctccctcacctccatgtcctcctcctcgctgcccgcccccgtcaccgatgtctgggaggtcgtcacccccactgccccatctgttgaccacgtggacggcgggcttgatgactgcgccatcttcccgccgcggctgcatgaggggctgggcctggacggcgagcccgaggaggtcccgccgatgccagcagtggcgaaggaggagaacgaggaggatggtgaatacgagggggaggacgatgagtggctgtggggatgggagaggtgcagcttggcggcgaggcgcgcttgggcggccggtgtcgggatcgttcaggagcgggtgctcgtgcatggcgcgtgtgggtgcccggcggtgaggcccgccgtgtggtcggttgcggtggcggctgctgtggtggggacacttctgtacgcccgtcggcgggataggagggaacgggacctgctcgtgcttctctccaaagagaaggataagaggatagcacaactcttgcatcaaattgctttaatgagtgacatcagaagcggcaatgaagcagtgaaggttatcaggaagtcctaatcattttcactgttgaagggttcagttgctatgttgtagcaaactgattaggtagttagggaatcggactagtgggtttgcaggttcaatacttgtagctaaattgtagtttagctgcatgatcttcacggttctgatgtttgcgtataactagatgctgaaacctgcaaggttgcaacacaatctcaactcaagcaatcaaaagggacttaaaggaatggaatataccaacggagttatgcttggatagaagtgcttgtaaagaagctatccacgtgcccgaaccgtgattaggtcttttttccttttagtgctctcaaaagatttttccatctcctttctctctttttttttgacatcttgttgggtttcaactctaacataccctaacttgtttggaactaaaagtctatgttgatgatgtagatgtgtagaattgttgttgatgtcgacaacctggacaatgctctgtatatgtatcttccatttattgctttgtgattcccatca

SEQ ID NO: 144760 - DNA, 3471 bp, Zea Mays
tttggcttctgggagagacccacgacgctccattcccccacgaaatgagactccgcgcgcaaaagccccgtttctcgccgcgcgcgagaaaaccctaccttttcccgccacccgcgcgcatttagtcgagcacatagtccgcaccccacatcaccaccgccaccatcagaacctctacgcaccgggtatcgaacgcatctacgatggagggcgacgacttcacgccggagggcggcaagctccccgagttcaagctagatgcgagacaagcgcagggtttcatctccttcttcaagaagctgccgcaggatccccgggccgttcgtctcttcgatcgcagggattattacactgcccatggcgagaatgctacgtttatcgcaaggacatactaccacacaatgtctgccttacgtcaactaggtagcagctctgatggaatcttaagtgccagcgtgagcaaggctatgtttgagaccattgcccgcaacattttgttggaaaggactgactgtacattggaactctatgagggaagtgggtcaaattggaggttaacaaagtccggaacacctggaaatattggtagttttgaagacattctgtttgcaaacaatgacatggaagattcaccagtgattgttgctttgtttccagcgtgccgggaaagtcagctgtatgtagggcttagttttttggatatgaccaataggaagcttgggttggctgagtttcccgaagatagccgattcactaatgttgaatcagctcttgttgcattaggttgcaaggagtgtcttctcccagcagattgtgaaaaatccattgacctaaacccccttcaagacgtcattagtaactgtaatgttctgttgactgagaaaaagaaggctgacttcaaatccagggatctcgcacaagatcttggtagaataatcaggggttctgttgagcctgtacgtgatctactatctcagtttgactatgctcttggtccccttggagctcttttatcttatgccgagttgctagcagatgacactaactatggaaattacacaattgagaagtacaatttgaactgctacatgcgacttgattctgctgcagttcgagcattaaacattgcagaagggaaaactgatgtaaacaagaacttcagtttgtttggtttgatgaacagaacttgtactgttgggatgggaaaaagattgctgaacagatggctgaaacaacctctattagatgttaatgaaattaataaccgactagacatggttcaggcttttgtagaagacccagaacttcgtcagggactccggcaacaacttaaaaggatatcagatattgatcgtctaacacatagtctccgaaagaaatcagctaatctgcagcctgttgttaagctttatcagtcctgtagcagaatcccatacatcaagggcattcttcagcaatataatggccaattttcaacattgataaggtcaaagtttcttgaaccgttagaagaatggatggcaaagaatcgatttggtcggttttcttctcttgttgagacagctattgatcttgctcagctggagaatggagagtacagaatatctcctctatattcttctgacttgggtgtactaaaggatgagctttctgtggttgaaaaccacataaacaatctgcacgtggatacagctagtgatctggatctttctgttgataagcaactgaagctagaaaaaggatcccttggacatgtgttcagaatgtcaaagaaagaggaacagaaagtcaggaagaaactcactggcagctacttaatcatagaaactcgtaaagatggtgtaaagttcacaaattctaagctgaaaaatctaagtgatcaataccaggcattgtttggtgagtacacaagttgtcagaaaaaggtggttggtgatgtagtgagggtttcaggcacattctcagaggtatttgaaaattttgctgcagttctgtcggagttggatgttttacaaagttttgctgatttggcaactagttgcccagttccttatgttaggccagacatcactgcgtcggatgaaggagatattgttctactgggtagcagacatccttgtctagaggcacaagatggtgttaactttatacccaatgattgcactctggtgagagggaaaagttggtttcagatcatcactggaccaaacatgggaggaaaatccacatttataagacaggttggtgtaaatgtattgatggcacaagttggttcctttgtaccttgtgatcaagcaagcattagtgtgagggattgtatttttgctcgtgttggcgctggtgattgccaacttcatggtgtatcaacttttatgcaagaaatgcttgaaacagcatccatcctaaaaggcgcctctgataagtctcttataattattgatgagctggggcgtggaacttccacatatgatggatttggtcttgcatgggctatctgtgagcatcttatggaagtgactcgagcgcctaccttgtttgcaacccatttccatgaactaactgcattagcacatagaaatgatgatgagcaccaacacatttcagacatcggagttgcaaattatcacgtgggtgctcacatagacccattaagtaggaagttaactatgctttacaaggttgaacctggtgcatgcgaccaaagttttggtattcatgttgcagaatttgctaattttccagaagctgttgttgcccttgcgaaaagcaaagcagcagagttagaagacttttctactacacctaccttttccgatgatttgaaagacgaggttggatcaaagcgcaagagggtatttagcccagatgacatcaccagaggagctgcacgggctcggcttttccttgaggaattcgccgcattgcctatggatgagatggatgggagcaagatcttggagatggccaccaagatgaaagctgacttgcagaaagatgcagctgacaatccttggctccagcagttcttctgaagctaattaatccccgcgtgtatggaggcaagaccatgagagaacctcgctgatgctaggatctcctgatccattttgttaatacgcatcagcagatgtactctagtctttaggcttagccgacagtgcaacagggaaaaccatgtgcatatttaacgcggcggtagtgctgctactcctgcataccgttcgggtgcagctactctgctctgccgttctgccccgtctgtgattgcacgccgtcctttacagccgtgaagtctgctgtgccagtctcgtcgaagcttgaagtttctgcacgtctattggctattgctgtgctgcttgtctagcaaaattctttcagtgcaagtagggattgatagtttgtagagattgttgggattttgtcgaggatggcctcacaacgacctttaatcagcttttcaacccagccata

SEQ ID NO: 144761 - DNA, 1399 bp, Zea Mays
tttttttccttggcaatttggacggcacgcggagactggcagaccgcatcctcgtgaagcacgttgtccatgcctgaagagagtattctgtattcgcagtattcctgcatttaaaagtttggtgagcgaatcaataattggcataaataatgctaccgacgcatcaccacatagtacgtaccatagtcatccttatcctatcgaattacctacatgcccaaccctcccactacatatatctgcaacgagtacatcgccaattcacaatgccaattgccagcaacccatccatactttcagctgttgatacaaaaagagaagagagaatggcggagccaaacccagagttgagtgatcttattactcaaacaaagaagaaaaatatagtgccaaagttcaccgaaaccttccccgtggaggacacggcctacccttacagcgccttcatcacctccgtccggaaagacgtgatcaaatactgcaccaaccatacaggcatcgtccagcccgtgctgccgctggagaagaatgtccccgagctctggttctacaccgagctcaaaacgaagaccaggtccatcacgctcgccatacgtatggacaacctctacctggtcggcttcaggacccccggcggggtgtggtgggagttcggcaaggacggcgacacccacctcctcgacgacaacgccaagtggctcggctttggcggccggtaccaggacctcatcggcagtaagggcctggagaccgtcaccatgggccgtgccgaaatgaccacggccgtcaactacctggcgaagaagacgacgacgacactagcagaggcggcggaggaggaggaggagctgctgctgctgcaggcagcggctgaccccaaagccgaggagaagagcaacctggcgaagctagtgatcatggtatgcgaggggctgcggttcttcaccgtgtcccgcaaggtagacgaggggttcaagaagccgcaagcggtgaccatatcggcgctggaggggaagcaggtgcagaaatgggacaggatctcgaaagccgtcttcaggtgggccgtcgacccgaccgctgagatccccgacatgaaggatcttggcatcaaagataaaaacgcagctgcgcagatcgttgcgctcgttaaggaccaaaactagtgctgctgctgctactacatatgagaacaacgaggaggtctctgatgatccatccacgtggtacagtagcagtatactcctagtgctagtatataggagtatgttactgtgcaaataaatacacccggcgtacgtggtgttcctcgtatccctctacttgcttgcatagcgtcgattgaatttctttgcaaaagaccgcaattaacttcctctatgggtcttatttagggccagtt

SEQ ID NO: 144762 - DNA, 1402 bp, Zea Mays
actcagattcagtacaagctcaagccaggcacacagcaagacatcgaccatggctgcctaccaacaagctcccgctctcctgtgcgcctgcctgatgctcgtgctcatggcgggcgcggcatccggcggccgcgtagacgtggaagacatgctgatgatggaccggttccgcgcgtggcaagccacgtacaaccgctcgtacctgaccgccgcggagcgtctgcgccggttcgaggtgtaccgccagaacatggagctcatcgaggccacgaaccgccgcgccgagctctcgtaccagctcagcgagaccccgttcaccgacctcaccagcgaggagttcctcgccacacacaccatgtccacgcgcctgcatgcgtccgaggccgcgcggcggcaccgggagctcatcacgacgcacgcaggccccgtcagcgacggcggtcgccagtggaaccggcggaactacacgacggacctcgacgtccccgaaagcgtggactggaggaccaagggcgcggtgacgacggtcaaggaccaaggagcttgtggcggttgttggtcattcgcgacggtggcggcgatcgaaggcctgcacaagataaggacgggccagcttgtctccctgtcggagcaggaggttctggactgctcttccccgcccaacaatggctgccacggcggcaaccccgcggctgccatagactgggtgtccgctaacggcggcctcaccaccgagtcggactacccgtacgaggggcggcagggcaaatgcaagctcgacaaggcacgcaaccacgtcgccaagatcagaggcaggaagttggtggatcaaaacaacgaagccgcgctggaggtcgccgtggcgcaacagcctgttgccgtgggcatgaatgtacatccgatccaacagcactacaagagcggggtgttccatggcccctgcgacccagaggatctcaaccacgccgtcaccatggtggggtatggtgccgaatccggtggccgcaaatactggatcgtcaagaactcgtggggcgagaagtggggcgagaagggatactttcgcggtttcgcctcgagaggcgcgtcaaggacgtcaggggcacctgcggtatagccgagtgggcaaactacccggtgatgtgagctcccgtcccgtgtctgtcgccaccgtgctttacctgcctggcctacagtgcggtcgtcttgctttcctgcacatgcgcaagcctatatatgatgatgtgcagaagtcagcttgtagaacaggctgaaataaactcgacgcgcccggcatgtgtactcggcagtgtcgtcgttgtcatttgcctattatctatcatcttaagaactatatagtaagctccatgtgtagctgctaaataaaaacgcccccttaaat

SEQ ID NO: 144763 - DNA, 1206 bp, Zea Mays
actcagattcagtacaagctcaagccaggcacacagcaagacatcgaccatggctgcctaccaacaagctcccgctctcctgtgcgcctgcctgatgctcgtgctcatggcgggcgcggcatccggcggccgcgtagacgtggaagacatgctgatgatggaccggttccgcgcgtggcaagccacgtacaaccgctcgtacctgaccgccgcggagcgtctgcgccggttcgaggtgtaccgccagaacatggagctcatcgaggccacgaaccgccgcgccgagctctcgtaccagctcagcgagaccccgttcaccgacctcaccagcgaggagttcctcgccacacacaccatgtccacgcgcctgcatgcgtccgaggccgcgcggcggcaccgggagctcatcacgacgcacgcaggccccgtcagcgacggcggtcgccagtggaaccggcggaactacacgacggacctcgacgtccccgaaagcgtggactggaggaccaagggcgcggtgacgacggtcaaggaccaaggagcttgtggcggttgttggtcattcgcgacggtggcggcgatcgaaggcctgcacaagataaggacgggccagcttgtctccctgtcggagcaggagggcaaatgcaagctcgacaaggcacgcaaccacgtcgccaagatcagaggcaggaagttggtggatcaaaacaacgaagccgcgctggaggtcgccgtggcgcaacagcctgttgccgtgggcatgaatgtacatccgatccaacagcactacaagagcggggtgttccatggcccctgcgacccagaggatctcaaccacgccgtcaccatggtggggtatggtgccgaatccggtggccgcaaatactggatcgtcaagaactcgtggggcgagaagtggggcgagaagggatactttcgcggtttcgcctcgagaggcgcgtcaaggacgtcaggggcacctgcggtatagccgagtgggcaaactacccggtgatgtgagctcccgtcccgtgtctgtcgccaccgtgctttacctgcctggcctacagtgcggtcgtcttgctttcctgcacatgcgcaagcctatatatgatgatgtgcagaagtcagcttgtagaacaggctgaaataaactcgacgcgcccggcatgtgtactcggcagtgtcgtcgttgtcatttgccta

SEQ ID NO: 144764 - DNA, 1378 bp, Zea Mays
ccgctatataaacccgtcgtgtccatggctgctatatcactcagactcagtacaagctcaagccaggcacacagcaagacatcgaccatggctgcctaccaacaagctcccgctctcctgtgcgcctgcctgatgctcgtgctcatggcgggcgcggcatccggcggccgcgtagacgtggaagacatgctgatgatggaccggttccgcgggtggcaagccacgtacaaccgctcgtacctgaccgccgcggagcgtctgcgccggttcgaggtgtaccgccagaacatggagctcatcgaggccacgaaccggcgcgccgggctctcgtaccagctcggcgagaccccgttcacggacctcaccagcgaggagttcctcgccacacacaccatgtccacgcgcctgcatgcgtccgaggccgcgcggcggcaccgggagctcatcacgacgcacgcaggccccgtcagcgacggcggtcgccagtggaaccggaactacacgacggacctcgacgtccccgaaagcgtggactggaggaccaagggcgcggtgacgccggtcaaggaccaaggagcttgtggcagttgctggtcattcgtgacggtggcggcaatcgaaggcctgcacaagataaggacgggccagctcgtctccctgtcggagcaggcggttctggactgctcttccccgcccaaccatggctgcaaccgcggtgaccccgcggctgccatagactgggtgtccgctaacggcggcctcaccaccgagtcggactacccgtatgtgggacggcagggcaaatgcaagctcgacaaggcacgcaaccacgtcgccaagatcaaaggcaggaagttggtggatcaaaacaacgaagccgcgctggaggtcgccgtggcgcagcaacctgttgccgtggacatgaatgtagatccgatcctccagcactacaagagcggggtgttccatggcccctgcgacccagaggatcgtcaaccacggcgtcaccatggtggggtacggtgttgaatctggcggccgcaagtactggatcgccaagaactcgtggggcaatgagtggggcgagaagggatactttcgcctcgagaggcgcatcaaggacgccaggggcacgtgtggtatagccgtgtgggcaaactacccggtgatgtgagctccagggcctggccgtatactagtacaatacagtcgacttgctcctggacatacgcagtgcaagcctatctatatatatgatgaggtgcagaagtcagcttgaaaaacaggctgaaataaactctgacgcgcgcggcctgtactcagcaaagcgtcgtcgtcgccatttgctaattttatgtgtaatctttaaaactactat

SEQ ID NO: 144765 - DNA, 2594 bp, Zea Mays
gcaactctcccgtaaatctgcacaggcgcagcgcggcatttaatgctctccaacctttggtctctgcctgcccccaaacgctcccccattccgtccactcccctctctccccaccaagcaccagcccacggatgcggtcgcgaccaccgcggcaaggtcgaatccatggctagagctagcagaagcagaagcagaagccgcgggctcggcgcttgagccctcgatcctcgggggtcccggttccttctccctgcattgatcgcgtcactcgacgcgagaaggcgagcaaagaggggaaaaaaaggaggatcctttcccgtgtttcttctgtcgattctgcggttctttgcaagtggcaatgaggcggcatgggtggcagctcccgtaccaccctctccaggtggtggccgtgtccgtcttcctggcgctggcgttcgcgttctacgtcttcttcgcacccttcgtcgggaggaaagtgttccagtacgtggtcatggggctatacactccgctggtattatgtgtcttctttctatacatctggtgtgccgcagcaaacccagcagatccaggggtcttcaaatcaaagaagtatctgagcttgtacggaagcggcaaacacaagcatctgaaggaatccagaaagacttcttcagatgctcggttacaaatagagggaactagagaaaaacaagagcatgaggtcgcagcatctagcgagaggtcaattactcaatacaaggacaataatccatcttgcttgagttcaaccctctctccttctctccttctattctaccctctctcttttgttttctcctgctgccaaccacatgaaagttcctctgagcagcaagccaccgaggaagggatgtttttctgcagcctatgtgaagttcaggtgttgaagtatagtaagcattgcagagtttgtgacaaatgtgttgatggttttgatcatcactgcaggtggctcaacaattgcattggaagaagaaactatagaaggttttttattctaatgtcaactgccgttatcttgcttatcctacaatcagcaattggagtattggtgctagtgctatgctttgttgagcgaaaggaattctctatgcaaattgtttcaaagcttggaagcagcttctctgtagtgccttttgttattgtggtggcatcatgtaccatcctagccatggtcgcttcactgcctgttgctcaacttctttttttccacattcttctgatcaagaagggaatcagtacctatgactacatcattgccctgcgagagcaagagcaagatgatctgagtgggcagcagagtccacagatgtctcgtgtaagctcctacaccggactcagcagtgctagttcctttggtccacttcgtcgtggttcatggtgcactccgccaaggctgtttcttgaggatcagtttgatgttattccatcggaggctgcttcttcgcataattctgctacgaagaggaaagaagaccaggggaagaggaaaaagggctcaggggccgtgaaaataagcccatgggcattagctcgtcttaacgctgaagaagtttcgagggttgctgcagaggcacggaataagtccaaagttttagtgccaatcagaaaagatgactattcacgaggccacgaaacagatagtagctatggaggcaccagcagtggtaggatcgatctaggacccgatagcaagaggagaacaaacagaagaggaagacagcccagtgatctctttctcaaacctgttgcaaagatatctacagatgctattgattctgccagcagcgacatgtccaatttagcaccattgcaacttgaggcacggagcgccttccatcccagcagggctgcatcctctgtgaatgttggtgggtcatctccagatagcagcttggattcgcctgacctgcatctgtacagagtctcagctgtctcatcgtctggagccgaagacttgcagctgacagctctcactgctccaggaagcacttcacatcaagggattcaactgtcgagatcgaccagcgatgggtatgaagcgtcagggggtgaagacagcgaccgcattccgtcacagatagtgcaccgctcgtcaaactgggcaagcatcatcctcaactctgaccagagtgcgtcctcgtctggcattcttgtgccgaagaacagattgtcctgaattcagataaatgaagattgtaaatgatcaaccaagaacgggaggttccagtatctgagctttgttttcaatgtcgaatcttgttgcagggatggcttgatactgcgcaaatcattaatttttttattagtttctgaatcgctaggtaggcaagtgtctgaatttcttccgtggggtgttcaggtgcttgtaattttgctgtcagacgacaatgaactgatttgtttagaggttggtaccttggatcaaatgcctgattagttggtgattgttcttgtggttgacttgtcggctctgacggcatgtacttatatgctgcaataggcaacgagcattcagaaagtactacatccatcctagaaaaaaatgccattatagaagactgtaatatttt

SEQ ID NO: 144766 - DNA, 2776 bp, Zea Mays
gcaactctcccgtaaatctgcacaggcgcagcgcggcatttaatgctctccaacctttggtctctgcctgcccccaaacgctcccccattccgtccactcccctctctccccaccaagcaccagcccacggatgcggtcgcgaccaccgcggcaaggtcgaatccatggctagagctagcagaagcagaagcagaagccgcgggctcggcgcttgagccctcgatcctcgggggtcccggttccttctccctgcattgatcgcgtcactcgacgcgagaaggcgagcaaagaggggaaaaaaaggaggatcctttcccgtgtttcttctgtcgattctgcggttctttgcaagtggcaatgaggcggcatgggtggcagctcccgtaccaccctctccaggtggtggccgtgtccgtcttcctggcgctggcgttcgcgttctacgtcttcttcgcacccttcgtcgggaggaaagtgttccagtacgtggtcatggggctatacactccgctggtattatgtgtcttctttctatacatctggtgtgccgcagcaaacccagcagatccaggggtcttcaaatcaaagaagtatctgagcttgtacggaagcggcaaacacaagcatctgaaggaatccagaaagacttcttcagatgctcggttacaaatagagggaactagagaaaaacaagagcatgaggtcgcagcatctagcgagaggtcaattactcaatacaaggacaataatccatcttgcttgagttcaaccctctctccttctctccttctattctaccctctctcttttgttttctcctgctgccaaccacatgaaagttcctctgagcagcaagccaccgaggaagggatgtttttctgcagcctatgtgaagttcaggtgttgaagtatagtaagcattgcagagtttgtgacaaatgtgttgatggttttgatcatcactgcaggtggctcaacaattgcattggaagaagaaactatagaaggttttttattctaatgtcaactgccgttatcttgcttatcctacaatcagcaattggagtattggtgctagtgctatgctttgttgagcgaaaggaattctctatgcaaattgtttcaaagcttggaagcagcttctctgtagtgccttttgttattgtggtggcatcatgtaccatcctagccatggtcgcttcactgcctgttgctcaacttctttttttccacattcttctgatcaagaagggaatcagtacctatgactacatcattgccctgcgagagcaagagcaagatgatctgagtgggcagcagagtccacagatgtctcgtgtaagctcctacaccggactcagcagtgctagttcctttggtccacttcgtcgtggttcatggtgcactccgccaaggctgtttcttgaggatcaggtgtgaaccgtacatccttaggcttcttgaattattaaacagataatgttcattcccaggctgactctttatttatatgtcacatgggtagtatatctggcgaatggaagttaagttggtcacttttctaacagtcatgctaactctgagtttctaactgataactaacactagtgtcttgcacatctaactggtagcaatttcacatataagactcatcatgagctgtacgtacgattaaaaaaaagaaacatttcacatctgccgattaactcactactgacatgaagttactgaatcttctagtttgatgttattccatcggaggctgcttcttcgcataattctgctacgaagaggaaagaagaccaggggaagaggaaaaagggctcaggggccgtgaaaataagcccatgggcattagctcgtcttaacgctgaagaagtttcgagggttgctgcagaggcacggaataagtccaaagttttagtgccaatcagaaaagatgactattcacgaggccacgaaacagatagtagctatggaggcaccagcagtggtaggatcgatctaggacccgatagcaagaggagaacaaacagaagaggaagacagcccagtgatctctttctcaaacctgttgcaaagatatctacagatgctattgattctgccagcagcgacatgtccaatttagcaccattgcaacttgaggcacggagcgccttccatcccagcagggctgcatcctctgtgaatgttggtgggtcatctccagatagcagcttggattcgcctgacctgcatctgtacagagtctcagctgtctcatcgtctggagccgaagacttgcagctgacagctctcactgctccaggaagcacttcacatcaagggattcaactgtcgagatcgaccagcgatgggtatgaagcgtcagggggtgaagacagcgaccgcattccgtcacagatagtgcaccgctcgtcaaactgggcaagcatcatcctcaactctgaccagagtgcgtcctcgtctggcattcttgtgccgaagaacagattgtcctgaattcagataaatgaagattgtaaatgatcaaccaagaacgggaggttccagtatctgagctttgttttcaatgtcgaatcttgttgcagggatggcttgatactgcgcaaatcattaatttttttattagtttctgaatcgctaggtaggcaagtgtctgaatttcttccgtggggtgttcaggtgcttgtaattttgctgtcagacgacaatgaactgatttgtttagaggttggtaccttggatcaaatgcctgattagttggtgatt

SEQ ID NO: 144767 - DNA, 1537 bp, Zea Mays
gaattgatgaaagtgcctagaatggagtcaaaactgcgagtattctccttcaagatccagtttggttcacaagttgctgatcttagaagaagcttgaatatcatcgactcttcatgtaatgagatccgaacttctctcaagttgaaagaaataatgaagaaaatccttctccttgggaataccctgaaccagggaactgctagaggtgctgcagttggcttccggttggacagtcttctaaaacttacagatacccgggcaacaaataataagatgacactaatgcactacctctgcaaggtacttgctgcaagatctccacagcttttaaacttctatgtggatcttgttagcttagatgctgcatcaaagatacaactaaaaatgttggctgaggaaatgcaagcagttagtaaagggctggaaaaagttcaccttgagtatgatgcttcagaaagggatggtccagtatctgaaatttttcgtgagaaactgaaagagttcaccgacaatgctggagctgatgtgcagtcgttatcttcattgttttctgaagtgggtaaaaaggctgatgcgttgattaagtattttggtgaggatcctgttcgctgcccctttgaacaagtaatctctaccctcttaacatttgtaacaacatttcgaaaagcacatgaggagaacctgaagcaagctgagcttgagaagaaaaaagctgaaaaagaggcagaagcagagaaggccaagaacgcacaattaactggcaaaaatgactctaaaccatcaaatccaagacggcaagctaaacaaaccttagagaggacaaggtctgcaagcagacgaggaagagatgttgggtgataacccgaatggtcagtaattttctgtgcttctgatctgctcgcgaggctaatggacgaccgctgggcaagagaagtttcatggacggacgctggcatccgtcgggtgcagcgcgatcgcatcaaagaaaactctacaggccacccttcaacggtctcactggagaatgccgacgtctgtttttatccatgtcggccatcagggtccagtgctaacttctgactgctgtaaagaattgctaacactgacgctaactccattctttcttttcttttttcatgttacttttccattctttctaacaacggtggccaagtacagccatggcttcgaaaaactaccgcctggtgcttaggtggaaaattgtaaaaaataggcatctgggtgaaaaaaaggtatggagataatctaggtggcaaagagtatcaggagtaaatatgtgatgcaaactcagccagtagtttagctgtaaagttttgtagtgagtgtgtattgccgccactttgtattctatgatcatgaagcagtgaaggcggcgttttctttacgatacgtagtcagatagccttgtcggctacgtgtcgcctgtgtacgtgtgatatatgtgctgtcaattgctgttatgattcaaccttgataaaattaggcatgattcaaatgcatcttttgttagcgtcct

SEQ ID NO: 144768 - DNA, 2622 bp, Zea Mays
atggcgctcttccgcaagttcttcctcaagaagaccccggatcggctgctcgagatctccgaccgcgtctacggtataatgctcgcactccccgtcgacctggttcgtgcggtgttcgactgctgcttctcgactgattccatgggtgaggatgagtaccgggattacttgagcggcattgttgcgcagttgcaggaattttttccggacgcatcatttatggtatccaatttttggtctggggacaaaagaagccgaatttcagacatattatctgagtatgacatgacagtaatggactacccacaacagtatgaagggtgtccattgcttcagcttgagatgatccaccatttcttgaaatcatgtgaaaattggctatcggtggaaggtcagcataatatgcttttgatgcattgtgagagagggggttggccagttcttgcattcatgttggctggactgcttttgtatcgcaaaacatacactggtgagcagaagacactagaaatggtctataagcaggctcgaagggactttatacaacagttttttcccttgaatcctcagccttcacatttgagatatttgcactatataacaagacaaggaggtggttcagaatggcctcctattagcagacccctcatcttggattcagtagttctccatgttgttccacggtttgacgtagatggtggttgtaggccatatttgcgtgtgcatgggcaagactcaagccccggtaacaagagtgcaaaagtcctttatgagatgccaaaaacaagcaagcatcttccacattatggacaggcagaagtccctataaaactaagtgtgttttgccgtgtttatggagatgtggtccttgaattcatccatattggcgataatatagagcataaggaaacaatgttccgcatcatgttcaacactgcattcgttcaatcaaacatccttgcgctgaatcgtgatgatattgatgttgcttggaatgtgaataatcagttcccaagggacttccgggctgaggtacatttttcggaccctgattcattcaaacctgctgctaccgtcgaggagatagctgatgatggagatgagactgatgttgcttcggtagacacaggagaggagttttatgaagcagaggaggattggcatgatgctagaaaagaccaagaaactcgatcaactgatggtggaatatcattagatgacgttgcagatggtggggtggcaactgaagaaaggagcagcctagaaaagcaccaattcaatgagggtgtgaagattggtgtctcccagaatttaggtagcatgaatgagaaaggggcaagtgcacctaccccaacttttgacaaccaggaaggtttgcagcagcctcgtgaagttcttgcaaatggtaaactaagcagcactaatggccaagagaacagtgatgtgcatgatatacaggtggttgctacatctgttgattcagagggacacaagtttggatctacctgtcaggaggacatgaaaggtgtaattgcacaaactttagtcaccacagttgatccaagttgcagtgatgaaattgaatgccaggctaatgaacaaacaaaaatatcggaataccctgatttggactacactgcttttggttctcctagaagtttgtcacgtacaaatggtgatacccacttgagaactacaaaaaatgaagggttgcagaacggtgatatcaagattatcactgagaacacaataagtatggacaacgatctagtgatctatgaagagaaaactatagttgtcaatggtaacactgtacaggaagtaaagaatattgtcaatgaaaagagcattgcagccaagatagacaaaccaattattgagagtaggaactcactgaacaacaacaatggcaagattcaaatcgctaaaccttctgatacatctaatggcaaattggatgggtgtagattagaatcttgccttgaggaagccctacctacaaagaaaaccactgtccatgacaggattgttgtcttaccagccactgatgtaggaactgagataaaaaccaagcaagaggggcttggtgacaagcaggattttgcacccccacccccacccccacctcttgcttcacgtgcaggtccaccaccacctccgcctcctccaggtgctcgctctggacctccacctcctccgccccctccaggtgcacgaccaggagctccaccaccaccacctcctccaggttcacggacaggagctccaccaccaccgcctcctccaggagctccacctcccccacccccacctggaggtggtggaagaggacctccaccacctcctgcacctagagggcatcttggtggtcctcctccacctccaccaccaagtggacgtgcaccaggtgtgccacctccacctagagcaccaggtgtgccgccaccaccaggaaataatccatccttaggcagaggacgtggggctgtacgccctctgggatcagcttatggggctgctgcctcacgtaagtcaacattgaagccattacactgggttaaagtgacaagggcccttcaaggtagtctgtgggaagaattgcagcgcaacgatgactcacag

SEQ ID NO: 144769 - DNA, 3458 bp, Zea Mays
cttgccttgccgagtcgccttttaagccccccgcgctcgattttcccaccccacctgcgactgcgagctcgcccccgctcggccactctctccccttcccccgaggccccgatcgacctcccacccccccacctgctgccgtttctccagccagtttcggcgcattccctcgtccttttggctttcagttgcggcgtcgcggcagggcggtttcgcagcccttggctgccgcgccgtcgttcttgcccaagttccggtctcggcttcgccgccggtgattctggcggtttcgtgatacgtccccgcgcagcgcctgcggctgcggctgcgggcgcggaaaggcggcgcctttcccgctcgccgcaacgggtgctccgtgcgtccgctcggtcggtaacccctgcctctctcccgcccgcctcaacacccctcgcgatcacggggaagagtcgccgtcgtggcccgtcgacgggggagtgcggtcagtggtggtgtcaacaaagtctcgccctgctttatttttttctccatggtggctcgcgtcgcgtcgtaatcggaccattaattagtcttccagcctaggtcaatcccgggcctcacggcgtgttcttgactcgtgccgtgttcgacccgtgacgcctgtggttggcgggcggaatgggtcgagctgtctgctcttgattcttcgcaccgcggccaccggctcgcagcgcaatgctggtgtgagggcggaaggggtcaggcttgggagccgagaaggagccgactcttggtccgtgtccgtgcgtgagctcgacgtatggtcggtggcgctcggtggtgttcatagtgcgccgccgccatgggctgcgtcgcgtccaagaacgccgtctcggtgacgccggcggccgactcgtccggcgggctcagggaccggagccagccgcgcgcccaggggtctgctgccccgttgccgttgccggtgcccgtgccttccctgcgcagctcgtcgtccgcggcgaggaggccggagaaggtcaaggacgaagccgaggagccagggaaggccgtcgtcgccgtggcggccgcgtcccggagcttccggcttcggagcctgcggaagagcctcgagggcgagcaggtggctgccgggtggccgccgtggctcagcgccgtcgccggggaggccatccaggggtggatcccactcaaggccgactccttcgagaagctggagaaggttgggcaaggcacatacagcagtgtgttcagggcgagggaccttgacactggaaagatcgttgccttgaagaaggttcgattcgacaattttgagccagagagtgttagattcatggcaagggagatacagatattaagaagacttgatcatccaaatgtcatgaaactggaaggcttgattacttcccgactatcgtgcagcctttatctagtatttgaatacatggagcatgatcttgctggactttgctcctccccggacatcagattcactgaagcacagctcaagtgctacatgaaccagttactgtcaggactggagcattgtcattcacgccgtgtggttcatcgtgatatgaagggcgctaatctcctcgtgaataacgaaggggttctaaagatagctgattttggacttgcaaatttctttgatcccaacaaaaaccatcctctaaccagccgtgttgttactctgtggtatcgaccacctgaactgctactaggttcaactcactatgacgcagctgtcgatttgtggagtcttgggtgtgtatttgccgagatgtatcgtgggaaacctatcctgcagggaagaaccgaggtggaacaactacacaagatttttaagctatgcggttcacctgctgatgattattggaagaagtcgaaattgcctcatgcaacagtatttaaaccgcatcatccatatcccagcacccttcgagatgtttttaaagaggtaccagaaaatgccttgagtttactagaaactctcctatcggtggagccctacaagcgtggtactgcatctagtgctctttcttctgagtttttcaggacaaaaccttatgcttgtgaaccatcgagcttgcctaagtatgcacccaacaaggagatggacgcaaagctacgagatgatgcactcagaaggaaagctagtagcagagggcatggggcagaagcatcgaagaagtcttcaaggatcagcagagcagcaagagaacacactgcagtccctaagcagataaataacgcagaggaacccaaaaacaacgtgaacgcaaccagagatggcacaatactacaggatcgcacgaaactgtcactgaacggcgacgctaggctattcgcggacatacagccagtgccagcagcggctcaagtgaaaggaagctctcgtcacgctaagaacgagtcacgagaggaaatgcccttctcagggccactgagtgtcccttcctctagtggcttcgcatgggcggcggcccaaagaccgcaggaggaccgtgctctcgctaggtcacggaccagatccagctcaagaggccagtttcctgcagaggccgaccgggactgtactaggacccaagccaccacagagagtgctgctgccggcctcagagacataccacgcgtcggctccaaggtccgggagcgggagcctcacgacgcggcgaagcgcgcggtcctgaggaagtggtcgcagctagagcgcccggactcgtttgactcctgcgacacttaccactcccagaacttctcccacgccatgctcgttggggttgggggcggtgctctctcgtcgaagaacagcttcgagggcggtcatggtcatggtcatggtcaggaggagaaggccgagtactcggggcctttgttgccccagtcgcacaaggtcgacgagctgttgcagaagaacgagcgccatatccggcaggctgttcgaacgtcatggttcaggagaggaggaagaaaggtggacaagtgaggaaaagcttgacggtttcctttccatggaagtgggggtgcccatgtctgatgggcctctggtgccagtctgggaagtggacaactggtgctgacgattccattgtttaactggaaacacaatggactttggtggtcccagctcacagcaaaattttagcctctttttttttcctggcgtgtgttgcagattgcccggagacgccagtgctctatccgttttggctgtacaaaagaaacagtagcggctgacgcggcagttgtgtagttggttggaaccgataagctggcagcaccacgtggtgcgagcgactgtagtaaacattacaggctggttggttcatggctaactacgacacactttgtctaacgttagttgttcgaattgaaaaactaatattagttaaaaatattagacagtaacttaaatagcgaaccaaaaagaaaatgagaagtaaaaaatccaataa

SEQ ID NO: 144770 - DNA, 802 bp, Zea Mays
gttaatttatctacctcaagtggctgcccaaactaaataatacttctgcatcttgtatgcttggtaattcagatcaaggaagggtttgaaagcggcaaggatcttgttgtgactgtccagtctgctatgggggaggagcagatctgcgcgctgaaggatgttggccccaagtaacttccctgccttggaatactgtatctcaaaacctaaatcgaaaaaagaagtgtatcaaggattgctacagagacatccatctggcttgagctggcttttgctatggcaaacacaagtgcagggatcgctgggtgttgcaccgtgtctgcattatgtggttacattctggaccctgtattttctatgcttttatgcccctactgtttagtattaattatcaataaatttgtttgggacggttgaattgcatgcattgcatgaggtttcttgttcgttatttgttttctcttgccatgcttccagtattggtgatggcagtttactcgtaattttttttgtacttgtttcgaaaactggtgggcagtttacccgcgcttgtgctccatccattgttctagtgttatccattcctcttttttcccccttcaaaatataaactataaagaagaaaatattatgacttacataaagaatcgttttagagaagcggtaccaaacatgactcgacggaaaattgctccaaaccaactattaactcgatgtttgtattttttttcttctctgccaaaacctgtcaacccgctttatggtaactttgcggtatatgttctcgaaagaaaactggtgt

SEQ ID NO: 144771 - DNA, 1617 bp, Zea Mays
tcagccgtcgatagcgtgattcaaacgcgagaagatgccttcctctgcagccgtacacgcgtccgatcgcccgacaaaaccgacggttcagatacgctcaacatatgcacctgaaggcgtccaaccgacatgcgggcccgttttccagcaagccccaagagtcagtgaaacacaccgtcttctctcgggttggaagcggtgggtgcacctgctgttagcggtataaaaagcggaaaccctagcattcgccgcgagcttatcacttatcatccccatccgcacctctctccatctccctgctcctccgcctccttcttgatccagccaagccagggatcgccatgtcggactcggaggagcaccacttcgaatcgaaggccgacgccggagcgtccaagacctacccgcagcaggctggcaccgtccgtaagaacggcttcatcgtcatcaagaaccgcccctgcaaggttgtggaggtttctacctcaaagactggtaagcatggccatgccaaatgccactttgttgccatagacatattcaacgggaaaaagctcgaagatattgttccttcgtcacacaactgtgatgtaagttaatttctgtgttaagctaagttcttttgatggttcacttcatacgccactcacaagtttgacatttttttaagattccgcatgtgaaccgtactgagtaccagctgattgatatatcagaggatggatttgtatgttcctctaatcattaaaactacattcttctttgaaataaatgttaacttcagtcttatattttaatttaatttgtttcaggtgagccttcttacttcagatggcaacactaaggatgatcttagactcccaactgatgagactcttgtggcccagatcaaggaagggtttgaaagcggcaaggatcttgttgtgactgtccagtctgctatgggggaggagcagatctgcgcgctgaaggatgttggccccaagtaacttccctgccttggaatactgtatctcaaaacctaaatcgaaaaaagaagtgtatcaaggattgctacagagacatccatctggcttgagctggcttttgctatggcaaacacaagtgcagggatcgctgggtgttgcaccgtgtctgcattatgtggttacattctggaccctgtattttctatgcttttatgcccctactgtttagtattaattatcaataaatttgtttgggacggttgaattgcatgcattgcatgaggtttcttgttcgttatttgttttctcttgccatgcttccagtattggtgatggcagtttactcgtaattttttttgtacttgtttcgaaaactggtgggcagtttacccgcgcttgtgctccatccattgttctagtgttatccattcctcttttttcccccttcaaaatataaactataaagaagaaaatattatgacttacataaagaatcgttttagagaagcggtaccaaacatgactcgacggaaaattgctccaaaccaactattaactcgatgtttgtattttttttcttctctgccaaaacctgtcaacccgctttatggtaactttgcggtatatgttctcgaaagaaaactggtgt

SEQ ID NO: 144772 - DNA, 961 bp, Zea Mays
tacagcggtagtaactagtaagactccataggactgttggtacgacacacacagttatggcttttggaagcaattatacccgacgggatttaaggagctaaaatccccttatattcaaaattgaatagcaaggggtttcagctcctctccggcggtatccttacttccaaacaagccctttaagttgctaattggcgcttcttattgctcaagttgcatccttctgccaagtttttccacaggatgcactgagtggagccagtgaacttcaatgcatggctctagtggtgttaacctcgaaagacagcccgttatcctggaggcgctgctggagatcagtagggccaaagacggtgccaggcgtgtataccccgcccttgggcaggttggcacgctggctcagcaggacgagggcgcactgcaccagcacgatcggagttgtgacgtaaccgacctcgggtcccgaaaccttggtgatcacctccttgtccggcttgcttcttccgagctccaacgagctatccacgttgctgtagccgtgaccgacaaaccacatcttgaacgaggcgctcttcacctcttcctcggtcgggccggctctgctgaacagcccagcggagaaaaactcagggtacttcagcaggagggacctgccgaaggagaagttggcgagcaggccgatgaagattccggtgaagatgaagcgcacaaggatcagcagggatctggaggcgatcttcacgccaaaatgggcaggtttgacagaagaccataatttcttcctatgatcagcgtactctggggtttcttctgcgccaggaaggccctcaggatgctcagtcaaggttgatagagttctcttcacgaccactgtgtcagcggaaggcagtttcatagcccacattcccagaggattgtgaccttcaatcagcgaccctttgggaggtggagggcctggaat

SEQ ID NO: 144773 - DNA, 3712 bp, Zea Mays
gatttttctctgattacttcatctctccccgtgaagaaaacgttgggtaataagggaagcgggcaagaaccagaggaagagagagcgcacccgcgtgtggatgtggaggctgctcgccgctcggcccgtcgtccccgtcgccagtgcttccgcttcgcctctgtgtcttccatgattcgagaagcaaagccatgtctcccctgctcctcgggttcctcggcttactcctcgtcgcaggtgagttggtggttgtgcccaccggtgcgcagaacagcgacggtggcgacgacgacaaggaggtgctggtggagctcaagcacttcctgcaggacaacaacaaggtgaaccgcggcgcctacgacgcgtggcaggagtccgacgcgtcgccgtgcgaatggcacggggtgcagtgcgacacggccgaccgcgtcacggcgctggacctgtccggctcgagcatctccggcccggcgttcggcaacttctcgcggctgcccgcgctcgccaggctcgacctctctgacaacaccatctgcgccgcgggcgacatcggccaatgcctcggcctcgtgcacctcaacctctcccacaacctcatcaacggctcgctggacctgtccggcctcaccaggctgcagacactcgacgtgtcggggaaccggctgtcgggcggcgtcgcggccaacttcacggcgatgtgcgccgacctggccgtcttcaacgcctccaccaacgggctcacgggcaatatcaccggcatgttcgacggctgcgccaggctccagtacgtcgacctcagctcgaacaacttcaccggcgagctgtggcccggcgttacgaggttcacgcagttcagcgcagccgagaacaatctcaccgggagcgtaccgccgaccacgttccccgacggctgcaagctcgagtcattggacctgtcagcaaattacctcactggaagcttcccggactccatcgccaagtgcgcgaacctgacgtacctatcactctgggggaatgtcttcaacggcttcataccggccggaattgggaagcttcccgtgctcgagacgctggttctaggcaagaacagcttcgatcgccggataccgtcggcgctgacgaactgtacgaagcttcagttcttggacatcagcagcaacatgtttggaggggacgtacaagacacctttggcaggcttgcgagtctgaggtaccttgtgctgcaccacaacaactacactggcggcatcgtcacctccggcgtgctccagctaccgctgctcgcgaggctggacctcagcttcaacgagttctccggcgagctccctcccgaggtggctgacatgaagagcctcaagtacctgatgcttgcctacaaccaattctccagcgggataccgccggcgtacggccgtctcaccgagctccaagcgctggacttgtcgtataacgagctctccggccggataccggcgaccatagggaacctcacgtcgcttttgtggctgatgctcgctgggaatcagctatccggagagattccgtcggaaatcggcaaatgcgccagcttgctctggttgaacctggccgacaacaacctgaccgggaacatcccaccggagatggcaaacatagggaggaaccccggcccgacgttcgccaagaaccggaatggttcaagcgtgctcgccggctccggcgactgtcaagccatgaggcggtggatcccggcgagctaccctccgttcagcttcgtgtactccatcatgactcgggagaactgccgcagcatatgggaccgaatcctcaagggatacggcatcgttccggtctgcaccaacccttcgtcgccggtgaggtcctacacgatctccgggtacgtgcagctgtccaggaaccagctgtcaggagatatacctccggagatcggcgcgatggtgaacctgagcctgctccacctcgacggcaaccggctcaccggaatgctgccagcggagatcagcaggctcccgctcgtcgtgctgaacgtctcgagaaacaacatctcaggcgcgatcccgtcggagatcggccgcatcctgtgcctcgagatgatggacctgtcctacaacaacttctccggcgagctgccggggactctgagccagctcacggacctgaccaagttcaacgtgtcgtacaacccacttctcacaggcagcgtccccaccaccgcccaattcggcaccttcgacgagcgatccttcctcggcgacccactcatctcattcgggacgggcaccggtaagcagccacctccggaagctgcgggacctcgaaggtccggcatgagtccaagaagcatcgcggtgtggttcctgttctccctcctcgccgccttcgtcaccggggccttggtgttcttcatggccaacctgcgtgcgcggttccccgtggagcaagacccggaccccgagtcgttctcgtttgagaaccccaagtgcagctccaggaagtgctccttgcagatgtcgacgccgtccgggtcatcgtcgtcggcgaccgggtgctcctcctcctcctcctcctcgacagagggcgtgaaggtgttccagctcggcagtaccgcgttcacctaccgcgacgtggtggcggccacggggaacttctcggagcacctggtgatcgggcgcggcggctccggcgtggtgtaccgcggcgtgctccccgacgggcgcaccgtggcggtgaagaagctcgcgaggccgcgcgacgacggcgacggcgacggcgactgcgagcgcgagttccgcgccgagatggaggtgctcgccgaccggatggggtcgtcgtggccgcacccgaacctggtgacgctgtacgggtggtgcctgtccgggtcgggcaaggtcctggtgtacgagcacctggacggcggcagcctggagtcgctggtcggcgacacggcggcgttcgggtgggggcggcggctggaggcggcggtcggcgtggcgcgcgcgctggtgttcctgcaccacgagtgccggcccgcggtggtgcaccgcgacgtgaaggccagcaacgtgctgctggaccgggacgggcgcgccagggtgacggacttcgggctggcccgcgtggtccgccccggcgacacgcacgtgagcacggtggtggccgggaccgtcgggtacgtggcccccgagtacgggcagacgtggcgcgccacgaccaagggcgacgtgtacagctacggcgtgctgctgatggagctcgccacgggccggcgcgccgtggacggcgccgaggacgagtgcctggtggagtgggcccggcggatggccagagaagggtggagttcggcgggcgccgtcgtcggcaccgtgtcctgggagctcctgatgctcggcatgcggtgcacggcggacgcgccgcaggagcgccccgacatgccggacgtgctcgccgcgctgctggacgtgggcgagcacggcggcacgcggctcgaattcacgtgacagacaatttttgttccacgttcctcttgtttgctcacgtgtatctggtttgtttttaggtgttggagtatattagttcgccattgattcataatgtggataacagaggtaggagaggcctaggtagatggaatcttgcagtagcagtacataggataaagaagacacgttcgttgtacattctcatcatgcaaacgtagcacaacttgttgatt

SEQ ID NO: 144774 - DNA, 1568 bp, Zea Mays
tcacaactcagctggtcatgtagactgctggcttgtagtttagtggagagatgatggcgtccaggtcaccacaggggcattggggcatgcaacgcagtgtaaattatctttgcagcccacgcacatgtttcaatttttaatttgtcatttttcaaaaaaatattcataacatggaagttgtattgtagatttcgatggaacctgcaacttttgtagataaaatgtttttttttattttaaatcgtttagatatccaaataatgtgctaaattttcagacaacaagaacaaaagggaaaacaaggtgagatggtagggacggatcgcagaataaatcgcacacaagaaaaaaaaacacgcgatgatggtgcggatagctagaaggtggtaattaaaacactaattaaatgcattgccacgcacgtgccaagaattcatacgagagcacaggactgctagaggaactctgaatttagttgcacatgcctatcacacgtgcagttgaattcctgggttcagatgaattctttactatactagaaaaggcagcgccctatcgggtgctataccagctcaactgaaaatagcttatggataaaacaagagaactgatggtagtatccttggatggctataccagttcgtgagcacccttggatggctaaccatgtcgatggtagtatcctttctagcagcttaccgagcatcaacaggcactgcaatactgcactccgatagcatgtgtttctgagatttggtatccctttgatagcatagccttgcgcatcagatggtttggattcatagcaaggccatatgtctgcaagatccatagccacaccaaaccgagatgaccggctctctgctggaagtacttcattcatgatttcctgctctccttttgcaatctccacatcatgggtagtcagcaagccctccttcgtaagcaggtcgacagaattgatatcatccctcaccaatatagtcaaccagccagtgatgtaaatcaaatgttgagccttgcttatagcatccaagatatctgtccagcacctatgtagctcacagttcttgccatcagcgagctggatctcggttctccggatgcccctcgcccagttacagtccttgcccacatcaaagaactgaggcttcacggggaggttggggacggagtaggcgccgcggttgaggtccattgtcgaacacttggttggcgtggtgacgagaacctgctcctcctctgcgtgcaccgccaactgtagaatagaaggagccagagatggtgccgcgtcgtccagaacagaatagctgttggcctcgatgtcgacgggaccacgctggacgagctccgtggtgaggtgaagcggtacggcggactcggccagcttctgcaccgccgcggctgcctccatggtcgcgcaacccttggccttgtccgtctcggccagtgcccgagcagccttagcgtcacggtacggctcgtccaccaccgcagcatgcgtcggtggtagcgcgaggtagggcagtagcagattccccacggtgagaaggaaaggggatggtgag

SEQ ID NO: 144775 - DNA, 631 bp, Zea Mays
cgtgctatcccctgccgagctcggtactgtctatctcgccacgctcggtctctagctccttgtgcgcacatctatttatggccgtggtgaaattatggcgtggcgacgtcgtgcgcgtcacgacagttgtcttggccgtgaagtagtccgcgccatagagttcactcagccatgatttcatcaaattgcgaagcttcctcaccatgcgctctggcatcggctgccgccgattccgccataaagttcacgagcgctctttgctcaacttatttcgccgtgggcaatttctccacacttcaaatacgtgttgcttgccccgcatgcgctcactcctcatcctttgggtttcggcatattcacgtttatcgtcgagccgttaaactcgtcatcccctgctcgacccccacctcactagctcgctccagactcaatctcgtcgtcgtcccgcgcgtcagcaagaaatctcaagagtcgggtgaagacggagccaacaacatggtgttcaccaagtgcacgacaggaagctcgagccaggatttatcagcattcgtacgagtattgggtcgcgtttgatgatggtgagccgatttataatttttgtcagtttatctgatgattggattaactagaa

SEQ ID NO: 144776 - DNA, 382 bp, Zea Mays
taaacaaagccgaaaacacctaggagtcacgtaagaagtggggccacgcagatgctacaatttatgaaaaagaactgacattttcggattctcaagcaaacaaatagtatgcagcttattagcaagtcctaacatcaaccctgcgagcaaaaataatgattgagaaactgaatattgcttaagaatcctggtgcgttcaagtaatttacaagctacaatgtccgtgctctcccaacgaccagcaaactcagtagaaactgcctcttcagtacacaggattgtattctatgctataaagcatctctcttcgattctcaccacccattcggtagttgaactgcttagccagggattggactttctcgtcactgtcaaagtctga

SEQ ID NO: 144777 - DNA, 858 bp, Zea Mays
gcctgacaaggcgcctttccttgtccactttattttaattttaccaatataatattattggctggtttggggaaatcctcccaaatcagggctaacaaaaagatttttttgcaggttcagctaattgctactctaaagatggtgaaaagcaacaggagttctgaggcttacacatttaaccatgatagtatggctcgccgtgcattgaaaaatacatgccttgcataccttgcgtcattgaatgagccagatttcgttgagcttgcactgcatgagtacaagtctgcgattaacatgacagagcagtttgctgcattagcagcattatcccaaaatccaggccaagttcgtgatgatgccctcttggatttctataacaagtggcagcatgaatacttggttgtaagcaagtggtttgctcttcaagctacttcagagattcctggaaatgttgcaaatgttcagaagctgctgtctcaccctgctttcgacctgaggaatcccaacaaggtgtactcactaatcgggggattctgtggctcacctgtgaacttccacacgaaagatggttctgggtacaagttcttgggtgagatcgttttgcagcttgacaagataaaccctcaggttaatgccaagtacttgttctcctgggtatttacctagtagaggataaaagataaagaacatgaaaatctttaaaaagatcgtcttctccttgagccacaagtagctgtcgcagcaccgggactgacactactgcaggcttctctatcaggaggtttaggattccggatggacagcacgttctgcatctggacgctgtcagcttctcttctttcgaagaagcccagggag

SEQ ID NO: 144778 - DNA, 1914 bp, Zea Mays
gctttctcgcgctcttcaaccgctgaggctgagccgcgcgcccgcgccgcccttcgtcgccttaccaacgaccgaagccacacgatgcctccccgtccccgccaccgcctcctttttttttgctgtcacctctccaccacgccgtctcccgcgccggcccccgtgcctaagcccaccgatccggcgctgatgctccgcctatgcacgatcctataccagcagcaacacgaccccgacgacgcgctgcgccgccgcctctccgcgttgccgctgcccaccgcgcccgccgacattcgcgagctcttcctccaggcctcctcgcggttcccgctctcctggcgccccgtgcaccgcctcctctcgcacctttccaccctccaccgcggcgccggcgccggcgacggcgacggcgacagcgacagcgacagcggaggcggtgggttcccacactccccagccactgccgcccgcctcctagacgtcttagccaagtccgggaacatcgacctcctccactccacgctcttctcactgccccgcagcctcctctccgccgcggcactccgcgccgccgtgcgagggctcgctcccgcccgcgaggtcgggaaggtagccgcgctcgtgacgctcttccccgagtgccaccgcgctcgggtcctcacgttcgtcaccgacgtcgcgtgctcggagccgtgcaggctccctgacgtcgcggaaaaggcgatcaagcgcgccgagcaccggcacggcgtcgcgcgcacgggcaggtgctgcgacctgctggtcgttgcgtactgccgtgcggggtctcttgcggacgcatgcagggtgtggaatggcatggagaggcgcggcctcgagccgggtgccgcggcgtaccaggagatcgtggtaaccatgttcaagaataaccgcgtagccgacgccatgaagttgttcgacggaatgcggaggagcggagtgcgggacaacggaggcgggtgctgccgcgcggtggtgtcatggctgtgcaaggaagggagggtatggggcgcgtacatggtgttggcagaaatggtaaaacgaggtctggaagtggatggtgaggtgctgggagatttggtgtatgggctgatgtcgaggagaagggtgagggaagcatacagggtgttccatggcgttaaggagaaggagattgctctctatcatggattgatgaaggggttgctgaggatcaaacgagcaggggaggccactgaggtgttcagggagatgatcaccaggggatgtgaaccgaacatgcacacttacatcatgttgcttcaggggcaccttgggaagaggggtcggaaggggagggatccattggtgaattttgagagcatatttgttggtggcttggtgaaagccgggaggacattggaggcgaccaagtttgtagagaggacaatgtggggtggggtagatgtgccgagatttgactataacaagtttctgtactatttctcgaatgatgagggagccgtaatgtttgaagaggtcagcaagagattaaaggaagttggagtaattgatcttgcagacattttgtcagcctatggtgagcgcatgaccaccagggataggagaaggatagcaatgaatggacttctcaaatcggtttaggatggtggttgccaatcataatctcaggagtaggcgcttgtgatgttgtgttgtacatcaaaatgtaccattgactatgacggctacagaagtgtgattttgttttaaaggtaaactcatatttgagccgcagatgttaaggtcgactgtactcaaacttgctaactatggaaacttgctgaccatagaccacctgctgttagttgaaattttagtcaaaatatatattgatgatgtagctgttgttttcgtagtaacatatatttgagt

SEQ ID NO: 144779 - DNA, 417 bp, Zea Mays
atgatgctttcccttgtcctcctcatggcgctgctgctctcgtgcagcagcattagcggagcggcgcggctgctggaggaggtggcgcccaaggaggagtacccgcaccctgccacgctggagctgcccaagcccgagctgccgccgcaccccacggtgccggagctgcccaagcctcagccctcagatgccgtgcctgaactgcccatgcctgaggtagagcaccccgccgttccagagctgccaaagcccgacgtgccggcgcaccctgccgtgccggagctaccgaagcctgagctgcctcctcaccccacggtgccagagctgccctacccggaagttccggaggtgccaaagcatgagctcccaccgaagccggccgagaaccactacccagtgccagagactaagccatga

SEQ ID NO: 144780 - DNA, 1517 bp, Zea Mays
gcactgctgcagcggcagcccatgcccatcatccagcacgcacacacagacacgtacagagctggtagataggataaaagcagtaatggcttccacgaccaccaccatgtcctctcttgccatggccctcgcgctgctgctcttgagcggtggcatcggcggcgccgcgcggcagctacaggagctcccgaagcctgacctgccgccgttgcccaagcctgaggtaccaccaaggccggacctaccgccgctccccaagcccgaggagcagccaccgttgcccaagccggagctgccggtgccaccgcagccactccccgtcccgccgcagccgttgcccaatcccgagctgccggtgccaccggagcctctccccgtcccaccgcagccactccccgtcccgccgcagccgttgcccaatcccgagctgccggtgccaccggagcccctccccgtcccaccgcagcccctgccgaagcccgacgacatgccggtgccacccgagcccctccccaagcccgagctcccggtcccgccgcagcccatgcccaagcctgagcttcccgtcccaccgcagcccctgccgaagcccgacatgccggtgccacccgagtccctccccaagcccgagctaccggtcccaccgcagcccctgcccaagcctgagcttcccgttccaccagagcccctcccaaagcctgagctgccggtgccaccggagcccctcctcaagccggagctccccgtgccaccgcagcccctccccaagccggagctccccgttccaccagagctcctcccaaagccggagctcccggtgccaccggagcccctccccaagcccgagctccccgttccaccggagcccctcccaaagccggagctgccacccccggtgctgcctggcgagcttccaccgaagccagagttagtcccgctcccgccgaaggctgaaataatgccgccgctgccgaagccatgatcgatgagctacgacgacttcacgggcgcacatatatatatatcgatcgacactgcgcgcgctccacgatccaaatatttacgatttgtctactttccattcgattttttgctgattcatctgcgtgtttggtttggattggacgagggtgtgcatagctaggtagcgcatcttatcagaattgcagcgtggagtgtatattgccatgccatctgattcgtgaccgcgatctgtctatgtactcttgctgagatccatatgtatatacctaataaatggattcgtttgtatatctacttacttaacgacttacgtgattacgctcagtatttattgcacttttcagttcaacctgtggtcgtttctttatatcgtcaaattaaccaactgctcacgattgttatagcctgggcaaggattgagtatatgcttcttcttttttcaaaaaaaaactccctccattcttttttatttatcacagtttagtgcaaaaataaacagcaaacgataaatatttttgagaacaaaggtaata

SEQ ID NO: 144781 - DNA, 726 bp, Zea Mays
atgtccaccgtcgatggcgtcgccgccgtgttcagctcgatgccgacgccggcgttcagccagatggtgagtatgaagctcaaccatgagaactaccttctctgggtggcacaagtcctcccatatctgcggagccaaggcttgagcggccacatcgatggatcgctcccagcgccaaggcagactgtcgccgtcgaccctgcagaaggctccggcggacggacgatcgccatcaaccccgagttcacgagctggtaccaccaggatcagctcgtcctgagcgtcatcaactcatccctttccgaggagggcctgtttggaccagtagctgataatgctaatgttggggttaggcactctgttcctaatgctactaatgatgtttcccatgatagcaatcctttggcaggtggcattcttaatcaatctgaagaagaggggcaagaatcagagtctgaagcacattcaggctcactgcagcaagaaactccagaacctgagcagattcagggtgaagttgagagaaatcaacaagagcaagaggttcagcatcacatgagaacaagattaaaagacaacattgtcaaaatcaagaaactcactgatggtacagtcagcagccggtgccgatgccgatcacggaagcgaaaatggatccggaacgggaagcgaaaacgtcaaggctctggccagtggccatttggccaaccaggagcgctcgggtga

SEQ ID NO: 144782 - DNA, 616 bp, Zea Mays
gcatcgccactgccacagcggcacagccacaggccacacaacactgaacacccctgcttacgttacgatcaacatggcctcgggaaccaccgcgtcctccctcgctctcctgctgctcctttcctgcgccgccgtgagcagcgcggcgcgaaggctggaggaggaggcgacgcccaaggagggggagccccacctgaccgtgccggacctgccagtgccagagcacgacttgccgccgctgcccaaggtcgaactgccgccgttcccggaggtcgagctgccaccgctgcccaaggtcgagctgccgccgttcccggaggtcgagctgccgccgaagcccgagttaccggccattcccggattccatttcccggagcctactacgccatgacgcgccacccctgcgtgctacttcctcggtcgtacgcgcgcgcgcgcgtgaattatatatgtgttcgtgttgggatatggatgcccgctcgtgtcgtgagtgtgtgctctgcttgcgttcgtgcttgatgtattatatatacaaataaactttgttttctgacttatattaaccagtagtggcttgcccctcgtgttttccaaaaaaaaaaagacaaacagacat

SEQ ID NO: 144783 - DNA, 1828 bp, Zea Mays
caacgacctctgaaaccctaaccaaataaacccaccgttcgaaatccccaaaggccaaaaccctcctccgaacccttcccgccgccgccacccccaccccgaccggcaccaccacctcctagctccaccaccgtccgccgtcgccgcgatggaagacgacccgtcgcgccaggtgcgcgtgcgcttcgtcacaaagctgccacctccgctgcggacgccgcccgctgccatcgccgtccccgcggacctcactcgcatgggcctctccgagatcgtcaacagcctcctcgcagccgccgagccggaccaccagtcgcagcccttcgacttcatcgtgcagggcgagctcgtgcggctgccactccaagagtttctcctagccaagggcatctccgcggagagggtgcttgagctcgagtatgtgagagcagtggcgccaaggaagcaggaggaaccttgcccccatgatgactgggttagtgctgtggatggatcaaacccaggttttatattatctggatgctatgatggtcttgcaagattatggaaagatgcagcagtatgcacacaaattttggagggacacaatgatgcaattacttctaccagattcatcaataagggatctgaaaccgagggcagtctgcatgtagtgactggctcaaaggataggtcactgcggctatacaagtgtgatacatcagtcattatggactacccaaagcgggttggggcttacaaaattctccgcggccacacggcatcggttaaaagtatctccgcagacccttctggcgatatgctatgttctggatcctgggatggtaccatcaagttgtgggcagttgaaggatctgatgacgatgatgctgtttcattgaagaagagaaggatgaattctgattcatctggacctgaagagtctcagttagagggttcagccacttcaacacttctgggacatacacaaggtgtaactgctgttacctggcctgaacggaaaacgatatattcagcatcttgggatcattctgtaaggcagtgggatgttcaaacagtgaaagaaacatggaatatgttttgtgggaaggccttgaattgcttggactgtggaggtgagggttcttcattgattgctgctggtggttctgatcccgtgttgagggtatgggaccctcgcaaacctggaacattagctcctgtttttcagttctcctctcattcaagctggatcactgcttgtaaatggcatccgagttcttgtttccatttggtgtcatcttcctttgacgggaaagtgatgttgtgggatctaagaacagcatggccgctggcgtctgtggactcgcatgaagataaggttttatgtgcggactggtggaaaggggacagtgtgataagtggcggagctgattccaagctatgtatctcatctggtattcaaatcgtgtgatgaagttcttccttatggttctcgagcccatgttattgagattatatgggttgacaagccatttccagaagccaaataatgtcagatatgtctgggaagatacgcaacccttcagtcaagatcaagatacggcacagggctttaccagatgtgtatgcaaaagtgcatttcttgcataagtaagatccaaagcaattgataactacatcttgctcatcaacttttttatgtgttcattggtgcgtttggcaccaatattactctattattccaagatcatgaattaatagttgaagtctgggctgaccggctgaccgcctctgtttatgctctgttacttgtcgcttggcactttggcagcctggtataaactaa

SEQ ID NO: 144784 - DNA, 1915 bp, Zea Mays
caacgacctctgaaaccctaaccaaataaacccaccgttcgaaatccccaaaggccaaaaccctcctccgaacccttcccgccgccgccacccccaccccgaccggcaccaccacctcctagctccaccaccgtccgccgtcgccgcgatggaagacgacccgtcgcgccaggtgcgcgtgcgcttcgtcacaaagctgccacctccgctgcggacgccgcccgctgccatcgccgtccccgcggacctcactcgcatgggcctctccgagatcgtcaacagcctcctcgcagccgccgagccggaccaccagtcgcagcccttcgacttcatcgtgcagggcgagctcgtgcggctgccactccaagagtttctcctagccaagggcatctccgcggagagggtgcttgagctcgagtatgtgagagcagtggcgccaaggaagcaggaggaaccttgcccccatgatgactgggttagtgctgtggatggatcaaacccaggttttatattatctggatgctatgatggtcttgcaagattatggaaagatgcagcagtatgcacacaaattttggagggacacaatgatgcaattacttctaccagattcatcaataagggatctgaaaccgagggcagtctgcatgtagtgactggctcaaaggataggtcactgcggctatacaagtgtgatacatcagtcattatggactacccaaagcgggttggggcttacaaaattctccgcggccacacggcatcggttaaaagtatctccgcagacccttctggcgatatgctatgttctggatcctgggatggtaccatcaagttgtgggcagttgaaggatctgatgacgatgatgctgtttcattgaagaagagaaggatgaattctgattcatctggacctgaagagtctcagttagagggttcagccacttcaacacttctgggacatacacaaggtgtaactgctgttacctggcctgaacggaaaacgatatattcagcatcttgggatcattctgtaaggcagtgggatgttcaaacagtgaaagaaacatggaatatgttttgtgggaaggccttgaattgcttggactgtggaggtgagggttcttcattgattgctgctggtggttctgatcccgtgttgagggtatgggaccctcgcaaacctggaacattagctcctgtttttcagttctcctctcattcaagctggatcactgcttgtaaatggcatccgagttcttgtttccatttggtgtcatcttcctttgacgggaaagtgatgttgtgggatctaagaacagcatggccgctggcgtctgtggactcgcatgaagataaggttttatgtgcggactggtggaaaggggacagtgtgataagtggcggagctgattccaagctatgtatctcatctggtattcaaatcgtgtgatgaagttcttccttatggttctcgagcccatgttattgaggttcgaactttttctcaatggccatcattttgaatggttgaattttacttctttcctgttgcatactctgctttgcccatgccgaaccatttacgtgcttgttagccataagtgttgttcgattgcacagattatatgggttgacaagccatttccagaagccaaataatgtcagatatgtctgggaagatacgcaacccttcagtcaagatcaagatacggcacagggctttaccagatgtgtatgcaaaagtgcatttcttgcataagtaagatccaaagcaattgataactacatcttgctcatcaacttttttatgtgttcattggtgcgtttggcaccaatattactctattattccaagatcatgaattaatagttgaagtctgggctgaccggctgaccgcctctgtttatgctc

SEQ ID NO: 144785 - DNA, 987 bp, Zea Mays
caacgacctctgaaaccctaaccaaataaacccaccgttcgaaatccccaaaggccaaaaccctcctccgaacccttcccgccgccgccacccccaccccgaccggcaccaccacctcctagctccaccaccgtccgccgtcgccgcgatggaagacgacccgtcgcgccaggtgcgcgtgcgcttcgtcacaaagctgccacctccgctgcggacgccgcccgctgccatcgccgtccccgcggacctcactcgcatgggcctctccgagatcgtcaacagcctcctcgcagccgccgagccggaccaccagtcgcagcccttcgacttcatcgtgcagggcgagctcgtgcggctgccactccaagagtttctcctagccaagggcatctccgcggagagggtgcttgagctcgagtatgtgagagcagtggcgccaaggaagcaggaggaaccttgcccccatgatgactgggttagtgctgtggatggatcaaacccaggttttatattatctggatgctatgatggtcttgcaagattatggaaagatgcagcagtatgcacacaaattttggagggacacaatgatgcaattacttctaccagattcatcaataagggatctgaaaccgagggcagtctgcatgtagtgactggctcaaaggataggtcactgcggctatacaagtgtgatacatcagtcattatggactacccaaagcgggttggggcttacaaaattctccgcggccacacggcatcggttaaaagtatctccgcagacccttctggcgatatgctatgttctggatcctgggatggtaccatcaagttgtgggcagttgaaggatctgatgacgatgatgctgtttcattgaagaagagaaggatgaattctgattcatctggacctgaagagtctcagttagaggtaccagctatgttctaatcctaaatcctgagtcttgtatgcagagcaccaag

SEQ ID NO: 144786 - DNA, 1098 bp, Zea Mays
gagctgagaatctctgcaagtgttctaccaagaacagctagacagatggtggacggtttacaggcccctctaccttgctctgaattcatgctggttcagaggagtgcgccgagaatacgcgccaccgacagggagggagataccagcggcaacttaacggacgtgatgacacgcgagttgataaatacacacacacactacggcattgtttgtattagtagcattatcattccatccggactcgagctaacctagctaccagtgccttcccttcgctagtacatttacacgattaataaatagcacgataaaaaaaagacagaccaatcgtccttcatgaatcatgatagagacaggcatcctaccagattacagagtacgcagaacgtgaggtggtcacagtcacagaggagcatctctctatatagtccagcacagtgctcctgaaacgcccttaccaaaagggcagtgctagctttctactagcaacaggcaggccatgtttccgaggccatactaaaagcgtcacgcgagcaccatggcggagaggagaagcgcggcgagggcggcggccagcccaccagctcttgggggaaggagcaagcccgccgccgccgcggtgtccatgctagcgtccgtgcctggtcctaggccgccgaacccggtacccgcagttccggcggcagtgcctgtccccatgccagcgccggctgtgcctgtgcctgtgcctgtggaggtccctgcggttcctcctcccatggtgcctgcagtggtcggggtcatggttccaacggcgctgggtgtggagggggcgcgtttacttgggtcgctggtggtgagggcggcggtgccggtgaagtcgcaggtggcgcccttggccttgttgttctggtagtagctgttggccgcccaggagcagtgcgccgcgacggtgttggggttgtagcacgcccccgtctcgtggatggagttgcagtccgcccccgacccgcacgcgtagtcgatcgtcttctgcagcgcggcctgagacgcgtcctgcctgcacacgcaccactctgcgccaaaaaaaaatgtttggttgtgtaaggtgtgtgctgc

SEQ ID NO: 144787 - DNA, 1492 bp, Zea Mays
ttgctacagcggggagacggctaggccaataaaaacacaggcaatcgaatagaagtttttttaaaaaaggaaggggagaagagctagaggggatgggtggcggcacggtggtgtgtgtcaccggcggcagcggctacctcgggagctggctcgtcaggaagctcctcggcagaggctgcgtcgtccacgccaccctgcggagcctcgcggacgagaagaagacggggctgctccgggcgctccccggcgcggcggagcggctgcggctgttcgaggcggacatgtacgacgccgacaccttcgagcccgccatcgccggctgccacttcgtcttcctcgtcgccacgcccctgacgcacgaccccaccagcaccaagtacaagaacacgacggaggcggcggtggacgcggcgcgcatcatcctccggcagtgcgcgctgtccggcacggtgaagcgcgtcatccacacggcctcggtcacggccgcgtcgccgctcaaggaggacggcagcgggtacaaggacttcgccgacgagtccaattggacgccgctcaacctctcctacgaattcaccaacgcttacctggacgactacgtgcggtccaagacgctgtcggagaaggagctactgagctactcctctttctcatcctcctcctcctcctcctcctcctccaaggaagacgaccggccccaggcgttggaggtggtcaccctagcgtgcgggctcgtcggcggcgacagcatccagacgtacctgtggggcagctacgccgcgatcgtcgcgccgctgacggggcaggcggtcagtcacaacgccctcctcttcttgcaggcgctgctgggctccgtgccgctggtgcacgtggaggacgtctgcgaggcccacgtcttctgcatggagcaggagtccatggccggccgcttcctctgcgccgccgggtaccccaacatgcgtgacatggtcgaccactttgccgcaaagcaccccgacctcaagatacagctgactcaggtgaccggagaaggtgtcaggattcagcccaacaccagcaagctggaggacttggggttcagattcaagtacggagtggaggagacgctggactgcagcgtcgagtgcgccaagaggctgggagagctctagatgcatgctacacatgcatgcgcagcattggaattcagcgactgtgatacgagtaagtatggtggtatcatgttaatacgtgtgtatattgggtcgattcatcccaccagagtttgaactgttccatattcccatctgtttcccgtgatcataaaataaaaacagtaaaatacatcaacggtcatcaaacttaacatgttgtattacttgggcctctaaagccttaaaaacagaaaaacggatgctagacatgatgacacatctaaaatcaggtctgctgaaagtggatgccaacttaatgtgtcatgctagagtcacttgaatcctcgagtgtgagcagtcgt

SEQ ID NO: 144788 - DNA, 1452 bp, Zea Mays
agcagacaagggaggggactgagaactgggaagccgacgctccgctcggcaaagcctgaggcggcgacgacgcttgatcgcagcccgactcacaccgtgaggagttcgagggatggctttcgctagtagaattggaaatgcgctcaggagaactttagcgcccacttgctccccactgcttcagccagtaagatgcatgtcctcttccaagctctttgttggaggactttcttttgccaccgacgaaaccactctgaaggatgcattttctgagtttgggaatgtacttgaagctcggatcatcattgatcgggaatcagggaggtcaaggggttttggttttataacttttacatccactgaagaagcctcagctgcaatgacttccatggatggcaaggaacttcaaggacgaaatataagggtgaaccatgccaatgaacgcgctggtgggatacgcgggggtggtggattcggagctggtggtggttatggtggtggaggtggatatcctactggtgggtatggcggtggtggatatagttctggtggtggtggaggatatagttctggtggtggaggaggatatagttctgggggttatgctgccaatggttacggtgttggatctggcagtggctatggtggcacctacagcaatgcatcaggtggtggatattcaggcagtgatggttacggcaatggagctgccagtggtggttatgctaacaacttgagcagcggatacaacagcaatggaaggtacaataccattggcagttctgatggaaacactggtgggtacaattcgtctcccaacccgtatggtgtaggcaactacaatactggaggttcgagttccagtggtggaaccttaggagagtttggtggtggaggttttggtggcaacaactttgctggaaatgttaccggggggttttctggcggtggggcaagctatggagctaacaagccgcaatacaatggcgacgacgacctgctgggcgaaggtttcttcgacaaggaagtggcagagtaaatgagggagcggcgtactcgcacctctcgcacggtgctgcggatcatttttttcccccaaactgcatcagatcggtcgtgctaaatggagcaaatagaactttgcctgagctcattaggatatagaacataatcctttgttcttttttattctgtttcagacaaggcacgtatgttattttatccactcagctagcgtagctttactacaactatattgtgagaagaaaaagttgttatatcaactatattgtgagaagaaagagtggttatatcttctcaacaagaaatgatgatagttcaggtgctaattttcttagcctttgtattcttacgtactagatagaaatgtccaaagtccaatgtcgttcccaataataaaaataaaaataaaactctagcatatgctggaat

SEQ ID NO: 144789 - DNA, 1540 bp, Zea Mays
agcagacaagggaggggactgagaactgggaagccgacgctccgctcggcaaagcctgaggcggcgacgacgcttgatcgcagcccgactcacaccggtaacgaattccttgccccaatcttcgggatacggcggcgattgttatcaccctacttatttacctgcctcagagctgcgtgcctgcgttcattcgaggcgtgcgctccttcaattttccctgacaccgatgcatagagttagatgaggagttcgagggatggctttcgctagtagaattggaaatgcgctcaggagaactttagcgcccacttgctccccactgcttcagccagactttcttttgccaccgacgaaaccactctgaaggatgcattttctgagtttgggaatgtacttgaagctcggatcatcattgatcgggaatcagggaggtcaaggggttttggttttataacttttacatccactgaagaagcctcagctgcaatgacttccatggatggcaaggaacttcaaggacgaaatataagggtgaaccatgccaatgaacgcgctggtgggatacgcgggggtggtggattcggagctggtggtggttatggtggtggaggtggatatcctactggtgggtatggcggtggtggatatagttctggtggtggtggaggatatagttctggtggtggaggaggatatagttctgggggttatgctgccaatggttacggtgttggatctggcagtggctatggtggcacctacagcaatgcatcaggtggtggatattcaggcagtgatggttacggcaatggagctgccagtggtggttatgctaacaacttgagcagcggatacaacagcaatggaaggtacaataccattggcagttctgatggaaacactggtgggtacaattcgtctcccaacccgtatggtgtaggcaactacaatactggaggttcgagttccagtggtggaaccttaggagagtttggtggtggaggttttggtggcaacaactttgctggaaatgttaccggggggttttctggcggtggggcaagctatggagctaacaagccgcaatacaatggcgacgacgacctgctgggcgaaggtttcttcgacaaggaagtggcagagtaaatgagggagcggcgtactcgcacctctcgcacggtgctgcggatcatttttttcccccaaactgcatcagatcggtcgtgctaaatggagcaaatagaactttgcctgagctcattaggatatagaacataatcctttgttcttttttattctgtttcagacaaggcacgtatgttattttatccactcagctagcgtagctttactacaactatattgtgagaagaaaaagttgttatatcaactatattgtgagaagaaagagtggttatatcttctcaacaagaaatgatgatagttcaggtgctaattttcttagcctttgtattcttacgtactagatagaaatgtccaaagtccaatgtcgttcccaataataaaaataaaaataaaa

SEQ ID NO: 144790 - DNA, 1596 bp, Zea Mays
agcagacaagggaggggactgagaactgggaagccgacgctccgctcggcaaagcctgaggcggcgacgacgcttgatcgcagcccgactcacaccggtaacgaattccttgccccaatcttcgggatacggcggcgattgttatcaccctacttatttacctgcctcagagctgcgtgcctgcgttcattcgaggcgtgcgctccttcaattttccctgacaccgatgcatagagttagagtaggcacaataatctgttttttttcttgggatgatcgtagttttgtctctgaccactaaacagatcgttttttctttctatgcccgtggctaacttctagtgaggagttcgagggatggctttcgctagtagaattggaaatgcgctcaggagaactttagcgcccacttgctccccactgcttcagccagtaagatgcatgtcctcttccaagctctttgttggaggactttcttttgccaccgacgaaaccactctgaaggatgcattttctgagtttgggaatgtacttgaagctcggatcatcattgatcgggaatcagggaggtcaaggggttttggttttataacttttacatccactgaagaagcctcagctgcaatgacttccatggatggcaaggaacttcaaggacgaaatataagggtgaaccatgccaatgaacgcgctggtgggatacgcgggggtggtggattcggagctggtggtggttatggtggtggaggtggatatcctactggtgggtatggcggtggtggatatagttctggtggtggtggaggatatagttctggtggtggaggaggatatagttctgggggttatgctgccaatggttacggtgttggatctggcagtggctatggtggcacctacagcaatgcatcaggtggtggatattcaggcagtgatggttacggcaatggagctgccagtggtggttatgctaacaacttgagcagcggatacaacagcaatggaaggtacaataccattggcagttctgatggaaacactggtgggtacaattcgtctcccaacccgtatggtgtaggcaactacaatactggaggttcgagttccagtggtggaaccttaggagagtttggtggtggaggttttggtggcaacaactttgctggaaatgttaccggggggttttctggcggtggggcaagctatggagctaacaagccgcaatacaatggcgacgacgacctgctgggcgaaggtttcttcgacaaggaagtggcagagtaaatgagggagcggcgtactcgcacctctcgcacggtgctgcggatcatttttttcccccaaactgcatcagatcggtcgtgctaaatggagcaaatagaactttgcctgagctcattaggatatagaacataatcctttgttcttttttattctgtttcagacaaggcacgtatgttattttatccactcagctagcgtagctttactacaactatattgtgagaagaaaaagttgttatatcaactatattgtgagaagaaagagtggttatatcttctcaacaagaaatgatgatagttcaggtgctaatt

SEQ ID NO: 144791 - DNA, 318 bp, Zea Mays
atggcggagaggagaagcgcggcgagggcggcggccagcccaccagctcttgggggaaggagcaagcccgccgccgccgcggtgtccatgctagcgtccgtgcctggtcctaggccgccgaacccggtacccgcagttccggcggcagtgcctgtccccatgccagcgccggctgtgcctgtgcctgtgcctgtggaggtccctgcggttcctcctcccatggtgcctgcagtggtcggggtcatggttccaacggcgctgtataaagaaagcaacgctgttagaattgtgcgatccttaagaaagcaacgctgttga

SEQ ID NO: 144792 - DNA, 1389 bp, Zea Mays
cctcatatagcggcagtccagtccacctcctccgaatccggcggtcgccgccggccatcgccgcggcggatatggcgtccctccgtgtggtgtcggtgctagtgttggtggcaatggcggcgagcgcgggcggcgtcgcggcgcggcctctggtcgggggaggcggggcgtgggagaacagggcgccgctgcagacgtcgcgccccttcaacatcgcgcaccggggctccaacggggagctccccgaggagacggcggcggcctacgcgcgcgccatcgacgagggcgcggacttcatcgaggcggacatcgaggccaccaaggacggccacctcgtctgcttccacgacaccacgctcgacggcaccaccgacgtcgccgaccacccggagttcgccggccgccggcgcaccctcgaggtgcagtgggccaacgtcaccggatacttcgtcactgatttcacgctggtggagctcaagacgctgcgggcgaagcagcgatgggacttccgtgacaagtcccacaacggcgtctcgccgatcatcacgttcgacgagttcatcgacgtcgcgctgaacgccaagagggtggtcgggatctacccggagatgaagaaccctgtgttcatgaacaagcacgtgcagtgggctgacgggaagaagtacgaggacaagttcatcgcgacgctgaagaagtacggctacggcggcaagtacatgtcgccggcgtggcgcgccaggccggtcttcgtccagtctttcgcgccgacgtcgctggtccgcgcggccggcctcacggactcgccgctcgtcttcctcgtcgacgacgtgaccgtgcggaccgaggacaccaaccagccgtacgacgagatcacctcaggcgagcacctggactacatgaagaggtacgtggtgggcatcgggccctggaaggacacggtggtgccgccgaccaaggacaaccggctggccacgccgtcggacctcgtcgcaatggcgcacgcgagggggctgcaggtgcacccctacacgtaccgcaacgagaacaagttcctgcacttcgacttccggcaggacccctacgccgagtacgactactggatcaacgatgtcggcatcgatggcctcttcaccgacttcccggcgagcctccgccggttccaggagtggaccgccaagaacaaagactgattgtgaggttactgtcttggtagcgggcttctttgattcagtcattcagatcgtagctctggagatgttttcagagtgtagagacaattctttggtgttccttgttttaaatagccatatattttcttgattggatcagtaacacagttcttaccggttgttcatcataacagaccagtaatgtgatctcatcttcaca

SEQ ID NO: 144793 - DNA, 2815 bp, Zea Mays
atgtgataatagtgtctgtattctgataattggtaattgatatccctattaaccatacaactgtccttttatagatgtagaaatccacttgccccctgacaatagccccacaaggcagccactcctaacattccccaccgcttaaaatgcggcttgcccccaagccgcgaaccatgatcgtcaagttgccggagaccatgcacagtccaagcacgcaaactccataggtggaggccacggttgcttgaatcctccactgtgagcaattcctgctaagtcatgaaccaggggctttaccatggaaccaagctggtgattgtccgtctcaacgcagctgagcaccttgcccagttcttccaccatttcattcagtatgccctctacaccaaggatgttggcagttgatgaatactgcctcagcatcgatgagtagctccacttatcaggcttggaacgatcatccatggacgccttcatgtctccgaagatctcctcagcctcgtccacatagtcaatgtcgacgtacctggatagaagcatgttgtagagcatcacgtccattgcttcatccttcatcagccggtacacagccatggcatcctcatcgtagtgtgccctggtgtatgcatgcaggagacaacagtaggtcaccttgctgtgctgcacctgcttgtcaatcatctccctgtggatgctcttcaccacccaaggttgcaatgcgtggcccatgacatacaacattgtattgcacatgaccaggtttggcttcacaccggttgccttcatttccttgaataagttgagtgcacggttgaagttgatgccgtcgttgctgaggaagtaggacgcgtcgctggcggtgaaagcgacgatgtccgcgcacgagatcttgcccgagcacgccgcctcgaacttggctttggcgatcttagcttggagcttcaagggcatgagcacgccacagatgctctcgagcatctcctggtcggaggtctttgggtccctgaatttgtacgcagcaaccaccttctccacgcccaggcccgtcagctgctccacgatgttggcattggcaatctcgtccgtctcgtcctgtgccatggcgtcgatctgggcgctggtcatctcgttggcgcgcgcgtagtcgcatctgccggagaaggcgatcagcgcgacagagtcgtcggggacggaggaaggcgccgcaagctccgactcggacgaccccaccgccccagcttgcggatgctgttgcgcgatggaggagctgctcgtggagcgccgggagctccgcggccgtgccgtgctggtgcagatcgcctcgaagccccgcaggttggggaagttggacccgcccacgatgcagaccacggggaggttgggaactgagtatgcgtcgtggttgaggacttgcatcgaacacttggtggacgtgggtgtgctgcacgccgtcgccgtcgttgtggcggcgaggatgctgttgagttccttgaggcggccctgtgctgtgacctcgctgaccctgacgcactcgtactccaggcggagattctggagcgcgctctccctgtcggcgacagcgtcattgaggcacacgttgtcgacgctcgcgtggagaaggcggtggtcggcggacgggttgctcagcgtctcaaacggttggccgcgatgcacgccgttgaagtgcgtgttgtcaccaccggtgagctccagcgagtccttggcggtgctggcctcagccaaggcctgcttgatgacgagcttggtgttgtcgcatcgcgcctgcgctacctcctccctggacgcgcgcacgccaccgaagagtatgcaccccttgtccaagtgattggtgtcgaaatcctcggcgcagtccagcctccggtcttcgggcacagagatcctgctagtgcccgcgcagatgggcgtgaggtggggcagcacggatccgtggccgccatggatggagctgttggcgaccgaggcgagcgaggcacccaaatcgtcgttgaaggaggaaggagtgtgtccgcgtgcggactgctcgccatagcagccagccagcgtaccgctgaggaggtcgatgcgctcgatgtcgacgagctccatggcgttgtcaccgagatccgcatcgcagtattggtcgaagacgggagcgccatagatggtcgtggatgtggtgaggctaggcttggtgctggacattttgtcgacgatgatatgctccgtagccggtgctgtgaagccgccgaaggcgttctggcagttcaccgaacacttggcaggcacaccttcgatgcaagcaatgagacgcttctcgcacgccgcgagctcctggaggaggtcgtcgtcggggttggcgagagtatcgacaaacggctgtggcgtggtgtagcggtcgtcgtcgtagagcggcgggatgtagcggtcggataccgagccggcgaggagcgtggtcgacgaagacatctcgtcggaccccaggaacgcgagcactgtggcggtctgctcgtcgcggtactgtgcgttgacgacggaagaaggaggcgcgaatccgtcgaaggaggaattgcgctcgcatgcggactgctcgccgcagcgaccagccagcgcctcggtcaagcgtgcctctgtgcacgccagcgcgtcgagaataccctgcatcgccgcctccatggaatcctcctctgataccaaatgttagcgacacagaagcttctagagaggtagcaggtagagagaaggtagcagtaacgtgcagagagggtccaggaaaggagaaggaaaggagaagacaagaggatatgtgataatagtg

SEQ ID NO: 144794 - DNA, 1614 bp, Zea Mays
aattttccgctcccatttacgccggatggaacaaaaaaaaatatcagcgagaaccctcgttttcttttttgtttagcagggggcacaagagcaagctgcaagcagattacagggccacgaagctcgcccctgctctgctctctatcttattagtccttcaattgggctttcctctgctgcggggttctgttctcgtctgggtttcagacgccagatttggagcagaacacaccggtccttggtttccttgccggctgcaatgttatggcgcttcgggggtatgtagagcctgaattctgtgatgacgggggagttagcggcgtggggagattttttctgtgctttgtcttttcttagctgagaaatctggtgctatttggtgctcgccgacgccgagccggagggcgtcatcgttgctgtgtcctctgtagctggatttgtggtcattggtagagagaagcgttcttcctcggggaatccgtgggaagaagcggtctccggtgcaatcccatggcttctagggatttcctgggagggttcggccgggatggagggcaagcgcctgtgggtggcgctggcgccgccccggggcccggcggggagtcggacgagatcgagctcagcctcggcctgtccctcggcggctgcttcggcgccgagccttcgcaggaggggaggagcgccgaccctcggctccagcgctcgtcctccgtcgcgtcgatctgctccttgcctgctgccaccaccggcaccagctgcggggcgcaggacgccggcccaggccccgccgccgcgcctccgccggacctgctccgcacctcctccctgcccgcggagtacatggaggaccggctccgccgccgcgcgatgcagagccagcggcgcctcgaggccaagcgcaagcgcctcgagcgccgcaactccatgagctcgggaaggccggttccggcggccggtggccgcgacgacggcctcgagcacaccgtgcccagcggcttccagctccgccgttcggtcgccttgacgacggcggggtcgccgacgcccagccggccgcagcaagggcccgcggaccgccgtgcggcggaggcgaccggaccggacggcgcggcctgccacgacgagccgcagccgctgccgctgcgcctgcgcacgctgcggtcgctgacgatgcggacggcgagcacgggcgacctccggagcgccatggcggaggacatgcccatggtgtcgtacaaggcggagggccccggcgggcgcaagacggacgggttcctgtacaagtacaggaagggggaggaggtgcggatcgtgtgcgtctgccacggcagcttcctcacgccggccgagttcgtggagcacgccggcggcggcgaggtccccaacccgctgcgccacatcgtcgtcaacccgcagcagtcggtgttcttgtagcgcccggccgcctcggcctcgcgatggagatggaggtggtggctgtaccgtcggagctgcagaagctggaaaccttctctctcttttttttttattttgctttgtttcttttctgtttgttttggtactcatgtagtcatgtggttgctattattattacaattattattaacagcaaca

SEQ ID NO: 144795 - DNA, 2236 bp, Zea Mays
ggctcttttccatctcgctataaacccttcacgccccggcgtccgcggctcgctcctgttcgcgccgccgactcgcctcgcgtcgcctcactagggtttgcagttcccgtcgcgggcgaaggcggcgtcgtctcgtggcggcgccgtctccgtgtgccttcccgctcccaagcaatggccttggaagatgggagcccagctacttttactccacaagtgattgctaatgcatttgtcaaacaatactatcaaactcttcgatatgccagagaggatgcctataaattctataatgacaaaagtattcttggtcgaacagattctaatgggaaaatgatttgtgtaaccacaattgatgatatcaaggagcaacttgtgtctacagattgtgctgactgtttgatagagatcgagactgttgatgcacagccatcccatgtggatggtgtgatcattttggttgctggatattttacaacggctgttgtgaaacagaagtttatacaatcattttttctcgctccacaggaaaatagtggctattatgttttgaatgatacattcagacttactgggatttcattcgaggtgaaggtagttgcagctaaccatgataacaaaagcacacaaattaccaccctgcccaatgagccagaaatagattcatttaaggagagtgaagtgccaggtgtaccacctgcaggaaacattctcgtcaatgatggagttatcagcacctctgcaaatgttgtttctccagttaagaatgaccctgttgttgagacatgtgtgaaagtggttaacgaggatgttgtgaagatacctgtagccgctccagcttcaactcctgttacagctgaggaagttgttaacaaggattttgtgaagattcctgagtctgctccggctctcccttcatcagttgagaaggctgctccagcacctcccgcatcagttgagaaggctgctgcagcacctcccgcatcagttgagaaaggtgctccagctcctcgcacaccagttgagaaggctgatccagctcctagtgcacctgttgagaaaggtgctccagctcttcgcgcaccagttgagaaggctgatccagctcctcgtgcaccagttgagaaggaagtaactaggaagacttatgcatcagttgttaaaatcccgagggaggacacacagcctgccccagctgccagaccctccaagcccaacctaaatataaagatggttcaaaatacggagaaaaatgtgtcctcaccatcgaaacctgctcatgctactgttaatgccctaccgggcgataagggtgttcctaaaaacaaatcacctgatgagccagggtactcaatttttgttaagaatttaccttttgaagcaactgttgaaatggtcgaacaagagttcagcaagtttggtgctattaaatctggtggtgtacaagtcaaatgccagcctgatcagttttgctttggctttgtcgaatttgagtctcagcaatccatgctagcagcaatcgaggcttctagggtttatttcggcacaagagaatcatatgttgaggagaaaagaactaaaacacgagttgttgatggtgttatcacccgtggggatgacaatggcaacggcggtggcggtcggttccattctggcagaggtggtggttactatggggacggctacaagcggcagtggggcggtcagaacaacggctactacaacggcgcggataacatgaggaacgactactcaggtcgtgtccgtggaccgcaagggaacggccaccctcagaacggccacggctaccatcagaacggccacggctactactctgggaatggctaccaacagcgacgccccaacagcaatgggaacggactgagggtcgagcgcaacaatggcttcaggcagcaaggccctgcatctgcctagaccttgtcatttttgcagtccatccttgatacgaaagcagtggggatattttgatgtctataggtagatactttgtcatggctgaattttgttgtcgcggttgataagagcaatcgtgcgtcctttgactggaactgtaatgaggagtggagtcagtcgtgtcgcaaaggggaaaaaaacatctatcgaaatccctgctactcttttgtcgtgctgtcctcttcaagctgtctgcgtgtacatcggtttttctgcttagcaattggactgggcggagacaagcttctctccaattctcaca

SEQ ID NO: 144796 - DNA, 2172 bp, Zea Mays
ggctcttttccatctcgctataaacccttcacgccccggcgtccgcggctcgctcctgttcgcgccgccgactcgcctcgcgtcgcctcactagggtttgcagttcccgtcgcgggcgaaggcggcgtcgtctcgtggcggcgccgtctccgtgtgccttcccgctcccaagcaatggccttggaagatgggagcccagctacttttactccacaagtgattgctaatgcatttgtcaaacaatactatcaaactcttcgatatgccagagaggatgcctataaattctataatgacaaaagtattcttggtcgaacagattctaatgggaaaatgatttgtgtaaccacaattgatgatatcaaggagcaacttgtgtctacagattgtgctgactgtttgatagagatcgagactgttgatgcacagccatcccatgtggatggtgtgatcattttggttgctggatattttacaacggctgttgtgaaacagaagtttatacaatcattttttctcgctccacaggaaaatagtggctattatgttttgaatgatacattcagacttactgggatttcattcgaggtgaaggtagttgcagctaaccatgataacaaaagcacacaaattaccaccctgcccaatgagccagaaatagattcatttaaggagagtgaagtgccaggtgtaccacctgcaggaaacattctcgtcaatgatggagttatcagcacctctgcaaatgttgtttctccagttaagaatgaccctgttgttgagacatgtgtgaaagtggttaacgaggatgttgtgaagatacctgtagccgctccagcttcaactcctgttacagctgaggaagttgttaacaaggattttgtgaagattcctgagtctgctccggctctcccttcatcagttgagaaggctgctccagcacctcccgcatcagttgagaaggctgctgcagcacctcccgcatcagttgagaaaggtgctccagctcctcgcacaccagttgagaaggctgatccagctcctagtgcacctgttgagaaaggtgctccagctcttcgcgcaccagttgagaaggctgatccagctcctcgtgcaccagttgagaaggaagtaactaggaagacttatgcatcagttgttaaaatcccgagggaggacacacagcctgccccagctgccagaccctccaagcccaacctaaatataaagatggttcaaaatacggagaaaaatgtgtcctcaccatcgaaacctgctcatgctactgttaatgccctaccgggcgataagggtgttcctaaaaacaaatcacctgatgagccagggtactcaatttttgttaagaatttaccttttgaagcaactgttgaaatggtcgaacaagagttcagcaagtttggtgctattaaatctggtggtgtacaagtcaaatgccagcctgatcagttttgctttggctttgtcgaatttgagtctcagcaatccatgctagcagcaatcgagttgttgatggtgttatcacccgtggggatgacaatggcaacggcggtggcggtcggttccattctggcagaggtggtggttactatggggacggctacaagcggcagtggggcggtcagaacaacggctactacaacggcgcggataacatgaggaacgactactcaggtcgtgtccgtggaccgcaagggaacggccaccctcagaacggccacggctaccatcagaacggccacggctactactctgggaatggctaccaacagcgacgccccaacagcaatgggaacggactgagggtcgagcgcaacaatggcttcaggcagcaaggccctgcatctgcctagaccttgtcatttttgcagtccatccttgatacgaaagcagtggggatattttgatgtctataggtagatactttgtcatggctgaattttgttgtcgcggttgataagagcaatcgtgcgtcctttgactggaactgtaatgaggagtggagtcagtcgtgtcgcaaaggggaaaaaaacatctatcgaaatccctgctactcttttgtcgtgctgtcctcttcaagctgtctgcgtgtacatcggtttttctgcttagcaattggactgggcggagacaagcttctctccaattctcaca

SEQ ID NO: 144797 - DNA, 3498 bp, Zea Mays
atgggccttgcgatgcagcgggagcatcaggaccagggaggacacacacaccacgccgaaccgctactcccccgcctctgcctcagctctgaccgttcactgccgtgccccctcctgcccgccacggaaccttctacgcctccggaggaggactctcccgtcggtggcgccgccgcgccggccacaccggtcgtcgcgcctgaatgctgcgatcgtcctgcaggccgcactacgcctgaccgggccgacagccagctcgcgaagatgcacgccgggacgacgcgcggcgacggcggcacgcggggcctccagcgccgattcggctgcatggccggcattttccagatcttcgaccgccatcggctcatcgccggggccggccgccgcgccgcccggcaggcgcagaagaggctgcctccgccttcttccgctccgccaggcaaaactcaacatccaaagagcagcagcgatgttctagttcaaagttcaagtgcgtcgaagatcgttctggagaaaacattgagcaaatgcacgaccgagaacagcagcctttccatcgaatcgtcaagcgattcgtcttcctcctctccgtgcacgtccttctcctccctcgatggcaacaaatcagtccaacaggagcttccttacaccagcgaggagctctttgcgcagaggccactgaagagctcgccgagtctgagggaacctgacatgaacgccaagtctggccatcctaatgccggtttcagagacatagtgaaggactgcatcaaccgggactccggaggcctgacggtaaaaacttcggtgcacgaggcaaggagaaatgggcagcacaaggactcaccgaggccactgctgctgtccaaatcaatggatgggacctgtatcattgggatcgataggaccacaaatgttcctgcaaatgtcaatggatctagaaggtgtttgcaggagcagtcacgcttttcttgtgatgaccgaaggctcctgcgaccaactgaaacccaggaaagcaagaggtcttcctcgaggccaaaggagcttcctagattgtccttggacagtaggaaggagtctctgagtccaggctcacgtcagaaggacctcggttacaagagaactgatgatattcttctggatactttgaggcctcaagattcccctagccatagcagagctaacagtgtcattgccaagctaatggggttggaagaagcaacaaatgctacaggagtgctcactgccgatagctgtgaacccacaaggtcaccgagaccagctcagaccactcaatatgggcatccatcacgctcccccagaggcacttgccaggattcctgcagcatgcagctgaagaacgagtcctcagtactgaaaaccaagccttccccacgaattctcacagaagcagctccttggagacagcaggaaagaagtgtcaccaatatctgtcgagaagctgaagggaggccaaggattgcatctgtctatgctgatatagagagaagggttgggggcttcgactttttagagtgtaataacaaggacttcagggctctcagaatattgggtgcattgaatgtgagagatgctaagaacaagaatgacagcagtggcagaccaatggctactcacagaacaggatatgacctaaccacctctggaagcttccaggctcctattgtggtcatgaagcctgcaggaaccactgagaagcatggggtttcacttgcttctgttgcccccatagcaggcctcagaagcctcagaaagttgccagctagatattcatctttcactggcacaaatgaggccagcacaaatgagaatattcatcttcagatgtcaagagctcaattgaagtctgaagaaactgtcagcagtgccagctcaccaaggcctacaagctcatcgaaccccagaaatgtgctaaagaaggcagaacctgaaagaagatcccgtccacctgtttcaccaaaatctccaagcaagaagtccaatgaagctgtctccccaaaaggaagaacaagatcaaagccttctcaggtgaaaagccaccgtgatgaggtcttgcatagtacagggaacagaataagcttagctaagcaggttgacgtcagcgttatagattgtccaaagcctccgggtggcaactcaaccttcgttccaccaagcaatgctgctgcaacagcaagtcacaaggctccttcaattctggattcagaccaaaacattcattcactggacaacattccaagccctgtctctgtccttgatacatccttctatcataaaaggatctcagattcattcaaagatggtgagacacattcttcagaggaatgctggaacccaaacagcctgcctgacacaccacagtcaaaagcgagcagtgaagccaaccagattaaaccagaaaatttggaagttctgatccagaagcttgagcagctacagtcaatgaacgaagaagacgcaagtatcaaagaagtcatggcatcagtcactgcaaataaagatcaccagtatatctatgagatactgttggcatctggtcttttgcacaaagaacatagtatcacggcattacctgctcaactccaaacatcaaattatccaatcaatccggagctcttcctcattcttgagcaaacaaaaccagacttagttttcgcattccaagctgtcagtggaactaagaaaacttgtaagccttacacagggaagcttcaccgaagacttgtgtttgacctggtaaacgaaacaatagctcaaaagatgatcatctgcagatctggaagccagccagcaaagtttcttcaatcaaggaagttgagtgggtggcaactattcaaggatttgtgcactgaggttgacaggcaaataaaatgcaccggggaggaggagaatggaaacatgatattagatgaggatacagtcaatggaacgaaagactggatgagcttcgacactatgctacatggcatagtttgggagattgaacgatccatcttcaagggtcttatcgacgaggttatcggcggtgagactatagagaagatgcaatttgggcaaaggaaactgcagaggcagctttctttcagtagtataaactgaatatgcgtcgtagcagtcatttccatggaagcttataacaactagtaaatgtgacagtttctattttttctgaagactaaactgtacaagtataaatgatcctcaacactagtcttgctgcctgactattgcaattcgagatttgtgtgacatgactactgtttgactctactaccggtcaaggcgattgaagtgcacagtaccccgcgtgtgcatggtggacccattatatcaagtgtttataggaatgtcgggtagatgataacttgagataaagttctcgttttttgcatttattgttacggatgatgttgcggtcaaactgtatgccgcaaatgtaccaataagcactatattgtccatgcggctacaacggct

SEQ ID NO: 144798 - DNA, 741 bp, Zea Mays
tcttctcccgtatctttttcttttcacggcttgcttccctgtttcgccatggctggagatctccctgcgttctgcaccgaggagatggatcgcgagatcttccagcgaggagtacccattggggcgggcatcaccaccgccgggcatggccggggcgccgcagctacgggccacacagccacccccgcggatcctggccgagccgccgctgggcttgctcgcagcgtctccacagccgcccccgcggatcctggccgagccaccgctgggcttgctcgcagcgtctccgcagccgcccccgcggatcctggccgagccgccgcggagcttgctcgcagcgtctccgcagccgcccccgcggatcctggccgaggcatcgccgccgcggagcttggtcgcggcgcctccgcagccgaccccgcgtatactggccgaggcgtcgccgccgctgggcttggtcgcggcgcctcttcagccgcccccgcgggtcctgtccgaggcgtcgccgccgcggagcttggtcgcggcgcctccgcagccgaccccgcgtatcctggccgaggcgtcgccgtcgcggtgcttggtcatggcgcctctgcagccacccccgcgggtcctagccgaggcgtcgccaccgtggggcttggtcgcggcgcctccgccacggggcactcagctgctaccgcggggattgggcggggggggggcatccgccataggccgcgtagatgttcagattga

SEQ ID NO: 144799 - DNA, 1739 bp, Zea Mays
cggcccgtgccctttctttgcgttaaaggcccgtgcgtgtccgcgccgctactcgaccgcccagtgcatgcacgcccgatactgctagccaaggccaagccagtgcaggcgcggtggtgtgtgttgttctcgtcgcgcactcgccggcagcgatggagccccgccgctccgtgctgctcctggccctcgccgtcgccgccgcgctctccgtcgcagtggcttacgacccgttggacccgaacgggaacattaccatcaagtgggacatcatgtcgtggacgcccgacggctatgtcgcggtggtgaccatcaacaacttccagacgtaccggcagatcacggcgccggggtggacggtggggtggacgtgggcgaagcgggaggtgatctggtccatggtgggcgcgcaggccacggagcagggcgactgctcccgcttcaaggccaacatcccgcactgctgcaagcgcaccccggccgtcgtcgacctgctccccggcgtgccctacaaccagcagatcgccaactgctgccgcggcggcgtcgtcagcgcctacggccaggacccggccaccgccgtcgccgcgttccaggtcagcgtcggccaggccggcaccaccaaccgcaccgtcaaggtgcccaagaacttcacgctgctggggccggggccaggatacacctgcggccccggcaaggtcgtcccctccaccgtcttcctcacgcccgaccgccgacgcaagacacaagccctcatgacgtggaacgtgacgtgcacctactcgcagcacctggcgtccaagtacccctcctgctgcgtctccttctcctccttctacaacgacaccatcgtgccctgcgccaagtgcgcctgcggctgcgagcacaagacctgcgtccagggcgactcgaagcggctggcggtgacggggaagcacgcgcacacggcggcggcggtgcgcgggcagcaccgggacaaggaggcgccgctgctgcagtgcacgacgcacatgtgccccgtgcgcgtgcactggcacgtcaagctcaactacaaggagtactggcgcgccaagatcgccatcaccaacttcaactaccacatgaactacacgcagtggacgctcgtcgcgcagcaccccaacctcgacaacatcaccgaggtcttcagcttcggctacaagcccgtcgtctcctatggatccatcaatgacacggccatgttctacgggctcaagtacttcaacgaccacctgatgcaggcggggccgtacgggaacgtgcagtcggaggtgctcatgcgcaaggacgccagcaccttcaccttcaggcagggctgggccttcccgcgcaaggtctacttcaacggcgacgagtgccagatgccgccgccggacgcctacccctacttgcccaactccgcgccgccgacagccgcggcgtcgctgggcggcgcagcggcagcggccgtcgtggtgctcttgggcatgatcgtggcatgagaaaacacgggacatcgatcgacctagtgctaggaccggcacaggggaatggaaaaaagacgttgctttcttctgtagatagagagaccagagacctcggtttgggtttcaggaatggtttggaactttggatgtttttctttcagtgtagatggacaagccatgattttgcaaggaaaattaacatgtgcatctctcgtcagataaaattgtgcaaccccttctagtgacgagggcggttat

SEQ ID NO: 144800 - DNA, 1626 bp, Zea Mays
ctcctcctcgggggcacgggacacgagcgcagtatgtatccgtgctgctgctctgcggtgctgctcctggccctcgccgtcgccgccgcgctctccgtcgcagtggcttacgacccgttggacccgaacgggaacattaccatcaagtgggacatcatgtcgtggacgcccgacggctatgtcgcggtggtgaccatcaacaacttccagacgtaccggcagatcacggcgccggggtggacggtggggtggacgtgggcgaagcgggaggtgatctggtccatggtgggcgcgcaggccacggagcagggcgactgctcccgcttcaaggccaacatcccgcactgctgcaagcgcaccccggccgtcgtcgacctgctccccggcgtgccctacaaccagcagatcgccaactgctgccgcggcggcgtcgtcagcgcctacggccaggacccggccaccgccgtcgccgcgttccaggtcagcgtcggccaggccggcaccaccaaccgcaccgtcaaggtgcccaagaacttcacgctgctggggccggggccaggatacacctgcggccccggcaaggtcgtcccctccaccgtcttcctcacgcccgaccgccgacgcaagacacaagccctcatgacgtggaacgtgacgtgcacctactcgcagcacctggcgtccaagtacccctcctgctgcgtctccttctcctccttctacaacgacaccatcgtgccctgcgccaagtgcgcctgcggctgcgagcacaagacctgcgtccagggcgactcgaagcggctggcggtgacggggaagcacgcgcacacggcggcggcggtgcgcgggcagcaccgggacaaggaggcgccgctgctgcagtgcacgacgcacatgtgccccgtgcgcgtgcactggcacgtcaagctcaactacaaggagtactggcgcgccaagatcgccatcaccaacttcaactaccacatgaactacacgcagtggacgctcgtcgcgcagcaccccaacctcgacaacatcaccgaggtcttcagcttcggctacaagcccgtcgtctcctatggatccatcaatgacacggccatgttctacgggctcaagtacttcaacgaccacctgatgcaggcggggccgtacgggaacgtgcagtcggaggtgctcatgcgcaaggacgccagcaccttcaccttcaggcagggctgggccttcccgcgcaaggtctacttcaacggcgacgagtgccagatgccgccgccggacgcctacccctacttgcccaactccgcgccgccgacagccgcggcgtcgctgggcggcgcagcggcagcggccgtcgtggtgctcttgggcatgatcgtggcatgagaaaacacgggacatcgatcgacctagtgctaggaccggcacaggggaatggaaaaaagacgttgctttcttctgtagatagagagaccagagacctcggtttgggtttcaggaatggtttggaactttggatgtttttctttcagtgtagatggacaagccatgattttgcaaggaaaattaacatgtgcatctctcgtcagataaaattgtgcaaccccttctagtgacgagggcggttat

SEQ ID NO: 144801 - DNA, 1616 bp, Zea Mays
tacggctctagtccgtaagcacacaagtaaacagtaaatgacactagaccccactttgtgcgggacccaaacacagtgagagagtgttgtcacaataaccccaaaaaatagggcaaggagccctcagcacccgcggcgagctaagcaatttctccacgctttgcaccgcgcatcgcatctccccccttcctcggttcctcccctttcgccctacttgcttcccacgccagggcccgagctccgagctagggtttcctctctcgccgccgccgccgccgccgacgtcgacggagaagaggagtaggtgaagccgagttattagcgccaggggaggaacatggggacgccggagacgtcgcgggagccatgcccggaccggatcctggacgacgtcggcggcgcgttcgggatgggcgccgtcggcggctcggccttccacttcatcaagggcatctacaactcccccaacgggatgcgcatgtccgggggcgcgcaggccgtgcgtatgaacgcgccgcgcgtggggggcagcttcgccgtatggggcggcctcttctcaaccttcgactgcgccatggtctacgcgcgccagaaggaggatccctggaactccattatcgcgggcgccgccacgggtgggtttctctctatgcgccagggcatgggggcggcgggccggtccgcgctcatgggcggtgtccttctggccctcatcgagggcgccggccttatgctcaaccgcgtcctcgccaacccgccgcttcccgcggaggatcccaaccttaccgcggccatgggcgacaaccctttcccgggcctgccacaggcgccgccggtcgtggcacctccggaagtggcgagctccagcggcgcgggtgggtggttcgggggactgattggcaggaaggacgaagagaagaaatccagcgcgggcaagtcggagatcttggagagcttcgacacgcccagcagtccgataccatcgttcgagtacaagtgaggaaaaggttggctgatgccactgttgcctgcacggccttgcagatgctgtgatggggtctggaattggtgatgcatgtcagcaatacaataaccgacaggacaaaagagatggtatgcggcttaagccttttccgaaacgtggcagcttggctacttctcgagatgacgtagtatttgtagaagcaacagcagtagtatactgcccaatattatagcattcgtgttgtgcaatgtaatgcacgtgagaacgcttgtgtggttgtgcctctggctggcctctaaacggacgtcttttttgtggtcttattagtcgagtcgttcaactgcgccaagtcttgctgcagtttttttgttttgttgccactgtgtctgagcctcgggtggcctggtgtaccttcgaggctgctgttaagcagggtcttgtcagtcagggcagggacctttgttgccgcaattagtacggtacgtaaactgcccatctcggtgggtaagctaatcgaccaaggactagtgctgtggtaacggatcctgattcaaatgtttatttataatttgttaggactctaaataatttttagtttgaaaataattagaattagagattgatctttaaa

SEQ ID NO: 144802 - DNA, 1440 bp, Zea Mays
aaacccccgcgtccaatcaaaacacgacagcgggacgagcgaaaccaccgtggtttcgccaaaccgctttccttcccatctaaaaccgccccctcccttcctcttctcctagctctcttgcctgcgcaccactcgagtcgagactcgagaggcacctgatctttccttcccgtcttcctcccacacgtccccatcaccattgctgcgacgagagtgagcgggagagggtaggtggcgaggcggcggagatggggcgggggccggtgcagctgcgccggatcgagaacaagatcaaccgccaggtgaccttctccaagcgccggaacgggctgctgaagaaggcccacgagatctccgtgctctgcgacgcagaggtcgcgctcatcgtcttctccactaaggggaagctctacgagtactctagccattccagcatggaaggcattcttgagcgttaccagcgttactcatttgaagaaagggcagtacttaacccaagtattgaagaccaggcaaattggggagatgaatatgtccggttaaaatccaaacttgatgcacttcagaagagtcaaaggcagctgttaggagaacaattgagttcactgaccataaaagaactccagcaactggagcaacaactggacagttctttgaagcatattaggtcaagaaagaatcagctcatgttcgattcaatttccgcgcttcagaaaaaggagaaagcacttacagatcaaaacggtgtcctgcaaaagttcatggaggcagagaaggagaaaaacaaggctttgatgaacgcgcagctccgggagcagcaaaatggagcatcaacaagctccccatcactttcaccaccaatagttccagattccatgccaactctaaatatagggccatgtcaacatagaggggcagcagaatctgagtctgaaccgtctcctgctcctgcacaagcaaacaggggcaacctgccaccatggatgctccgcactgtcaagtaacaggtgaggtcttcccagtgtagttttgcagctgatctcgacagcaacacacctgtcaccgaaatgcttcggtgaccctagatatcaaccgatgcacgatccatctcgatcctgtgatcgaataccggcgtaggtactaccaataaagtcaggccccgtcaaatgctttacatggtgattgaagtctggagcttctcagcaccaccatatattgtgttcagttcctgtgtttattgccatagctaccctttttttctctgatctacgagctagacgtagctttgtgcttggagattccactactatgtttcctctgtcctgtgtatgctttaacggagatgcacgttgtacccgtggtaatatatataaatttgcgttgtaaagatcaagtggctcttttctccgaaatgttatgaagtctcaggtgtcaaacatg

SEQ ID NO: 144803 - DNA, 1436 bp, Zea Mays
aaacccccgcgtccaatcaaaacacgacagcgggacgagcgaaaccaccgtggtttcgccaaaccgctttccttcccatctaaaaccgccccctcccttcctcttctcctagctctcttgcctgcgcaccactcgagtcgagactcgagaggcacctgatctttccttcccgtcttcctcccacacgtccccatcaccattgctgcgacgagagtgagcgggagagggtaggtggcgaggcggcggagatggggcgggggccggtgcagctgcgccggatcgagaacaagatcaaccgccaggtgaccttctccaagcgccggaacgggctgctgaagaaggcccacgagatctccgtgctctgcgacgcagaggtcgcgctcatcgtcttctccactaaggggaagctctacgagtactctagccattccagcatggaaggcattcttgagcgttaccagcgttactcatttgaagaaagggcagtacttaacccaagtattgaagaccaggcaaattggggagatgaatatgtccggttaaaatccaaacttgatgcacttcagaagagtcaaagctgttaggagaacaattgagttcactgaccataaaagaactccagcaactggagcaacaactggacagttctttgaagcatattaggtcaagaaagaatcagctcatgttcgattcaatttccgcgcttcagaaaaaggagaaagcacttacagatcaaaacggtgtcctgcaaaagttcatggaggcagagaaggagaaaaacaaggctttgatgaacgcgcagctccgggagcagcaaaatggagcatcaacaagctccccatcactttcaccaccaatagttccagattccatgccaactctaaatatagggccatgtcaacatagaggggcagcagaatctgagtctgaaccgtctcctgctcctgcacaagcaaacaggggcaacctgccaccatggatgctccgcactgtcaagtaacaggtgaggtcttcccagtgtagttttgcagctgatctcgacagcaacacacctgtcaccgaaatgcttcggtgaccctagatatcaaccgatgcacgatccatctcgatcctgtgatcgaataccggcgtaggtactaccaataaagtcaggccccgtcaaatgctttacatggtgattgaagtctggagcttctcagcaccaccatatattgtgttcagttcctgtgtttattgccatagctaccctttttttctctgatctacgagctagacgtagctttgtgcttggagattccactactatgtttcctctgtcctgtgtatgctttaacggagatgcacgttgtacccgtggtaatatatataaatttgcgttgtaaagatcaagtggctcttttctccgaaatgttatgaagtctcaggtgtcaaacatg

SEQ ID NO: 144804 - DNA, 228 bp, Zea Mays
aagtttttttgttttcatatcttcagtatttaatctttcttctacccttttggctagttaatcaccatcctgcaggttttacagcaataaacagttcgatagtttattttatgaaacctaattcaacattttggggttgattcgatttgctctcaattcatgtagattagatgagattggataaatttaataaatcacaaacaagttaaaacattttgtcattttttt

SEQ ID NO: 144805 - DNA, 336 bp, Zea Mays
atgtcgaaggatggccccgactctgactcgttgtcgtcgtcgcatatatcgaaagacggccctgagtccgactcgccgccgttgcagatgtcgggggacggctccggcggccgggacaggtgggagccggatctgagcggcggaagcagcaggcgggcaccgccggaccaggtgctggggaacgtgacgcggaggaggactccgactcgccgccatcataggtgtcggaggacgatcccggcggcggggactggtgggagtacgaccctcaaattagtgaatgctattaacacaaccccaaagttgtcccaaaagcgatgtctaggatttgagtag

SEQ ID NO: 144806 - DNA, 122 bp, Zea Mays
gctatttaaatgctacttaatatgtattgcaatctggttttcttgtacataactgctacaattcctgttccaatattagttccaatattaatcggaagctactgcagcctagcaaaatttcc

SEQ ID NO: 144807 - DNA, 1417 bp, Zea Mays
aagccacccaggggcccaccccgtggatcacgcacctgatcccgcgtgccctggcccacgcggtgggcggacggccccggccccgccagcgtggcggaaacggacggcatcggtggatgccggctggcccccagacttatcgacaaacaaacggccggggccgcgacacgtcgccccctggatgcgttcttatccccacgatgcatccgacgaccgctgccccattctccactccgctctctcaaactccccggctccccgctctcccccgcccgtccagctcgtgctccgcctccgctgctctgccctcttcctcctctgcgtttctcctcagagctgtttgacttgaccggacagtgctgttcggtggctcggccgcgatgccggactccgacaacgagtccggcgggccgagcaacgcggagttctcgtcgccgcgggagcaggaccggttcctgccgatcgcgaacgtgagccggatcatgaagaaggcgctcccggccaacgccaagatctccaaggacgccaaggagacggtgcaggagtgcgtgtcggagttcatctccttcatcaccggcgaggcctccgacaagtgccagcgcgagaagcgcaagaccatcaacggcgacgacctactctgggccatgaccacgctcggcttcgaggactacgtcgagccgctcaagctctacctccacaagttccgcgagctcgagggcgagaaggcggccacgacgagcgcctcctccggcccgcagccgccgctgcacagggagacgacgccgtcgtcgtcaacgcacaatggcgcgggcgggcccgtcgggggatacggcatgtacggcggcgcgggcgggggaagcggtatgatcatgatgatgggacagcccatgtacggcggctccccgccggccgcgtcgtccgggtcgtacccgcaccaccagatggccatgggcggaaaaggtggcgcctatggctacggcggaggctcgtcgtcgtcgccgtcagggctcggcaggtaggacaggttgtgaccgtcgccgtccatgcttgcatggccatggccatggcatggctcccgccgccggcttcttgcttggtgtcggtaattagcgctggtggcctgcgctggttaagttaaccttcggttttccccccttttcttttcgtggtaagtaatgttgtgctgaatggagacagtgatatggttaagatagctccataacatctcggtaattaatcctgtgatttgtactctaaagctgctgctaaactgagctatgacacaatacaaatgctgccattaacatttgacatgcttattagggtacctagtatgttacgactctggtaactactgaccgtgacattttttttctattttattaccctcacagttgactgggaactacttaattgg

SEQ ID NO: 144808 - DNA, 97 bp, Zea Mays
ctgctgccgccgcggctgccttgctgacccccacacggccacgccattgcctccgattcgccacagcagcagccagcagttcgaatgaatgaggcag

SEQ ID NO: 144809 - DNA, 1604 bp, Zea Mays
ttttattatttttattaacatttatacgtctaaaatttgtcttaaaagtagatttaatacatagaaacgaaaggactacatggcagagtgatctaacaatcaatctaaaccagctggtaactaacaatgatagagggactgacaaacactgccagcttaatctatcagtcgctgcctccattttccacaaaaagaagcttatccagtcctatggatctcttgccatatgtcatccttgcaagcggataacactagtccttggcatggtctagtgcgggtttcttccgctgttgtgcatgccggttcacgaactccgcgacgtcacccacaaacttcttgctgtccgcgaggtcgtccaacacgtagaaggcgtggatggcgtccgggtactccgccacggtgacctcctcggagcacacggcgcggagcgcatccgcgtacgccctctgcctgtcctgatgcacgtcccacccgccgacgcacaccagcgtgggcgggaacgcccgccaccggtccgcgcccgcgcccgcgtcgcgcctgatcgcggcgggcacgttggcggcctcgtggtcccgcgtggcgccgggcggcaggaacgcgcgccacagccacgccagccgctcggggctcccgaacggggcgtcgcggagccgcatctccgaccccgtcggcgcctcgccgctgaagaaaggctgcacggcgaggaggcccgcgacggcgtcggggggatacggcagcgcgcctgccgcgccggcgagggcccaccggagggctgcctcgccgtcgtcgtagggagccgggaagcggtgctcgggggcgaggcggtagtcgacggaggcgatgacggccgggatggccgacgccgcggagtggaagacgaaaccgccgccgtggaagtacacgaccaccgggagctcgttgccgccgccgggggtctccgggacgaaaaggcgggcgcgcaggtggtcggagacggcgtggtccgtagatgccacgccgccgaggggggccgtcggggtgggcggtgcggcgcggtcgaagagggagagcaggaagcggttaacggtgccgtcgcggcggagcgaggcggcgtgcagcgcggacgcggcgcccacaagcagcctcgcgcgccacggcagcgggggcttctctggcctcggcggttggtctgacgcggccatggatctccctgtcctgtccctcggtatctcgtgcaggcaggccgctgatgaatgatgataagggcagtggcagtggagcagatgacgagtccttgtcattgaggggcgtttataatcgctcgtcttcgtctcccacgcccgtgggccgccggatccaccgtcgcagcgcttgtctcccagactcccacgcatcggagatgcgggccgcgagagcgagccgttccttcttgcctgagggctgtcgccagactcctgttgtgtcacctcgcagcgcatgggaacagagaagcgccgccatgcgcgaggtggacgctgctgttagaaaacctttcatgtgatctaattccgaggggtgcgatgtgtctcctcactatgtatatatatatgtacacacttcatgagatcaatacaacagttcggtca

SEQ ID NO: 144810 - DNA, 444 bp, Zea Mays
aggctcccgttttaaagcgccgcacccgcacccaccgccctcctcctctgtgctagactgtcatcatcccttcctccttccccacgcgtacacacactcccgcggcagccaccatcccggagctcgagaccagcggcaccaggccaggagggtgacggcccggcgactcagtcgagcgccactcccatggcggacaagatctccacgatcgtcctcaaggttgaccttgaatgcgagagatgctacaggaagatcagaaaagtcctctgcaagatccaagacgaacaagcccttagggagttgagttgtgcatgtgaacagtcgatgcttaattgcttatggtgtctatctagtgtgggtgatgaaagtataacgacagtacagtaccagtagtttgtttagatgaaagcatggaacaccttgagtgctcttgaaaatgtcaaa

SEQ ID NO: 144811 - DNA, 1605 bp, Zea Mays
aggctcccgttttaaagcgccgcacccgcacccaccgccctcctcctctgtgctagactgtcatcatcccttcctccttccccacgcgtacacacactcccgcggcagccaccatcccggagctcgagaccagcggcaccaggccaggagggtgacggcccggcgactcagtcgagcgccactcccatggcggacaagatctccacgatcgtcctcaaggttgaccttgaatgcgagagatgctacaggaagatcagaaaagtcctctgcaagatccaagacaagatgaacatcaagacgatctcgttcgacgagaagagcaatgccgtgaccatctccgggccgttcgacgccgacacggtctgcaacaagctctgctgcaaggccggccgggtcatcaaggcgatggacgtcaagggcaaggacaaggacggcggcaaggccgggaaggagggcggcggcgacaagcccaaggacgccggcaaaccggcggcggccgagaaggacgcaggcaaggccgggaaggagggcggcgccaaggcggagaagaaggaggagaaggccgagaagaagaaggaggagaaggccgataagaaggaggggggcaagggcgacaaggaggcgaagccggcggagaagggcaacaaggacgggaaggcggaggccaagaaggtgaagttcgccgaggtccccgcggcggacgcgaagcccggcaaggccatgccgcccggcatgaccaaggccgacctgggcccgctcctggagaagatgatggcggccaaggccgggtccgagccgcagccgatcgcgccgccgccgggcgccgcgcagggcgtggccgtgccgtccgtctggcccgcgcccgccgggtccgtgtccggctacggctacggctacaacccaggctacgaggcgccgccgccgccgtcctactacgccgctggcgccgggggcggctacggctgcggctgcggcggctacaacggctactgccggtgcggcaagccggccgcgcccgggcccggcgggtactacggcgtgccggtgtacgatagccaggggtggtactacggcggtggcggcggcgcccggcagccgtactacccgcagcagcactgctgcgaggaccccaatgccgggtgcagcgtcatgtgatggcgatgcgcgccagcccgtggattggatggacagacagagcaatcagtgtgtggtcacagtcacacagccatagtgccatggccagtgccggagtcggggagaaaggaacttctgtttttttcccgcgtgtcgtcttgttcttgtttatgccccgtggattctgtttatttatttattttagggcttgttcgttttggagtggattgaagggggattggaggggattaaatcccctcctatacaaatttgtataggaggggatttaatccctcaatccttcaatcactcaaacgaacaagcccttagggagttgagttgtgcatgtgaacagtcgatgcttaattgcttatggtgtctatctagtgtgggtgatgaaagtataacgacagtacagtaccagtagtttgtttagatgaaagcatggaacaccttgagtgctcttgaaaa

SEQ ID NO: 144812 - DNA, 378 bp, Zea Mays
aggctcccgttttaaagcgccgcacccgcacccaccgccctcctcctctgtgctagactgtcatcatcccttcctccttccccacgcgtacacacactcccgcggcagccaccatcccggagctcgagaccagcggcaccaggccaggagggtgacggcccggcgactcagtcgagcgccactcccatggcggacaagagatccaggacatacaaaccccagagtgaacttcgatacggacactctagaaaccttattggagttagcttcggtagtttagtacgtactcaaccagaggggcagagggtatggcgagtgaagtacagagcaagcaaatgttccctggccctcttctgaccagaatccatttccccagcg

SEQ ID NO: 144813 - DNA, 100 bp, Zea Mays
ccctcccatctgtgcgcagcagctcgcgcgtctccctctgcaaccaaacaaaaaaacagagccgctctattccagtctactctgcaaccaaacaaaaaac

SEQ ID NO: 144814 - DNA, 1578 bp, Zea Mays
actgaccacctccctccccggccggccatctctcccgagctaaactgtggcaggcagctagctgttacgagctagctccgcgcgcgctaggcggcgtcacgtacgtgctgtgatcaactgtctagttctccactcgacgcggacaccctgacccgcgcgcgcgccgtggccatggtcgccgccgccgggcgcaggcggcgccgctgcgcggccgccatcctcctggtcctgcccgtcgtcgccgtcctcgcgtcgtcgtccgcggcggcggacgggtcgttcataacgtgggacgacctcagcacgccgtccgccgccgccgtgcagggcggcgtgaaggcggccagcgggggaggcgcccgcgagctggacacgatcgtggtggcgcaggacgggacggggcactcgcgcaccgtgcagggcgccgtcgacatggtgcccgccggaaacagccgccgcgtcaagatcctcgtcaggcccggcgtgtacagggagaaggtgacggtgccgatcacgaagccgttcgtgtcgctcataggcatgggcagcggccgcacggtgatcacgtggaacgccagggcgtcggacatggaccgctccggccaccaggtcggcaccttctactccgcctccgtcgccgtcgaggccgactacttctgcgccagccacatcaccttcgagaactccgcgccggcggcgccgccgggggccgtggggcagcaggcggtggcactgcggctgtccggcgacaagaccatgctgtacaggtgtaggatcctggggacgcaggacacgctgttcgacaacatcggccgccacttcctctacaactgcgacatccagggctccatcgacttcattttcgggaacgcgaggtccctgtaccaggggtgcacgctgcacgcggtggcgaccagctacggcgcgatcgcggcgtcgcagcggagctcggcggaggaggactccgggttctcgttcgtggggtgcaggctcaccggctccggcatgctgtacctgggcagggcgtggggccgctacgcccgggtggtctactcctactgcgacctcggcggcatcgtcgtgccccagggatggagcgactggggcgaccagtctagaacaaagacggtgctgttcggggagtacagctgcaagggcccaggggcgagcacgaggaaccgggtgccttggtcccgctcgctcacctacgacgaggcgcggccgttcctcggcccgagcttcatcaacggcgagcagtggctcaggctgtagatccgatccgtcctcccggctgccgagctgagcttcgtcgacggcgagctatggtccctccgtccgagctgtgtgtaggtcatgcgacttctctggtcttcttcggtgcatatagcgtgacaagcaagcagctagtcagactgtagacatgtacgctgtaccatatactactagtaccatgtacaaacctgatacccatatgtgtagtgagatactgagatggccatgtccatcattcatggcaagatacatagtagtttgcatgcatgtatgtgaaggaaaacaggggaggccaaagtccgatac

SEQ ID NO: 144815 - DNA, 464 bp, Zea Mays
ccagggtcttcctcgtcttcttcatcttcgtcatcatcgtcgccatcgccctcgccatcgccctcgccgtcgtcatcgtcgtcatcggactcggggcgctcgttctcgtcggcatccatcttgtccaggtatttgagcgtccggatcatctcgaagaccctggatctgtagtccttgacacgggtaacggggcactcgtagaggtcgagcgagacgaggcgcaggtcggcgagtggcgcgaggtggtcgagaccgccggcgatgcggttgtcggagagggtgagccgcgtgaggttccgcagccgcgggaaaccctcgagcgacgtgaccccgacgccagcgatcgaaaggtgctccaggctctggtgccgctccagtatctctgccgccggcagccgcccgtgcgtgcacttgacggcgccgtcaagcgtcaggctccgcgccggcgacgagctcccctcgcc

SEQ ID NO: 144816 - DNA, 1539 bp, Zea Mays
cgcatagccgcatatatttggcagcaggagcggcctctcacttgcttcgacgtatttctctatctatcgatacggttcaagggaccgaagaaggtagagagagaaacttgaaggggagaggaaggagatacaggttcatgttcatttaggtgtcagttcatctgatttctcagaagcaaaatgttgtttggagctcagtgacaccattttgtaatgcatgtgccttttacgggaaatggaggatcattatgtccatcccaagtctaagtctaaccatggctccttgtcaggaaatggttatgagatgaaaaatccaggccatgaagtttgtgatagggattcatcatcagagtctgatcgatctcacccagaagcatcagcagtgagtgaaagcagtctagatgaacacacatcaactcaatcagacaatgatgaagatcatgggaaggataatcaggacacattgaagccagtattgtccttggggaaggaagggtctgcctttttggccccaaaaatagattacaacccatcttttgcttatattccttatactgctgatgcttactatggtggcgttggggtcttgacaggatatgctccacataccattgtccatccccagcaaaatgatacaacaaatagtccggttatgttgcctgcggaacctgcagaagaagaaccaatatatgtcaatgcaaaacaataccatgcaatccttaggaggaggcagacacgtgctaaactggaggcgcagaacaagatggtgaaaggccggaagccataccttcatgagtctcgacaccgtcatgccatgaagcgggcccgtggctcaggagggcggttcctcaacacaaagcagcagccccaggagcagaaccagcagtaccaggcgtcgagtggttcaatgtgctcaaagaccattggcaacagcgtaatctcccaaagtggccccatttgcacgccctcttctgacgctgcaggtgcttcagcagccagccaggaccgcggctgcttgccctcggtgggcttccgccccacagccaacttcagtgagcaaggtggaggcggctcgaagctggtcgtgaacggcatgcagcagcgtgtttccaccataaggtgaagagaagtgggcacgacaccattcccaggcgcgcactgcctgtggcaactcatccttggcttttgaaactatggatatgcaatggacatgtagcttcgagttcctcagaataaccaaacgtgaagaatatgcaaagtccttttgagatttgctgtagctgaaagaactgtggttaggttatgagtttcttcctggagactgatccatacatgacatgctacctcgtgctgagtttctgaggtgaagccatcgaaacatgaccgtgtggttcagtacccttgctgccttcagtgtctgataagctagctctccagtttgcagtttctctgaattccagcatgtctagtctctgcttatcttttgcatgtaacgtgatggtgacttagcatacacatctattcatccatctatgttct

SEQ ID NO: 144817 - DNA, 1144 bp, Zea Mays
gtatgcttctatttgtctgctgtaaatttatagatgtcaggacatgtactctacattcatgttcttctgaactggactgtcacaagttttcttcacttctgcacaactagttgctaagaaggatagtgtgtatcagctttatgctaacttctatgcattttgcgctgaaagtgtttcctgctatatagattgaaggaaagtgggcagttgggctagacttgtatcctgttttctccaacaatcattttcctctcatgttacataatacatatattctttaccagtttttgaattgcgggcttagtatttacatgctttaactgctttgtactgtatgaatcaaggagtatgtaaattggtctattgcatgtgccatagtttgaattccatgtgcaggacttgtctagacaggcatacacagattgtgttacttgccacctgaacattcctgctatatcagtttaagaaaaatgggcagttgagttaggccagatattttactgtggttttctcaacaatcatttttctcatattgtatccctacaaacaactccttggttaaaacttttgtttgccttgaggaatgctttaggtttaggcctatattcttgttttcgtgatggagtgatgtttcatgtgcttccatgattgattggaattgtactgttaaagcatttgttggtgcaggatttttgtatcggcagcatgctaattgtgcaatgttaccgagcggtcctgcaaaatcgatttcagggaggatggccttctccgcgcttagtgttgtcaccgaatgcattaagctgtcccctctatatgactttggtgaattctgtgtatttgattttggggaagaactttgttggttgtttgcgtttgtgttttttgtaaggattgcaaacagcctaggcgagttgctactgtgtttgtttgggactggtaattccatcactacattacctctttaggtgctccataagggctcctttgggagcaaggatacccggggttttaggcccttcaatctcctctgctatcattgctcccaaacaaaaaaataggaaaggaatgtattagtgtaatgcaatctctgtaaacagtcatgatgacttttaaataactctcactgtgcatgagctttcccctg

SEQ ID NO: 144818 - DNA, 1296 bp, Zea Mays
cgccgccgccgcgccgtaccgccggcctctccaccgttcattctccaatggcgtcgactcacgcaatcagcaagaagcggaagttcgtggcggatggcgtgttcttcgcggagctgaatgagatgctgacccgcgagctcgcggaggatggctactccggcgtcgaggtccgcgtcacccccatgcgcaccgagatcatcatccgtgccacccgcactcagaacgttctcggcgagaagggccggaggatcagggagctgacttctgtggttcagaagcgcttcaacttcccggagggtggtgttgagctctacgcagagaaggtgaacaaccgtggcctctgcgccattgcccaggccgagtcgctacgctacaagcttcttggtggactagccgtgagaagggcatgttatggtgttctcaggtttgtcatggagagtggtgctaagggctgtgaggttattgtaagtggtaagctcagggctcagcgtgctaagtctatgaagttcaaggatgggtacatgatttcttctggtcatcctgtcaacctatacattgattcagctgtgagacatgttctattgagacagggtgtgcttggtatcaaggttaagattatgctggactgggatccaaagggcaagcaagggccaaccatgcctttacctgatttggttacaattcacgtgcctaaggaagaggatgaattcttgaggcctcttgcagctgaaatccaagttgcctgaagtaaaaaagtagttccagtgaggcctacgcctgtggttgtggtcctcctttttttgtgtaatgttcattattaacatgtcgaaagtaaaaagagctttactttctacagttgcaagcagtggatttttgtatcggcagcatgctaattgtgcaatgttaccgagcggtcctgcaaaatcgatttcagggaggatggccttctccgcgcttagtgttgtcaccgaatgcattaagctgtcccctctatatgactttggtgaattctgtgtatttgattttggggaagaactttgttggttgtttgcgtttgtgttttttgtaaggattgcaaacagcctaggcgagttgctactgtgtttgtttgggactggtaattccatcactacattacctctttaggtgctccataagggctcctttgggagcaaggatacccggggttttaggcccttcaatctcctctgctatcattgctcccaaacaaaaaaataggaaaggaatgtattagtgtaatgcaatctctgtaaacagtcatgatgacttttaaat

SEQ ID NO: 144819 - DNA, 1324 bp, Zea Mays
accgcacaaaccctaaccaatcattctaccaatccatgtcaccctctatatatttgcactcctcccgtgccgccgccgccgcgccgtaccgccggcctctccaccgttcattctccaatggcgtcgactcacgcaatcagcaagaagcggaagttcgtggcggatggcgtgttcttcgcggagctgaatgagatgctgacccgcgagctcgcggaggatggctactccggcgtcgaggtccgcgtcacccccatgcgcaccgagatcatcatccgtgccacccgcactcagaacgttctcggcgagaagggccggaggatcagggagctgacttctgtggttcagaagcgcttcaacttcccggagggtggtgttgagctctacgcagagaaggtgaacaaccgtggcctctgcgccattgcccaggccgagtcgctacgctacaagcttcttggtggactagccgtgagaagggcatgttatggtgttctcaggtttgtcatggagagtggtgctaagggctgtgaggttattgtaagtggtaagctcagggctcagcgtgctaagtctatgaagttcaaggatgggtacatgatttcttctggtcatcctgtcaacctatacattgattcagctgtgagacatgttctattgagacagggtgtgcttggtatcaaggttaagattatgctggactgggatccaaagggcaagcaagggccaaccatgcctttacctgatttggttacaattcacgtgcctaaggaagaggatgaattcttgaggcctcttgcagctgaaatccaagttgcctgaagtaaaaaagtagttccagtgaggcctacgcctgtggttgtggtcctcctttttttgtgtaatgttcattattaacatgtcgaaagtaaaaagagctttactttctacagttgcaagcagtggtaatcaatgtattatttctgcttctcactttagttttgtttgtttttatcttgctgctctgtattatcctgttattcacttgacttgccttgtagttacagtttatactttctgctagtgtgttatttagactgatgtttcctttggcaaaaattcatgagttgttaattgtttgcctactatggtcctgcaggatagtgtgtatcagcttcacgcaattttgatgcgtcttttgctgaaagtgtttcctgctatatcaatctgaggaaaatgggcagttgggttaagcatatctgctttctccaacaatcattttcctctcatgtactcagaaacatattttgttttttatatgctatcgtcatctgctttgttggttagtttt

SEQ ID NO: 144820 - DNA, 976 bp, Zea Mays
gccgcgccgtaccgccggcctctccaccgttcattctccaatggcgtcgactcacgcaatcagcaagaagcggaagttcgtggcggatggcgtgttcttcgcggagctgaatgagatgctgacccgcgagctcgcggaggatggctactccggcgtcgaggtccgcgtcacccccatgcgcaccgagatcatcatccgtgccacccgcactcagaacgttctcggcgagaagggccggaggatcagggagctgacttctgtggttcagaagcgcttcaacttcccggagggtggtgttgagctctacgcagagaaggtgaacaaccgtggcctctgcgccattgcccaggccgagtcgctacgctacaagcttcttggtggactagccgtgagaagggcatgttatggtgttctcaggtttgtcatggagagtggtgctaagggctgtgaggttattgtaagtggtaagctcagggctcagcgtgctaagtctatgaagttcaaggatgggtacatgatttcttctggtcatcctgtcaacctatacattgattcagctgtgagacatgttctattgagacaggtttggtgcttggtatcagatgttatcttattatgcaaacatataacaaaatagctgttagtaatactctagttgacttggcttcagggtgtgcttggtatcaaggttaagattatgctggactgggatccaaagggcaagcaagggccaaccatgcctttacctgatttggttacaattcacgtgcctaaggaagaggatgaattcttgaggcctcttgcagctgaaatccaagttgcctgaagtaaaaaagtagttccagtgaggcctacgcctgtggttgtggtcctcctttttttgtgtaatgttcattattaacatgtcgaaagtaaaaagagctttactttctacagttgcaagcagtggtaatcaatgtattatttctgcttctca

SEQ ID NO: 144821 - DNA, 104 bp, Zea Mays
gaaattcctaaactaatgctgctgaaggaaagtgcaatggaactatggttcttaaggcgtcgcctagtcgtccgggcgccaaatccatggtgtcagctgtcgcc

SEQ ID NO: 144822 - DNA, 3679 bp, Zea Mays
ctaaaggaggcctggtttccctgctcccgtaagccgcgtgcgctctctcgctctcccagagtcccagcgcgacgactggcgaccgccgcccccaccctgcgccacgtgccgagggcttcgccgggcccttcgccgctcgccggcgacgagcacacaccagatccaccaatctcgggcctgttccctttcaatacacgtgggttgttgtcgaaaatgaaccaatgcccccctcaatctctcccaacataaatggattgtggaaatttatattgtttctgagcgaggactacaatatacatgtattacatccactaccttcgttcgttatccggtatcctatactgatcgccccctgcctcaagtggatccacaatggttctgcctcgtcgaaccccagaactgctggaggccgatgaagcccaaagctttgtgcataagcttcagctcagtgtctcggggggccttcctcatgctgtgccagtgccaggcttgagaacagaagaacatgagctggttaaagctgttttccaggtgctgcaaggcttcgagacgtcctggttctattgggacagtgatgtgccttggtaccgtgagaaagcggggatatatgtggctcacttgtcactgacgggtcttaggtctttgttgagtccattcctgttcacggcaacatgcttaaagcaagtagagctttttgttgggaaggttaggatgcaacatcacaagattccgacgttggatgcgttcgctagctcggttgattcttggcttaagaggctccgcaaagcagctctgaaggaggaagaacagcaatttgtttcagtcaacaagactataactctgctgggattaactgattcattgtcaagtttacgttctggagcagaacatttgtctcaagttttgcatggagctgtgccagatggcttttgggattctggtgcacatatggcatctagtgaagttgcagttcatattcttgaccatctcttcaagaagttaaatgaagtatgtcttctggaagatggcgagggtgaaccatttcatatgctgctagtgatatttactggaagtttattaccttatcttcaatgtcttgattcctggctatatgatggtatccttgatgacccttatgaagagatgttcttttatgcaaataatgcggttacaatagatcagccgtcattctgggaaatgagctatatgcttagagtaagaggttcaagagttgacagttcaacaactttaactgagagcgaatctatcaagaaaaaaggatcaagcaataaggaatctactactgcaggagcttgcttgaaagtgaacaatcaaggttgtgtgtatatattatgcccaacatttttgaaggatgttgcgagggccattgtatctgcgggaaaatcctttcaacttgtcgaacatgttcaagacgtacatcagattcaaactcacaaaagtacacatcggtccaatttgtatcaagatactaattgcagtggtcaacagaaattttggccagatatgtcaaatttaagaatccatgatggtcctccaagaaataaagatgctcttgaagtatccacaagtcagtttgggaatgattctcgtgaaatgggactcctaaccttgtctgagatcttcttgatatgcatatctggtctgttagaaaatggtgaccatgtatatgagtacttaagaacactgcatgctgataatgttccaaataacaatgcttttatggaaaatgagagcaacttgaaagaaacagagggtacatgcacagggaacatcattgagaagacttgggtaaagctcctaaaggatgctacatcaggaaggaaatgtaatggcatggaggagaccatacatgctgttatagataaggcaggatttgcctctggttgccccaaagatgcatcttccaatgtcgtagaaggggttttcactttatcttgttacgaaaacccagctatcactgcttgcagagaagtgctaatgaggaacccagcttcttggagtgaactgaatatatctgaaagttttcatctccctccactgaatgatgggaacatgcgaagagctatatttgctgatgggcattctgcaggaactagcactgattataagtttggtttccagtttgatgatctggaacatgtccgccaagaagatgacagaaggaccttggaggacctttacgcatttccaacccttcttccttgcgcaaaagaaaatgcgctgctgtcagaaattttacctatgcagaaagatagtacactagcatcgagagttttgaagtttattcagaatatgagcatgaaagatccccttcagccagtgggtatcatccaagaatgcctttccaaatgtataaagagacaggtcgatctcataggcaatcaaatcctgtgcaagctaatgggtgaatggagattaatggatgaactgtttgtgttacgtgctatttatttgctaggatcaggtgacatgttgcagcagtttctgataacaatttttgataagcttgatagagggaattcctgggatgacgactttgagttgaataatttattgcaggaatccataagaaactcagctgacaaaatgctcctgacagcaccagattctttggttgtttcattagcaaaatatgacacacacaatggtgaggaaggtatatcaacttccaaaaaaggtcgtgcacttggttttggcattgatgcccttgacatgctgaattttacatataaggtgtcttggcctcttgatctaattattaatacagaggcactgaagaagtataatcaggtaatgggattcttactgaaggtcaaacgagcaaagttcgttttggatgaaacacgaaagtggatgtggaaggccagaggcaggaccgcgcacaatttcaaacaacacctaatagtggcacagaagctcctccattttgtcgatgcatttcatcagtatgtcatggaccgagtttatcatagtgcatggactgagctttgtgatggcatgacggctgctaccacactggatgaagtcatggaagttcacgaggcatatctctcttctattcaacgacaatgctttgtggcctctgataagctgtgggccctcattgccagtcgagttaagactattcttggattggcactggacttccacaatgtagaacaaactctcagtaccggtgggacggcttcagctgtgaggacacgatgcgagatggaaatcgaccggattgagaagcaatttgatgagtgtgtcatatttctcctgaggatcctatctttcaagctcaatgtgggtcatttcccccatcttgccgatctagttacaaggatcaattacaatcactatttcatgtctgatagtgggagcttctctgctattcctgggtcccggccacggtagtagactagtagagcaagcagtggacagaattgttggtgttgcacctgggtgatttttcctacccttttttgagaagaaccagaggcgtggtttgtttactttcgaaatagaaagctccagaacagtgctaatgcttctctctccaaattggaacaaaaaatcatgcctcgggcttgttacaatatctatatgtagattgttttcaaaaggatgacactaaaaaaggtggcataaaatgcggctgaacctgttacatttt

SEQ ID NO: 144823 - DNA, 1269 bp, Zea Mays
gcgcgcccgtggcccgtaaaagacaccaacccacttctcgaatcgaatccaggtccagggacgccgctacccgccgtccttcacccccgccatgccaacgctcggcatctcgccgctgctggacgcctacttccggcgccgcttcgccgcagcgggcctcgtggaggcctccgtcccgctggacggcggcgccaccacggtccactgctggcgcttcccgccggggtccgccgacggcgaggacgacgcccgtcccgtcctggtgctcctgcacggcttcgggcccccggcaacgtggcagtggaggcgccaggtgggccctctctcgcgccggttccgcctcgtcgtcccggacctgctcttcttcggcggctcgtccacgtcggcgggcgccgggcgggtgtccgaggcgcggcaggcggaggcggtggcgaagctcgtggcggccctagtggcgccgccggcgcgcgtgtcggtggccggcaccagctacggcgggttcgtggcgtaccacctggcgcggctgctgggccccggcgcggtggaccgggtggtgatcgccagctccgacctcctcaaggccgacgccgacgaccgcgccctgctccgccgcggcggcgccgagcgcgtcgaggacgtcatgctgccgcgctcccccgagcggatgcggcgcctgatgcagctcgcctaccaccgcccgcgccgcttcacgcctggcttcgtgctccgggatctcgcccagtatctgtacagcgacaaagtagaagagaagaaggagctaatcaaggggataacgctgggcaacaaagacaagttccagcttacacctctcccccaggaagtccttgtgttgtggggagagcacgaccagatattccccgtcgagaaggcatttcaagtggcaaggaaacttggagcgaatgctaggctggaggtcctcaaggacaccggccacatgcctcaagaagaggatccaaagcggttcaacgaggcaatcctcaacttcttgcttccagctccaaagtcgtccttgtaacgcgatatatatcccatagttattcacttattattattcaggcccaaggatcaccggagagttcacgatttcgatatgcacattctgcccgatcagtgcagtctttgtcgctttggtatcacctcaccttcaagattgattatggaggaattggaaagtatgttatggaaactattgctatttatctgccaatatatatcttcccgtggaatgcatgcttggattaatttgtc

SEQ ID NO: 144824 - DNA, 2071 bp, Zea Mays
attctccacgagaccacgatgcctcttccatcaccgctctctacttctccttcgcctgcaagccagccagcctccattcgcgtggccgccaaaggcgccaaccgccggcgagctatgacaccatcggtctcctgcccggtcaagtgccgcccccacccctgccttgccccgcagccaccagcgccatcaccggagcttctcgccgctcgcggcgccccgatcgccggcgagctgcgggcgtgccggagccctccgtacttgcctctctcgcgctctgccgactccttggaactccgggcggcgtgccgcggcgctccgcctgccagccgagcccgtgctgccgtggcgctgggcggtgacggcccgtccgcggcgctgatagccggcgcacagtcgcgtcacgccatcttccgcgacgagctcgtgcggagagccttcactgccgccgaagcggctcaccgcggccaggtgcgcgcgagcggcgacccgtacctacaacactgcgtggagacagcggcgctgctcgcggagctgggcgccggccctgccgtcgttgctgccggcctgctgcacgacacggtcgacgacgcgggcctgggctacggtttcatctccgagcatttcggtgccggtgtcgccgaccttgtaaaaggggtttcaaatcttagtcatctgagcaaactggctcgtagaaacgatacagccagtagaattgatgaagctgacagattacgtatagtcttccttgcaatggaagatgcaagagctgtgctcattaagcttgctgacaggctacacaacatgaggactctggattctttgtccaagactaaacagcagagcgttgcaaaggaaacgttggagatatttgctcccttggcgaatcagttgggcatcttgaattggaaggaacaacttgaaaacctgtgcttcaagtatctttacccagaaaattttgatgaactgtcaacaaaacttatcgagatctataacatagatatgattgcagctgcaacaagacgacttgaacaagcccttcaggtgagaggactatcctattatgccatatatgggaggcacaagagcatgtacagcatctacagaaaaatggcaaggaagaagctggtcatggataaaatttatgatatacatggggtgcgtgttattctcgagaataaggctgattgttttgccacattagagattatccatcacctatggcctagaattcctggcaagttcaaagattatatcaacagccccaaacccaacaggtatcagtccctgcacacggttgttctcactgaacaaacgctgccactcgagatccaaattcgtacgagggacatgcatttgcaggcggagttcggaattgctgctcattggagatataaggaaggtgaacggagttgctgcacctctgtttctgaaattgttgagtgggtcagatgggttacatggcactgtcaaactctgaacacaggctatccttcatcacttgcatgtgatgcttcatcgaaggaaacgcacactatcccatctcactctgacgcctgtctgttgtcctactcaaaacaatgtgatcacaaagggcccgtacttgtaatacttctggagaatgaaaagatgtcagtgcaagaaatcccccaaaattggacgatactggacctactgaaaaggtcttcaaactatgggatgccgttgaggctgaggctgaactgccatgccgtccacaactggaaccaggagctaaaaatgggcgacgtgcttgaactgatcccttcgaccccatgcaaatccagaggtcacacgagggagctccaccagaagtttgatcaccgtctcgccgtttcccagtcctgacagccttagaacaccgtaccttgtaaatacatgacgtgaacccatataaatcatctgaagtttagatttcccctgtgcagacaaaatagagatgaggagtcatcaaaactctgtaaccgtcgtatactcattcaagccaaaacaagacagcatgtaatgtaaatcagtatatacatgatacacatggttttagctcaggaaatgacaa

SEQ ID NO: 144825 - DNA, 1024 bp, Zea Mays
tattccatcttttctctaacgtggatcgaattgcagatggagacagttaaaagcccaccaccaccatcagatccaggcccagcccaacagccctttacacctcacagcaaaaccctaggaaagcctcatcaatggctctcgctctcccatccgtcatccaacggcggacgcatgagacacctgccttataagatcacgccattcccatctcctagggttttctccacctccatcacccgcctccactcccccctcccaggtgctgcccaggtaagtcggcggcggcgatgacaacgcgcttcaagaagaaccgcaagaagcgcggccacgtgtccgccgggcacggccgcatcggcaagcacaggaagcacccgggaggtcgcggtaacgccggtggcatgcaccaccaccgtatcctcttcgacaagtaccatccgggctacttcggcaaggttggcatgcgttacttccataagctccgcaacaagttctactgccccgcggtcaacatcgagcgcctctggtcgatggtgcccaccgacaaggcggcggaggccggcggcgacaaggccccgcagatcgacgtcacgcagttcggctacttcaaggtgctcgggaagggggtgctgccgccaaagcccattgtcgtcaaggccaagctcatctccaaggtcgccgagaagaagatcaaggcagcaggcggcgccgtcgtgctcaccgcctaggtttcagtccttgttcgcctcctggttttgaaatctatatctgaactgatagtgctttcctgtctcggcaatttgtgttaagaaaacctgtagttttaaaatatgtggttcctgcctgtttggcagtgcttatgcggtttttgatgccagttcatatcaaatatttcacatcaattaaatctatcctcgctatcagttgtgctagtttcatctatacattcgacttatggtgctcattgtggggtctttgctgctgtgaaattcataactgtgcttgttgcaagattattagaaactat

SEQ ID NO: 144826 - DNA, 408 bp, Zea Mays
atgttgttgccccgctcgtcccgcgcatcctcgccgccgctctccgccgcgtccgggaccaggactcctcccgtccgcgccgcggcggcggccttggcgtccgccgcgctacggcccctcacggatgcgctcctccacgagcaggaccagtgcgcgcagctagcggccgcgctcgccacggccgccgctgtcgaggcgtccgccgtcaccttcgaccttgcttcctacctccacaggctccaaccgcgcctcctcaagttacttcgcaacaatgccttcaaggcgaagcccgcgctcatcaccctcatcggcgcctgcgcggccatgggcgtcaataccgaagtcaccgcctccatcacgtgcctccacgatgcaatcgctagcgatggctgggcatcgaggaagtag

SEQ ID NO: 144827 - DNA, 901 bp, Zea Mays
cacgcgctcacggggaaggggaagtagatggaagcaggcggcggccacggccacgaccggcagcttgtcaccgtaacagcagcggagggcgaggagccgccgatctgacctattcctagttgcgcgcgtgtcccgtgaggcgggagctctggaggccatggagagggagccggcggtcgaggaggaggacgacgacgaggaggaggtggcgtgcgagtgctgcggcttcacggaggagtgcacggcgccgtacatcgcgggcgtgcgcgcgcggttcggcgggcggtggatctgcgggctgtgcggggacgcggtgggcgaggagctggggcgcgcggggaccccgcccatctcccccgccgaggcgctggaccggcacgcccgcgcctgccgcggggcgtccgcgccgccgtcgcccgcgggcagccccgacgggctcatcgctgcgctgcgcctgctgctgcgccgcaggctcgggtccccgccggcgtcgaggaaggcgcggtccacgccgagcagcccgacgcgcgacgccgccgaccccggcgtctccgccctcgccgcgggggcgtcccggagctcgctggcgcgcacggggagctgcttcgccgcgctcgtcgaatgagaaggggaaacgaggacggactgacggaaggggaaaagatcagggtagtctctctctctctctattttgccttcaatgtgtaatgtatttctgctcgtttctatctatggaggagtgcgtaggtagtagtactagaggtgccaataaacatccgtgtatatatatatatgatggggaggaagatcgacgacgatctgtgttatttatgatatagtatacacttgtatgagaaaaaggaagtaattccatgtttttctcaggcacggatcagtgaga

SEQ ID NO: 144828 - DNA, 1372 bp, Zea Mays
aaacgcggtttggtggaccctgttctcatctcagcacggcaggcacggctgagcgaacgctcctccttccaaacccacgccgacaccgatgccgagagccggggtgtccagcagcgagagtagccgccgtggcgccggtgcgttcagaaccctctccgaagatcgccgcatcaccgtattctgctccgacggtcgcctctaccaagtcgattacgcgtggaacgctacgaagctggcgggcgtcacctccgtcggggtgcgtgggaccgactccgtatgcgtcgtcggccagcggagggcgaacacgcacgcgcccaaggacaaattgctggacatgaccagcgtttcgcgcctgttcccgatcaccgaccggctggggttgctcgccacggggatcgcaggtgaggggagagcattggcacatgaggcaaggaatcaaactgcagaatttcgtttcaattggggatatgaaatgcctcctgatgttttggcacaatggattgcagacagagcacagatctggacccagtatgtttccaagagaccttctggagttgttgccatgattctgggcattgatgatgagaaaggaactccacaactctttacatgtgatcctgctgggtattttttcggtcacaaggcagcaagtgctggccaaagagatacggaggctgtcaactttcttgagaagaaaatgaagaacaatccttcactaccatttcaggaaaccattcagatggcaatatcagcattgcagttcgccctgaaggctgacctcaaagcctcggaagtcgaggttggggttgtcaggacggatgatccaactttcagagtgctgacagaagctgaaatcgatgagcatctggaagccatcaacccagagccgcggcactctgaaatgctccccggtttattccgggataaactgacattggagaactgaaaccatggcgacctcagctgcattttgggcaccggaaagtcaaagctttcatgtggttctttacgacggctctatggacattggattagcggtttttgggcggttttttcgttccagtgactagcggttttcagtggaaaaacggtttggtaaacctactgggcacacacgaccggccatccgccaagtcaggcgagccccgcgcggtcagtgcttgacgacgtggtatcacagccgccgtctaccgtccctcagcggacggccgggccaattcatgcatcaccgagcaataccgagcaatactgacatctaaaatgttctttagccgtaccatatccaagcaatgaccatagcactagctatgaacgtggtaattattatggtttccccgttacttttcttccttaagaaatatatgccccttca

SEQ ID NO: 144829 - DNA, 1283 bp, Zea Mays
accagcggatatatatactggagcctggcgagatcaccctaacccctcacactcccatccagccgccaccaggtgcagagtctttcgtcatctcttctccggcgaagaacccccagtcgcccaccagatcacttgttaaactttgttgaggggtgatggcggtttctttcgcaaacctcaactccgaggcagggcttaaaaagcttgatgagtaccttctcactcgcagctacatcactggctaccaagcttccaaggatgacttggctgtctacacttcgttttcggctgctccctcgtccaagtatatcaacgtagcaaggtggtttaaccacattgatgcgctcgtgaggctgagcggaattactgcagagggccaaggtgtgaaggttgaatcctcagcagttccttcagccccaactccagatgttgctgaagcacaggccccagttgctgaggaggacgacgacgatgatgttgacctttttggtgaggagaccgaagatgagaagaaggctgctgaagagcgtgctgcagctgccaaggcttctggcaagaagaaagaatctgggaagtcatcagttttacttgatgtgaagccatgggacgatgagactgacatggccaagctcgaggaagctgttaggagtgtccagatggaagggctgctctggggcgcatccaagcttgtcccagttggatatggtatcaagaagctgcaaatcatgatgaccatcgtcgacgaccttgtctctgtcgacactctcattgaggactatctgtgcgctgagccagtgaacgagtacgtgcagagctgcgacatagttgccttcaacaagatctaggcgtgacttccgatcagtccttcccctggggtgctggcgatggtggtggctgggcaatgcaccagcctaatttatccatagctatatgtctgctttgtgtggccagtgatattgccgtgagtatttttggatcctattcgagtcgaatgtaccagtaccagagttaatttgctttaattcgaaacaccgttccagttggaattctgttacccgtgttctttgcttgcagtacctctatttcttcttttttttgcatcggctggtggtggttcctttatttttttttgcattggctgttgtggttcaggtcagactgtgttggtctagattcttgtttttgtgtgatcggaaacatgctatcgcgcgtgacagagctgttgggtgacatgtagtctcagattgcagagctgaaaaggcttgcaacctcgtctcgtggca

SEQ ID NO: 144830 - DNA, 908 bp, Zea Mays
accagcggatatatatactggagcctggcgagatcaccctaacccctcacactcccatccagccgccaccaggtgcagagtctttcgtcatctcttctccggcgaagaacccccagtcgcccaccagatcacttgttaaactttgttgaggggtgatggcggtttctttcgcaaacctcaactccgaggcagggcttaaaaagcttgatgagtaccttctcactcgcagctacatcactggctaccaagcttccaaggatgacttggctgtctacacttcgttttcggctgctccctcgtccaagtatatcaacgtagcaaggtggtttaaccacattgatgcgctcgtgaggctgagcggaattactgcagagggccaaggtgtgaaggttgaatcctcagcagttccttcagccccaactccagatgttgctgaagcacaggccccagttgctgaggaggacgacgacgatgatgttgacctttttggtgaggagaccgaagatgagaagaaggctgctgaagagcgtgctgcagctgccaaggcttctggcaagaagaaagaatctgggaagtcatcagttttacttgatgtgaagccatgggacgatgagactgacatggccaagctcgaggaagctgttaggagtgtccagatggaagggctgctctggggcgcatccaagcttgtcccagttggatatggtatcaagaagctgcaaatcatgatgaccatcgtcgacgaccttgtctctgtcgacactctcattgaggactatctgtgcgctgagccagtgaacgagtacgtgcagagctgcgacatagttgccttcaacaagatctgtaattggaattctgttacccgtgttctttgcttgcagtacctctatttcttcttttttttgcat

SEQ ID NO: 144831 - DNA, 830 bp, Zea Mays
accctaacccctcacactcccatccagccgccaccaggtgcagagtctttcgtcatctcttctccggcgaagaacccccagtcgcccaccagatcacttgttaaactttgttgaggggtgatggcggtttctttcgcaaacctcaactccgaggcagggcttaaaaagcttgatgagtaccttctcactcgcagctacatcactggctaccaagcttccaaggatgacttggctgtctacacttcgttttcggctgctccctcgtccaagtatatcaacgtagcaaggtggtttaaccacattgatgcgctcgtgaggctgagcggaattactgcagagggccaaggtgtgaaggttgaatcctcagcagttccttcagccccaactccagatgttgctgaagcacaggccccagttgctgaggaggacgacgacgatgatgttgacctttttggtgaggagaccgaagatgagaagaaggctgctgaagagcgtgctgcagctgccaaggcttctggcaagaagaaagaatctgggaagtcatcagttttacttgatgtgaagccatgggacgatgagactgacatggccaagctcgaggaagctgttaggagtgtccagatggaagggctgctctggggcgcatccaagcttgtcccagttggatatggtggtggctgggcaatgcaccagcctaatttatccatagctatatgtctgctttgtgtggccagtgatattgccgtgagtatttttggatcctattcgagtcgaatgtaccagtaccagagttaatttgctttaattcgaaacaccgttccagttggaat

SEQ ID NO: 144832 - DNA, 944 bp, Zea Mays
accctaacccctcacactcccatccagccgccaccaggtgcagagtctttcgtcatctcttctccggcgaagaacccccagtcgcccaccagatcacttgttaaactttgttgaggggtgatggcggtttctttcgcaaacctcaactccgaggcagggcttaaaaagcttgatgagtaccttctcactcgcagctacatcactggctaccaagcttccaaggatgacttggctgtctacacttcgttttcggctgctccctcgtccaagtatatcaacgtagcaaggtggtttaaccacattgatgcgctcgtgaggctgagcggaattactgcagagggccaaggtgtgaaggttgaatcctcagcagttccttcagccccaactccagatgttgctgaagcacaggccccagttgctgaggaggacgacgacgatgatgttgacctttttggtgaggagaccgaagatgagaagaaggctgctgaagagcgtgctgcagctgccaaggcttctggcaagaagaaagaatctgggaagtcatcagttttacttgatgtgaagccatgggacgatgagactgacatggccaagctcgaggaagctgttaggagtgtccagatggaagggctgctctggggcgcatccaagcttgtcccagttggatatggtatcaagaagctgcaaatcatgatgaccatcgtcgacgaccttgtctctgtcgacactctcattgaggactatctgtgcgctgagccagtgaacgagtacgtgcagagctgcgacatagttgccttcaacaagatctgtaagtcactcaactcttgaccccttacagctgcagtagcattactaggccgttgctttaactgcccattacattgccgtgtccagtttgtgatttttactcaaggctaacactgacttttctgttggttcagagg

SEQ ID NO: 144833 - DNA, 490 bp, Zea Mays
accctaacccctcacactcccatccagccgccaccaggtgcagagtctttcgtcatctcttctccggcgaagaacccccagtcgcccaccagatcacttgttaaactttgttgaggggtgatggcggtttctttcgcaaacctcaactccgaggcagggcttaaaaagcttgatgagtaccttctcactcgcagctacatcactggctaccaagcttccaaggatgacttggctgtctacacttcgttttcggctgctccctcgtccaagtatatcaacgtagcaaggtggtttaaccacattgatgcgctcgtgaggctgagcggaattactgcagagggccaaggtgtgaaggttgaatcctcagcagttccttcagccccaactccagatgttgctgaagcacaggtaaactcaaccaatgatttggctgattgtgcagattccttatgatttttggctgaaaattgtcagttgctttacaagctca

SEQ ID NO: 144834 - DNA, 661 bp, Zea Mays
agaagggagaaagaaaagcagtcgagcagcggtagccggtaggcgagagagtcaggattcaggacgcggcgaggccaccatgagcactctcaagttctgccgggaatgcaacaacatgctgtacccgcgggaggacaaggagacgcgcaccctcctgtacgcgtgccaaacgtgcgagcatgaggagattgccactgatacttgtgtgtacaaaagggttatccgtaagcctggtggtgagcccaaagatgtcctgaaggatgcagcaactgatcctagcctgcctcgcaccagaagcgtcagatgttacaactgcaaccatccagaagctgccttttttcaggccccgactaagggagaacaagccatgacgctgtacttcatctgctgcaacccaagctgcgggcacaggtggagggactgagaaggatctggcttggtcttcgctgcaaacctgccgtattgttagcctaggtacaagttgtgccgtcaactgacgtttgctgcaagcttataagctactataacctcgtaacaaaacgatggtttggctggagacgaaatctgttgttcctcatgataagaaacagaaacagctatgaactaccagtatcatctcgtctcatctactcagtaccatgcattacttctgctgttcaaa

SEQ ID NO: 144835 - DNA, 673 bp, Zea Mays
agaagggagaaagaaaagcagtcgagcagcggtagccggtaggcgagagagtcaggattcaggacgcggcgaggccaccatgagcactctcaagttctgccgggaatgcaacaacatgctgtacccgcgggaggacaaggagacgcgcaccctcctgtacgcgtgccaaacgtgcgagcatgaggagattgccactgatacttgtgtgtacaaaagggttatccgtaagcctggtggtgagcccaaagatgtcctgaaggatgcagcaactgatcctagcctgcctcgcaccagaagcgtcagatgttacaactgcaaccatccagaagctgccttttttcaggtttgtacccaggccccgactaagggagaacaagccatgacgctgtacttcatctgctgcaacccaagctgcgggcacaggtggagggactgagaaggatctggcttggtcttcgctgcaaacctgccgtattgttagcctaggtacaagttgtgccgtcaactgacgtttgctgcaagcttataagctactataacctcgtaacaaaacgatggtttggctggagacgaaatctgttgttcctcatgataagaaacagaaacagctatgaactaccagtatcatctcgtctcatctactcagtaccatgcattacttctgctgttcaaa

SEQ ID NO: 144836 - DNA, 771 bp, Zea Mays
agaagggagaaagaaaagcagtcgagcagcggtagccggtaggcgagagagtcaggattcaggacgcggcgaggccaccatgagcactctcaagttctgccgggaatggtaaaagcgacgaaattgttggcattcgtgcccactgccggctctttggtattggaatcgtggtcgtttgcttcatattttcatcgtctttgctttgtatttcgccgcagcaacaacatgctgtacccgcgggaggacaaggagacgcgcaccctcctgtacgcgtgccaaacgtgcgagcatgaggagattgccactgatacttgtgtgtacaaaagggttatccgtaagcctggtggtgagcccaaagatgtcctgaaggatgcagcaactgatcctagcctgcctcgcaccagaagcgtcagatgttacaactgcaaccatccagaagctgccttttttcaggccccgactaagggagaacaagccatgacgctgtacttcatctgctgcaacccaagctgcgggcacaggtggagggactgagaaggatctggcttggtcttcgctgcaaacctgccgtattgttagcctaggtacaagttgtgccgtcaactgacgtttgctgcaagcttataagctactataacctcgtaacaaaacgatggtttggctggagacgaaatctgttgttcctcatgataagaaacagaaacagctatgaactaccagtatcatctcgtctcatctactcagtaccatgcattacttctgctgttcaaa

SEQ ID NO: 144837 - DNA, 1210 bp, Zea Mays
agaagggagaaagaaaagcagtcgagcagcggtagccggtaggcgagagagtcaggattcaggacgcggcgaggccaccatgagcactctcaagttctgccgggaatggtaaaagcgacgaaattgttggcattcgtgcccactgccggctctttggtattggaatcgtggtcgtttgcttcatattttcatcgtctttgctttgtatttcgccgcagcaacaacatgctgtacccgcgggaggacaaggagacgcgcaccctcctgtacgcgtgccaaacgtgcgagcatgaggagattgccactgatacttgtgtgtacaaaagggttatccgtaagcctggtggtgagcccaaagatgtcctgaaggatgcagcaactgatcctagcctgcctcgcaccagaagcgtcagatgttacaactgcaaccatccagaagctgccttttttcaggtttgtacccaggtgctgtttacttgctgccgctgtcgctaaaggcgatggttgtgttatgtcatatgtaacatgtaatgcctaagcatggtaacagtagtgtgcactgttgcatgatttattcgggattattgtctagggagggttagcatcggcaaccaagccaaattgcatgagataccccctgtggtatccacccactggctactgagtacaatgtaagcttgaaccaatctgttcagatggaaccaaatcagtatcccacgaaaaaatgatttccgtggaatcaccattaccagtggtttttgaaatccttcatcaattcattctatcgtagttgctcttgatttttgttacatgtaatgctgatacattaccagtgatttttgttgcacttgagttttgcgctgttacatgtaatgctgatacattgagcccgcaggccccgactaagggagaacaagccatgacgctgtacttcatctgctgcaacccaagctgcgggcacaggtggagggactgagaaggatctggcttggtcttcgctgcaaacctgccgtattgttagcctaggtacaagttgtgccgtcaactgacgtttgctgcaagcttataagctactataacctcgtaacaaaacgatggtttggctggagacgaaatctgttgttcctcatgataagaaacagaaacagctatgaactaccagtatcatctcgtctcatctactcagtaccatgcattacttctgctgttc

SEQ ID NO: 144838 - DNA, 2375 bp, Zea Mays
cagtcgtccctgtccctccactcctcccgtcgagcacttggcactgccaatggcggctcccgcccacaccccttcgatgcgcgcaagccaccttctttccccgtgagatcgacgcacctccccctctcgtgcttcattcccgctcgtcgttcgtttcttcggccccgagccgtcgcgcggtcgcctccacatctcgtcgtgctttaaggtctttggcctccgccgttcttggacaggggcacaccactgtccaccggtgcccactacgcgaaatacgagtccctcgtgcggctccgtagggtggaagagatccatcaggcggtgagtgggaggggcggcgtccacacaaccggaggggaggggggcaatggcggccgtggcaggcccactctgcacgtggctcgtcgccgcgtgcttatctgcggcatgcgacgctgaagagcacaagcagaagcatttctgcgcaggcggaagccgcgctgggggcggtgtcatgctcggccagcgccgccgcctcggcgcgcggcgtcgcggcttggcgcgctctggaatgactatggctgttgccttacaagctgaaagaagtgtcattgaaaagaagaaacccgatatcaaacaaaggagggtggttgtcactggcatgggtgtagtgacaccattgggccatgatcctgacgtgttttacaacaatcttcttgatggtgttagcggaataagtgagattgagaggtttgactgttccaacttccccacgagaattgcaggagagataaaatccttctctactgatggttgggttgcacctaaacttgcaaagcggatggacaagtttatgctatatctgataactgctggaaagaaggcattagaaaatggtggactcactgaagaactaaggaatgagttggacaaaaccaggtgtggggttcttattggttctgcaatgggtggcatgaaggtttttaatgatgcaattgaagcactgagggtctcttacaagaaaatgaacccattttgtgttccttttgcaactacgaatatgggctctgcgatccttgcaatggatctgggatggatgggaccaaactattctatttccacagcttgtgctaccagtaacttctgtatccttaatgcagcaaaccacatcagaagaggcgaagctgacgttatgctctgcggtggttctgatgcacctcttatcccaatcggattgggaggttttgtggcatgcagagctctttcacagaggaacagtgacccaacaaaagcttctcggccttgggacatgggacgtgatggttttgttatgggggaaggggctggtgtcctcgtattggaagaacttgagcatgccaaggaaagaggtgcaacaatatatgctgaatttcttggtggaagcttcacatgtgatgcttaccacatgactgagccacatcctgaaggaagagggattactctctgcatcgaaaaggcactagctgatgcaggggtagcaagggaagaaatcaactacgtgaatgcccatgcaacatctacacaagcaggtgacttgaaggagtatgaggctatcgtgcgctgttttcgccagaaccctcaactgagggtgaactcgaccaaatcaatgactgggcatcttataggagcagctggtggaatagaagcagttgcttctatacaagctataagaactggttgggtccatccaaatttgaatttagaaaatccagaggacaccgtggacgtgggcgtcttggtagggtcacagaaggagagatgtgaagtgaaggtggcgttgtccaactcattcggattcggtgggcacaactcatcgattctctttgccccctttaagtgaacatgaccgaggcgaagaaccgacatcttcatcatcgcgcaaatggcttcatatatctggaactccacatagaaatctggtggattctgcaacttcctccgtgccacacatactgcatatggaggtccaaagtgagggtacaatactatgccacacacatttgagcgaacaaaacatcagcccccctacatgtttcatctactatcacaaagttgcaaaatatatatggtaactatcaaagaacttaccgtacctgggccagtgttttcgccttcaccatacctgcccattgtcagtactatttcctacatttggtgtagtcccgtagcttaatcctcttccctgcggaggtgatgggatcttatgttgtattgttgttgccaacagtatcgttattagccatgaattgctggttcccactgtaagcatcactggacgttttcgctttggttgtttctgtttcctgctgttcataaccgagttaaagatatgtaaatggcgaccctgttcggccttt

SEQ ID NO: 144839 - DNA, 1360 bp, Zea Mays
cagtcgtccctgtccctccactcctcccgtcgagcacttggcactgccaatggcggctcccgcccacaccccttcgatgcgcgcaagccaccttctttccccgtgagatcgacgcacctccccctctcgtgcttcattcccgctcgtcgttcgtttcttcggccccgagccgtcgcgcggtcgcctccacatctcgtcgtgctttaaggtctttggcctccgccgttcttggacaggggcacaccactgtccaccggtgcccactacgcgaaatacgagtccctcgtgcggctccgtagggtggaagagatccatcaggcggtgagtgggaggggcggcgtccacacaaccggaggggaggggggcaatggcggccgtggcaggcccactctgcacgtggctcgtcgccgcgtgcttatctgcggcatgcgacgctgaagagcacaagcagaagcatttctgcgcaggcggaagccgcgctgggggcggtgtcatgctcggccagcgccgccgcctcggcgcgcggcgtcgcggcttggcgcgctctggaatgactatggctgttgccttacaagctgaaagaagtgtcattgaaaagaagaaacccgatatcaaacaaaggagggtggttgtcactggcatgggtgtagtgacaccattgggccatgatcctgacgtgttttacaacaatcttcttgatggtgttagcggaataagtgagattgagaggtttgactgttccaacttccccacgagaattgcaggagagataaaatccttctctactgatggttgggttgcacctaaacttgcaaagcggatggacaagtttatgctatatctgataactgctggaaagaaggcattagaaaatggtggactcattcggattcggtgggcacaactcatcgattctctttgccccctttaagtgaacatgaccgaggcgaagaaccgacatcttcatcatcgcgcaaatggcttcatatatctggaactccacatagaaatctggtggattctgcaacttcctccgtgccacacatactgcatatggaggtccaaagtgagggtacaatactatgccacacacatttgagcgaacaaaacatcagcccccctacatgtttcatctactatcacaaagttgcaaaatatatatggtaactatcaaagaacttaccgtacctgggccagtgttttcgccttcaccatacctgcccattgtcagtactatttcctacatttggtgtagtcccgtagcttaatcctcttccctgcggaggtgatgggatcttatgttgtattgttgttgccaacagtatcgttattagccatgaattgctggttcccactgtaa

SEQ ID NO: 144840 - DNA, 311 bp, Zea Mays
caagaattgtgaagatgttactgggaaaggttctcatcaacaataatttcatgggcttcatcaagcatgataacagaatactgggaaaggttctcatcaacaattatttcacgcagaagcataccatcagtcatgtacttaatcactgtgtccggacctgtacagtcctcgaaacggatagcataaccaacttcctctcccagccgacaaccaaactcttctgccactctctttgcaactaacattgcagccaccctacgaggtcgtatgcatttccttccagtgattccgtagcaacgcacgggtatata

SEQ ID NO: 144841 - DNA, 1676 bp, Zea Mays
ctctagcgcacggtgcaggcgctagaaaccctaaacttcggcatcgaagatggcggcggcgtgcatgcgttgtcctaaagggagcaggacatccagatgatcctcgccaccgacgtgcacctcggtaccaagaattgggacttctagatggtagtagcccaaatctttcgagactaaccaaatgcttacctcaaatgtttattatatttgatatctagttctagatctgttcgtattgacctctttctggatcttgctatgtgcatgcatatattgtgatgcaatgtatagtcaactgagagaaatattggcgcgtagtatcagtcgaggaatattgaatcataggtatgtaactctagttgttaattttgccgttgacagcagcgtcgggtagtcttgaggatttgtctagcacaaagagttggaaggtttccggagtgagtgtgatacacatgtgtaccgtgtacgttctagctcagtagttgtgacatcacaaatggtattcgtctcaatgtaataccataaatatgcgttgtggaattggtttacactagaatttgtcaaaaataaaggataaatcaacttataccaagcatctaatgtttgtgttgatgtgtttgttcactggaatcagtgggaagaatggcccgtagctcagtgctaattctcattaattatgcttataatttcactttgtcacttgaccatggtgcactgcaaaataacaatagcacttttgtatatattattgttattatccttaaggtatctacattattaaccttggcaagacctgtgagaagcttcagttggcattgagaatccatagggcatcattgtgcagtctgctaggccctatgtccagagggctgtcctcaagtttgcgtagtacactggtgctcatgccattgccggcaggcacactcctggtacattcaccaaccagttgcaaacctccttcagcgagccacgccttcttatcctcactgatccaggactggtcaccagtccattaaaggcttgtttgatatcaagtatcatcaaaatccatatggactacggaggctgcgctcggaaacattttcaccactgtgttggtttcaattcatagtcgatcttttttcttctacaggacatagaggaagcaaaggagaaggaggaagaagaggctctggttgctccgggctatggcgcagttgcagaatatactgcccctagagctgacaactggggtgacgagtggggagctggtgagggtgaggccgtgaggctgcagctccacctgctggcgtcccggctgctggtgcagactgggttgctgctccagctcctcccgctgatgcgtgatgatgtgtgggatgcagctgcgcctcctccagcagcagcagccgcctagagatgggaacatgtcgctgcccttgtcacggcatctactctagatctcatctggatactctaatattcaccccaattcacatgtattgagatggattcaggtcacaatccatctcaacacatatagattagaataaataatagagtaagcaaacaagccctaaaccctaactgggagtgaagagtaagtgagcatgattgttggcttacactagtcttcaacagaacttgttagtagacactgctggagtatatttgaatttttagtgtggtagatgagt

SEQ ID NO: 144842 - DNA, 1606 bp, Zea Mays
cagggtataaaaggtttacgtgatgaaattgctgctggaattgctgcccgtgatgggtttcatgcaagtggagataacatctttctaacagatggagcaagcccagcagtgcacatgatgatgcagttgttgataagttctgagagcgatggcattctctgccctattccacagtacccactgtactctgcatcgattgctcttcacggtggttcccttgttccttatttccttaatgaagagacagggtggggactcgatgttgatgagctgaagaaacaactggaggaggctcgatctaagggcatcactgtcagggcgcttgtggtcataaatccaggaaatccaacaggacaggttcttgttgaggaaaaccaaaagaaaattgtcgaattctgcaagaatgaaggacttgttcttctcgcagatgaggtttaccaggaaaatatatatgttgaagataagccattccactcattcaaaaaaattgcacggtcactgggatacactgatgatgatcttcctttggtatcattccagtcagtttctaaaggctactacggagaatgtggaaaacgaggcggttatatggagataactggattcagtcctgaagtacgggaacaaatttacaaggtggcatcagtaaacctgtgctccaatgtttcggggcaaattcttgctagccttgtaatgaacccaccaaaggctggggatgaatcctttgaatccttcatgtcagagaaggatggtatcctttcatcgttggctcggcgtgcaaaggctttggaagaagcattcaacagtttagaaggaattacatgcaacaaagccgaaggtgcaatgtatctgttcccacgccttcatttaccccagaaggcaattggagcagcccaagcagtcggcactgcgccagatgcatactacgcaaaacgcctactggaagccactggaatcgtcgtcgtccccggttctgggtttggacaggtccctggaacgtggcacttcaggtgcacgatactgccgcaggaggacaagatacctgcgatagtatccaggctcaaggagttccacgagaagttcatggatgaattccgtgattgagctgagtatccatcgccctggcgtgatttttatctgttcgaaataataaggctgccaattggttggccccccctccctccctcgtcgtcctatggatgctacagccaaacaccctcccaaattgtgttacaggcagattcctatcgaaaaacctacagaatctcgggcactgcagtctgcaatgccatgcttctgtttgccttgtgagaagtgtatcaggctaggctctgagccctgatgtgtacaaacatacccgaactttgaggccaagttgagttgtctcggcgcatgctgaaactctgctcgccttgtgttgcggagaatctttgctgtccaggttgatatgttcgctgactgggctgactgctctgcttctgctcgtttgacatcgctacaggtaaagaaagacaccagtaggactgtgtgagtgccggcctgtcaggttcgaacttgcatctactaccctagtaataaaaaaagaatagagggttgtggcttctgc

SEQ ID NO: 144843 - DNA, 629 bp, Zea Mays
caacctacccccatcagcatcacgcattcacgcgcccgccccagcgccgtcatcggtcgccatccctgcatcgaccgcaccgcatcgcaccgtctccgccgccatgcgccgcttcgcagccgacagggcgcgccgcgcggtggccgcgtctctgcacggtgcagcgtccagatcagcagcgccgtcgcctcacgctccggcgccacgtcatccagcctccccggtgggggcggcggcgatggcggccgccatggtgaggaccatgtccacgacggccgcgggcacgcccccagtgtcggtcgccaccatcaaccccaaggtcttgaagtgtgaatatgcagttcgaggagagattgttacacatgctcagaacttacaacaagaattgcagaaaaatccagaatcacttcctttcgacgagatactctactgtaatattggaaatccccaatcacttgggcaacaaccagttacctatttcagagaagttctctctctatgtgatcatccagctctcctggacaaaagtgaaactcatgctttgtacagttcagatgctatagagagagcatggcaaattctagagaagataccaggtagagcgacaggagcatatagccatagtcagg

SEQ ID NO: 144844 - DNA, 468 bp, Zea Mays
atgttcccttggggtggatttggatcggagcagcgcagcgcaggcgagcagcgacggtgcgttctgcggtcgtgggctcgtccgctcgtggcgcagccccaggcggacgccaacacgacgcggtacctgggcgtgcggcgccggccgtggggccggtacgcggcggagatccgggacccggccaccaaggacacgaccgtgtcgcgcgctccctccgcggctcccacgcgcgcaccaacttcgcctacccggacctcccgtcgggctcctccgtcacgccctacctctccccggaccacacctcgggcgacaacgccacgcagctcctccagccattctacgccgccgacccagccgccgcgtctttaccaccggcgctcccggccgcgaacgacgcggcaggctacggctatagtgtcgaggacatgtccgctctcatggacgacctcaccatacccgacgacctga

SEQ ID NO: 144845 - DNA, 683 bp, Zea Mays
gggggcatccctctcgcggtcaattgggtgggctccagttgcacgtgctcaaaatacatgtgggagaggtatggatatcgtatcaaagattgtgcaggtcccgaaaataactaggaaggctgtctgtgttctctcagtgtttggggccgttcaggattgctatctgctccactctgctgtcatcttaaatcacaagggtcctttagaaatcattcgtgtgtttggatccattttgacatctgatagtcctggatttgggtgcttatctgcgactcttgcttgtggtgattgttctcttgtcggtggcattgcagttggacctctcatagctacaacaccggtgcagcaggaagaaagaggcataagtgaataacgatgcacgagacgaacacgaggcgaagaggccacaaaagagacgatgtcagcggaagaggcgaagaggccacgagacccacgagacgccgcagcggcagtagtctgcagcaaggagcgcttaagtacgggattgcagcgaggtgcgacagagaaagagagaaaaccttgggtttcctggtcagcgaggtgcattttattttagaagtactataaatttaaattagggttggaaatggatgtttggtgatccgaattattcgtattcgtactcactaaaactgctaatatggatatccgtatccgtattc

SEQ ID NO: 144846 - DNA, 127 bp, Zea Mays
gggggcatccctctcgcggtcaattgggtgggctccagttgcacgtgctcaaaatacatgtgggagaggtatggtttgctttgcttgctccctcatggacatcttcttcatctctcctgggcagtgc

SEQ ID NO: 144847 - DNA, 834 bp, Zea Mays
atgggccctgacctcggcccaaacccggcccgatatatcgggccgtgccgacccggcactaaaatatttcgtgccgtgccgtgcctgggccgtgctttttttaccgtgcttcgggccggcccatcaggcccggcccaaatgtacacctatagtttcggttcagagcacctggcacttgcatgtagtgctgcaagttgggtcgtgccgtgctggcccggcacgagcctgtcgtgcttcgggtctcagttagtcgggcctagccagcacgaaatagagtcgggtcgtgccttaccgggcctggcgaatagaagtaaggcccagcacggccctaaagcacgacgggcttccgtcgggtcgtgctggcccaagcacggcacgcctcagttcctgataagcgcgcatctcggcctctctgtcgccgtcgcgctggatccgagcgttctgcggttgtgggctcgttcgctcgtggcgcagccccaggcggacgccaacacgacgcggtacctgggcgtgcggcgctggccgtggggccggtacgcggcggagatccgggagccggccaccaaggagcggcactggctgggaaccttcgacacagccgaggagggcgccgtggcctacgaccgcgccgtgcgctccctccgccgtggcctacgaccgcgccgcgcgctcccttcaacacagccaagatgcttcgttccacacagggagtgggctcgtccgctcgtggccgcctggggctggacaactggagtgctggggccgtactctcctctcctcggtggtggtatggtgggtactggagttagagaagaccgaatggatcagctgtga

SEQ ID NO: 144848 - DNA, 688 bp, Zea Mays
ctgactaaacatatcgttgatgttcgagagctgattatgatcaagatttctacagcaaggagagtgaaagatataatttgtccaaatcttgtcaaagtgctcaaagaaaggtaatcccaaataggcaacttacaaatccctaagtgcaaccatctgggagatggagtaaggtacagtcccagtgaagttatttactgcaagatttctgcataccagattcggaggaagattataaggaatgtcactgcctccaagattattattgctcatatccctgcagaacaccaaacttaaattaaaaccgaacaatggcatgttgtctgcaaacatccgagcatcgagatttaagagcatgtgaggtctcacttacagctgaactagtgcagtgagctggttcatgttgtagcccaaggtgccgttaagcctcatcccagataactttctgtcgagcgttattcaggacaagaaaaaaggaaaatcagccgagaaggatcggtcgccgttacgcgaaaacaaccaacccgtctgaaggtttcagctagctcacattgctgtcactctggaacccgagcaggtgacccccagccacgactgcccacagggatccccattttgggacacccagttcgtcagctgcggcggcgaattcatggttgtgtagaacacattgagggcattcactgcatat

SEQ ID NO: 144849 - DNA, 410 bp, Zea Mays
cggacagtgaaacagtacctgtccggtgcaccaggggactcagactcaaactcttcaccctcgggatttctcggaagccggcgcgctataattcaccggactgtccggtgtgcaccggacatgtccggtgctccaaggaaagctcggcctcctgaactcgccagcctcgggttcgcgcggcagccgctccgctataattcaccggactgtccggtgtgcaccggactgtccggtgtgccagcggagcaacggttccctgcggcgccaacggctccctgcgctgcattaaatgcgcgcgcagcgcgcgcagacgtcagggctgcccataccggcgcaccggacatcaaacagtgcatgtccggtgtgcaccggacacccaggcgggcccacaagtcagaagctccaacggc

SEQ ID NO: 144850 - DNA, 2860 bp, Zea Mays
cgcccagccagcctctcaaccctcggctcagcctcccctcagaataaacagcgaaaaaaaggaaggcgaaaagaaaaaatcaatcgcgagcgctaagagcggagatccaaatcggcgcaaaaggaggcgctcgctcgcttcgcccgcacggaagttcctccgcgccgtcgaggagcaaaccaattgcgacttggaaaaggctaataaggaatggaatcgagttatgccaccgaagagagtaactctaaaggctcttctgcaaatgcatcttcatctccaacaggaagttcagaaacttctgtggatttacaaactcctcctgcagccaaggaaattcctggacgtattgatcatgagggaccaagctggcatgaggtcttagaaatgcgggttcctgatctatcagaagacattgcagaatcacatgcgccttcggatacagatcctgacatactgtctaattcaggaccaactgaggcatacataagctcaacaaatgataaggcagattatccttcttcagtaggcacaagcgaagtgaacggtgtgcctgtaaatgtttcgaacggagctggaactacgctaaaggatgaaatgaaacctaaagaagatgatacgcaccatcagattgatagggatacaaagctgaaaatgaaacaagattcagcaacaacacctgaaagtccgtacagaggccttattgacactgctgcaccctttgagtctgttagagaagctgtcaccaagtttggaggaattgtcgattggaaagctcacaaagctcagatgatggagaggcgcaagctcatacaagttgaattagaaaacattcgaacagaaattccactttgcaaggaggaactagaagccgctgagatgactaaatctcaagttgtcgatgagctagagcacaccaagagacttattgaggagctgaagcatcaactggagaaagtacaggttgaagaagctcaggcaaagcaggactctgagcttgcacaactcagggcacaagaaattgagcacggagtagctgatgaagctagtgcgatagccaggacacaaatggaagtcgccaaagaaaggcacgaaaaggctgttgctgaacttaagtcagtaaaagaggagttggcgtcagtacatgaacagtatgctgccttggtagatgaaagagacacagcaatcaaaagagcagaagaggtcatatctgctgggaaggacattgagaagcgagtggaacaactgacattagaactgattgcgtctaaagggtctcttgaattggcccatgctgcgcatcatgaagcagaggaacgtaggatcggtgcagcattggcgaaagagcaggattgcaatgcttgggagagagagttgcgtcaggcacaagaggagctggaacgattagacagtaagcttgcgttcagtaacgatatgcagcacaatattgatgcaaatttgcacaagttgcttagcctcaattcggagctgtctgcctatgtggcgaacaaactgactgaagaagctgaaggtgtttccaaggatcatgagtccgaagattctagacacattagcaacgcagttaaggaagctctagcatcgaaacagaaagaacttcaggagctcaaagccgacattgagaaggcaaaggctgaggccaacgtgctaagatttgctgccatgacactcagatcagaactggacaacgagaacgcttcacttgtcgcgttgcagcagggagaggctatggcatccgttgctgtttcttcactagaagctgagctcaaccggacgaaacaagagatagaatctgtcaggtccaaggaggcagaggcccaagaaaagatggtggagcttcccatggttttacagcaagcgactcaggaggccgaggacgccagggtagcagctcacgcggcccacgaggagctgaggaaggcgaaggaggcattcgagcaaaccaaggctgccgcagctgcagcagagaccaggttatctgctgttgtgaaagaaacagaagcatccgtagcatcagagaggctagcacgcgaggcgcttcaagctttgcaagaaagcgaacaggcaagagaaactaaggattctcagcgaggagtggtgcttcctataagcgagtactacgaacttagcaagagggcacatgaagccgaagaacaggcgagcgagaaggtagcagaagcactggcacaggtagtgtcggcaaaggaatcagaagcaatgagcctggagagcctaaaggaagcgtccgatgaaatggacgagaagaaggaagctcttgagatcgccttggagagagccgggagggcgaacgaagggaagcttggcgcggagcaggagcttaggaaatggagagccgaccacgagcagcgccgcagagctcacgaatccgcgaaacgcgcggtgaatcctttgaacggtccgtctagagtatttgtcgaacagaagagtccataccacaaggagcaggaatccaaggtgcaggcgtcggggagtagtagctacgagggcctcgttccaaaccaaaagatgcagaggaagaaatcgctgttccctctgatgggctcggttctatccaggaagacccgggcacagacgtgacgtaaacgagatcctataggcacctggggctttgccattcacattgctgtacattggtgtaataagctggttttttttcttggtcttctttggaaagagcctttttgttttgttttaaaggttggtatatcctgtggaaggtgtaatttaatttgtcggtataaacagcgtagaacacattggaatacttttatatgattttttttggtaactcatagttcttcatgaattctgcgaggagatctgt

SEQ ID NO: 144851 - DNA, 800 bp, Zea Mays
cctggtggagtcaagtactctaccaaacttgccccttcccttcccagtaatgtcaatattttctcacgcgtcacgccgcccctccgccctcccttttacgcggttacccctaactcccagctctctcgttcaggcgcgctctctctagccggcgacgattgggcgagcggcgccactcaacgccaggtcttcgtgaaaaccatcgccggcgatgagtttcaaccaggaaccattgatgcaaaagagctcaatgttgccatgagagccttgggatttgagatgactgaagagcaaattaggcaaatgattgctgatgttgacaaagatggcagtggagcgatcgactacgaggagtttgagcacatgatgactgccaaaatcggagagagggatagtaaagaggagctttcaaaagcattccgcattattgatcaagatggaaatggaaagatttctaacattgatatccagaggattgccaaagagctgggtgtaaatctcaccctcgatgagatccaagacatggtgcaagaggctgatagaaatggtgacggtgagatagactttgacgagttcatcaggatgatgaggaggaccagctttggctactaggtgtatttatctgtgagtgcttgacgctgccagtttgtttatgactaccgggcgtgtgttaatcgactggtgttgttactatgaacaataatgttgtgctctggtttcgcttatatatataattttaatttaattttaattatcgatgtgcctacttaggtatggcaacttttatgtataacgagcac

SEQ ID NO: 144852 - DNA, 832 bp, Zea Mays
acctggtggagtcaagtactctaccaaacttgccccttcccttcccagcgcgctctctctagccggcgacgattgggcgagcggcgccactcaacgccaggtcttcgtgaaaaccatcgccggcgatgagtttcaaccagtctactgtcaaggggcaggccaggagggagaggcctagggctcgccctcatggcctgacgcagcagaggaggcaggaaataaaggaagcttttgatctgtttgatacagataactctggaaccattgatgcaaaagagctcaatgttgccatgagagccttgggatttgagatgactgaagagcaaattaggcaaatgattgctgatgttgacaaagatggcagtggagcgatcgactacgaggagtttgagcacatgatgactgccaaaatcggagagagggatagtaaagaggagctttcaaaagcattccgcattattgatcaagatggaaatggaaagatttctaacattgatatccagaggattgccaaagagctgggtgtaaatctcaccctcgatgagatccaagacatggtgcaagaggctgatagaaatggtgacggtgagatagactttgacgagttcatcaggatgatgaggaggaccagctttggctactaggtgtatttatctgtgagtgcttgacgctgccagtttgtttatgactaccgggcgtgtgttaatcgactggtgttgttactatgaacaataatgttgtgctctggtttcgcttatatatataattttaatttaattttaattatcgatgtgcctacttaggtatggcaacttttatgtataacgagcac

SEQ ID NO: 144853 - DNA, 924 bp, Zea Mays
gacagacctggtggagtcaagtactctaccaaacttgccccttcccttcccagtaatgtcaatattttctcacgcgtcacgccgcccctccgccctcccttttacgcggttacccctaactcccagctctctcgttcaggcgcgctctctctagccggcgacgattgggcgagcggcgccactcaacgccaggtcttcgtgaaaaccatcgccggcgatgagtttcaaccagtctactgtcaaggggcaggccaggagggagaggcctagggctcgccctcatggcctgacgcagcagaggaggcaggaaataaaggaagcttttgatctgtttgatacagataactctggaaccattgatgcaaaagagctcaatgttgccatgagagccttgggatttgagatgactgaagagcaaattaggcaaatgattgctgatgttgacaaagatggcagtggagcgatcgactacgaggagtttgagcacatgatgactgccaaaatcggagagagggatagtaaagaggagctttcaaaagcattccgcattattgatcaagatggaaatggaaagatttctaacattgatatccagaggattgccaaagagctgggtgtaaatctcaccctcgatgagatccaagacatggtgcaagaggctgatagaaatggtgacggtgagatagactttgacgagttcatcaggatgatgaggaggaccagctttggctactaggtgtatttatctgtgagtgcttgacgctgccagtttgtttatgactaccgggcgtgtgttaatcgactggtgttgttactatgaacaataatgttgtgctctggtttcgcttatatatataattttaatttaattttaattatcgatgtgcctacttaggtatggcaacttttatgtataacgagcac

SEQ ID NO: 144854 - DNA, 780 bp, Zea Mays
cctggtggagtcaagtactctaccaaacttgccccttcccttcccagtaatgtcaatattttctcacgcgtcacgccgcccctccgccctcccttttacgcggttacccctaactcccagctctctcgttcaggcgcgctctctctagccggcgacgattgggcgagcggcgccactcaacgccaggtcttcgtgaaaaccatcgccggcgatgagtttcaaccagtctactgtcaaggggcaggccaggagggagaggcctagggctcgccctcatggcctgacgcagcagaggaggcaggaaataaaggaagcttttgatctgtttgatacagataactctggaaccattgatgcaaaagagctcaatgttgccatgagagccttgggatttgagatgactgaagagcaaattaggcaaatgattgctgatgttgacaaagatggcagtggagcgatcgactacgaggagtttgagcacatgatgactgccaaaatcggagagagggatagtaaagaggagctttcaaaagcattccgcattattgatcaagatggaaatgtaaggcatcatccctcttttctctgacacacttctatgattatagtggactattattttgcttgccttatcttttcgagtatgtcaattgtgaacctccaattagacaattagcaacttgaatgttctctctagtcaacacaatcacccaagttgcttccataacttaagatgatgaataatgaaggctttacacagctttcaatcctctctcctag

SEQ ID NO: 144855 - DNA, 1514 bp, Zea Mays
gattacctcctaccgtccgacccggctccctcggtccctccctcggtccctcccggtctcgcagttcctccccgtcgtcttccaccgcaaatcgccgaagcaagcaggcgagctcgggaccagatccactgcgggcagctggagcggaagggccatggggacgccgccgcctttccaggagtccggccactgcgacgtctgccgctgcaccttcaacaccttccgccgccgtcatcactgccgcagctgcggacggacgctctgtcacgagcattcttcgtactacatggctctcccgcagtatgggatatatacagacgtcagagtctgctacggttgcttcaacaaatcctccagccaaggacacgctgataatccggtgtcagctggtagcatttctggagcagctgactctttttcagggctgagtttgggtaaggaggatgattcgtcgcctatgaagaattcaacggttcagagcacggcagcccttattgagtgcaaatgtgggatgcctttgtgtatatgtgaagcaccaaaaccagaaccttctcctacacctgtaaagaatatcaacaccgttcccccaaccacacagtcaaatccaaggccaaagaagcctgctaacactcaacagaaggcttcagctacttccagtagcaactcaagcccattcttaaatattggattaatgaacaacgatagcaatgataagggcattgttgactatgaagttagtggggagggactgagagaagcaattaaaggcggggatgttaagggtgtaaagaaacttcttacacagggagtggattctaactactgcgacaaacaaggatttactttgctgcatttggctgctttgtttaaccaaactgaaattgctcttattctcatggaccatggggcaaatgttgaaagcaaaaatgggcaaggggaaactcctttggactgtgctccggcaatgctgcaatacaaaatgcgccaacgggtggaagaactcgcggcttcggcttcgaagggaccactagggtgaactgtgctcgtgctagtttctgctgagttcctcctattccagtttgtgtcaaatgtggtgtcaagaataaaatagttaagtcagctgaaagcttcttgctggtgggacagtgtttggtccgccagtgtataccatctagaaacgttgaatgccagtcacggctcacgcgtgtgaaataatatatattcagcttcatcctacattcctactcatgtactctgtagccggtgaatacttccaaacatttaccacgtacaatatgtttttcttttactgaaacagcattcctctaggagatgcatgacagcagaaagcttcctgccggtggcctggtgccggtgggatagtgctcgtgctcccagtaccacctgcaaactttggaatcccagccataatttgccagtgcgaaatactgtaattcattcagcttcacctgcaaactttggattctgccgttaccaagtctgccgtttagtat

SEQ ID NO: 144856 - DNA, 2268 bp, Zea Mays
atgggagggtgtcacgcgaagccgctcacccacgacgcggaccgctcgccgccgcacgcagcgccggcgaccccgcccccgggctccgccacgcccgccacccccggccccgggaagaagcactgggcggtgtccccgttcttcgcgttctccacgccgagcccgagccccgcgcaccacctcttcggcggctccgcggcatcgccgcgcaagtcccccgctccgccgggctccgcgcccaccacccggccaggcggctcctgaggctgcccttcccgccgccgtcgcccgccaagcacatccgggcggcgctcgccaggcgccacggcccgccgcggccgtctatccccgaggaaggcggcggcgagggggagggcggcggcggcggaggcaggggcctcgacaaggggtttgggttcaacaaggggtttgcggccaagtatgacttgggggatgaggtcggacgggggcacttcggctacacctgcgccgccacggttaagaagggcgcgcgcaagggggagtccgtcgccgtcaaggtcatccccaaagcaaagatgactacatccattgctatagaggatgtccgaagggaggttaaaatcttgaaagctttagcaggaaacaaaaacttggtccaattttatgatgcctacgaggacaacgacaacgtgtatatagtaatggagctgtgcgaaggtggagagctacttgacagaatactttccagaggcgggaagtactccgaggatgatgcaaaagctgtcctggtgcaaatattaaatgtcgtcgctttttgccacattcaaggagtggttcatcgagatctcaaaccagagaattttctttttacatcaaaagatgatgattcccatcttaaggccattgattttggcctatcagactttgtaaaaccagatgagaggctcaatgacatagttggaagtgcttattatgttgctccagaagttctgcatagatgctatagcacagaagctgatgtttggagcataggtgtaattgcatatatccttctttgtggcagtcgtccattttgggcacgcacggaatctggcatattccgttcggttctcaaagccgatcccagttacaatgaggcaccatggccttctctgactccggaagcaatggattttgtcaagcgattgctgtgcaaggatccgcgtagaaggatgactgcagctcaggctttaagtcatccatggatcagaaattataatgacattaagctgccgttggacattcttatattccgacttatcaaagcttatattcgctcctcatctttacggaaagctgctctgagggctctgtcaaagaccttaaccgtagacgagcttttctacctgaaatcacagttttctctattggaaccagacaggaatgggtgcatcactcttgacaatatcagaatggccttaacgagagaagctactgatgcaatgaaggaatcgcgagttcaagatattcttgtttcgttgagcgcccttcagtacagaagaatggaattccaagagttctgtgcagcagcagttagtgtgcatcagcttgaagcattggatagatgggagcaacatgcgagatctgcttatgaacattttgagaaggaaggcaaccgagctattgtaatagatgaattagcttctgaattgggcctcagcccttcagtgccactgcatgtcgttctgcaagattggatcaggcatacggatgggaaattgagctttctcggatttgtcaagttattgcatggcatgtccagcaggtccctgtcaaagatgagatagctgttgataatctctaacgacagcgcatgcttacaccgccttagcccttgtcgacttggttcgtgggttggagcttgtgtatcaagggcgtatctagcagcacctgatctgtcactaatttgagtatagagttatgtttgttgttgcctgcctactgatcattagccgataggaaaaaggaaaatctcacccatatctgcaacatgtgatgttatctaacagtgttagattaggcgtcattttctgttgtgatttttggaaactttgtaatgcttccttcctggaactggagcaagttaactgcaagttaccaggttggcctttagagcatggacatatcacttaccgtgcgtggtcgttatgtggtactacgtcaggttctcttcgtgtatatattgatgagatggaactgtgcattattttgaatctcaatattagcatgtcaatttgcaaactcgaa

SEQ ID NO: 144857 - DNA, 2421 bp, Zea Mays
caaagctctctcgctacctccctccctccctccctccccctcttccgaggcttctcctttccgccatggcctcctgctagtgccagcccccgtcgcaacgcctcccagatcccggacgcagcgtgccgcaccccgcgacggccggctcgcgacatgggagggtgtcacgcgaagccgctcacccacgacgcggaccgctcgccgccgcacgcagcgccggcgaccccgcccccgggctccgccacgcccgccacccccggccccgggaagaagcactgggcggtgtccccgttcttcgcgttctccacgccgagcccgagccccgcgcaccacctcttcggcggctccgcggcatcgccgcgcaagtcccccgctccgccgggctccgcgcccaccacccggccaggcggctcctgaggctgcccttcccgccgccgtcgcccgccaagcacatccgggcggcgctcgccaggcgccacggcccgccgcggccgtctatccccgaggaaggcggcggcgagggggagggcggcggcggcggaggcaggggcctcgacaaggggtttgggttcaacaaggggtttgcggccaagtatgacttgggggatgaggtcggacgggggcacttcggctacacctgcgccgccacggttaagaagggcgcgcgcaagggggagtccgtcgccgtcaaggtcatccccaaagcaaagatgactacatccattgctatagaggatgtccgaagggaggttaaaatcttgaaagctttagcaggaaacaaaaacttggtccaattttatgatgcctacgaggacaacgacaacgtgtatatagtaatggagctgtgcgaaggtggagagctacttgacagaatactttccagaggcgggaagtactccgaggatgatgcaaaagctgtcctggtgcaaatattaaatgtcgtcgctttttgccacattcaaggagtggttcatcgagatctcaaaccagagaattttctttttacatcaaaagatgatgattcccatcttaaggccattgattttggcctatcagactttgtaaaaccagatgagaggctcaatgacatagttggaagtgcttattatgttgctccagaagttctgcatagatgctatagcacagaagctgatgtttggagcataggtgtaattgcatatatccttctttgtggcagtcgtccattttgggcacgcacggaatctggcatattccgttcggttctcaaagccgatcccagttacaatgaggcaccatggccttctctgactccggaagcaatggattttgtcaagcgattgctgtgcaaggatccgcgtagaaggatgactgcagctcaggctttaagtcatccatggatcagaaattataatgacattaagctgccgttggacattcttatattccgacttatcaaagcttatattcgctcctcatctttacggaaagctgctctgagggctctgtcaaagaccttaaccgtagacgagcttttctacctgaaatcacagttttctctattggaaccagacaggaatgggtgcatcactcttgacaatatcagaatggccttaacgagagaagctactgatgcaatgaaggaatcgcgagttcaagatattcttgtttcgttgagcgcccttcagtacagaagaatggaattccaagagttctgtgcagcagcagttagtgtgcatcagcttgaagcattggatagatgggagcaacatgcgagatctgcttatgaacattttgagaaggaaggcaaccgagctattgtaatagatgaattagcttctgaattgggcctcagcccttcagtgccactgcatgtcgttctgcaagattggatcaggcatacggatgggaaattgagctttctcggatttgtcaagttattgcatggcatgtccagcaggtccctgtcaaagatgagatagctgttgataatctctaacgacagcgcatgcttacaccgccttagcccttgtcgacttggttcgtgggttggagcttgtgtatcaagggcgtatctagcagcacctgatctgtcactaatttgagtatagagttatgtttgttgttgcctgcctactgatcattagccgataggaaaaaggaaaatctcacccatatctgcaacatgtgatgttatctaacagtgttagattaggcgtcattttctgttgtgatttttggaaactttgtaatgcttccttcctggaactggagcaagttaactgcaagttaccaggttggcctttagagcatggacatatcacttaccgtgcgtggtcgttatgtggtactacgtcaggttctcttcgtgtatatattgatgagatggaactgtgcattattttgaatctcaatattagcatgtcaatttgcaaactcgaa

SEQ ID NO: 144858 - DNA, 1277 bp, Zea Mays
tcctctctctctctaccaccagggcaccagcctagtacctcccagaccaaaacttcactcaacaataacaaaatcccaaggccttttaaaggatcaacgtggtagagagagagggagagggagcaagaagagcagctagcaagcaaagaagcgttcgaggattcgagatggaggtgatggtgcctgtgcctgtcatggcgccaagcgcaccgtgcagcccaagaaccgcgaccatggccggcggcgaccacctcccggcctactgctacttcttctccagcgccccgacgagcccgtccagggcgagctgcaactgcaaccccgcgtcgtcgccgccgggtggcgacgaggccagcacgttcgacttcacgctcgggttcagcgggcagctgcaggaggccacgccgaccctcgcggccgccgacgagctcttcgagggcggcaggattcggccgctgaacgcgccgcacccgagcattctgcgggtcgccaacgacgcctcctccggctccgccgatggcactcggtgctccccgaggagagccggcggcgcggatcgtcaagcggaggcggcgccgttggagagaggcaggtcgggctgcaggccctcctccgccgccgctgcggcgccttcttcgtcgaggagcaggagcaggagggccacgcggtctctgtccccgttcaggggcggcagtggcctggacgccgccgccgctgacgacgtcgacgacgagtcccctcctccgtctccccgagcctcctccatgatacgtggctgcggcagcggcagcggcagcaggaagtggcggctcaaggacctgttcctcttccgcagcgcgtccgagggccgcgccaccggcaaggacccgctcctcaagtacaccgcgctgtcgtcggcgtcgttctggcacccccacggccagccccagaggctaagcagcgcgtccatgtccatgcgcaagggaagagggtcggctgcgtcggccggcgacacgccgtacgccacgatcaaccgggcggccgccgccgaggacgtgcggcgccggacgaccaccgccaccaccacgccgctgccgttccaccgcaacagcctgttcggctacctgcgctccaacccggcgatccacagcatcagcaggaagctggggggcagcggccactccggctcgtcctcgtcctccagccgcggaggcaggcaggcagcaggccgacatgacgatccgtacgcacgcacggcacgacgcacagcaccgcaccaggaatctcgacggcgatga

SEQ ID NO: 144859 - DNA, 1663 bp, Zea Mays
atggcacgggatccccacgagaacagatcggccatcactcttgtgagatctaggagaagaaagaggtgtaccttgcccgccgcgccgccttgcctctccttcgcctcgcctactgtgtgtcgcagtgtggtttggtgtggcttgaagacccgacaagacgacgactcgggggagtcgggagccgagaagagaaaggaagtacggaaatgtaaggcccattgggctggcgaagggttcattgggcctgatatactaacttacatggtcccatcttctagtttgtctaggcccaccgttcgtccgtgcgtgggtgtgggttgttgctccacctttcgcctgagtccaccttccacaggccaccgggaaggaaccggttcccgttggctcggctcggcttggcaaggcccgccaccgccctccctccccccgcgaccgcgactctgcgagcacgacgagacccacggacccacctcgatccagatccagccaactgcgcgcgtcggcgttaccccttcctcctcgacgccactgccgtggagcggggatcatccgcctgaaccgggtcgaccgcttcgttccttggtggtgggtagctggttgggggagctcagaaccttacacttacaactatgttctccttgttctatggtctatggaagcacgtcttcagcaaggcagagttccatgtgcttatcctcggagttcataaggctggcaagacgaccttgctagaaaagttgaagtcgatctacttgaagggagaagggcttccgcatgatcgtattgttccaacagttggccttaatattgggcgtattgaagatgcaaatgtaaagcttgttttctgggatctgggaggccagcctggcctacgaacaatatgggagaaatattatgaggaagcccatgctgtaatatatgttatcgactctgcttctgcatcatcatttgaggatgctaaatctgctctcgagaaagttctccgccatgaagatctgcatggagcgccaatacttatatttgcaaacaagcaggattcaccagcagctgtcacggaggaagaattggctagacatctgcatcttaaggagttagacgagaggccatgcatgttccaggctggatctgccttcaatgggacggggatcaaacatggcgttgactggttggtggaagaaatggagaggagtaaacgcaccgaggcactaagggcgcgtacagaagcagctgggaagatttaacacctcaattcagggctatcacctgtgattttccaaatgcaaagcatctgaggaggatggcttctgttaactccatgaatagagacgcttgtccgggtggagccttgtcctttcagtcacgggatccccagaaaagatttcttggttgtgctgctcttgcagttttgtagtagggtgtccattgtagcaatggcaggggtgaccgttgcttgggtttgttgacctgcgtagcacttaagattgtgtatctaaagttgtagggattcatgttcatgcgattatgcttggatatacggagtgacatcgtggagcataaagatgatttgtacattcgtcatgttcatcgagagtcatgtgacttttatcaaaagaaacaaatacattgtgatatcaatcacgatatatgtttttcatatccaaaa

SEQ ID NO: 144860 - DNA, 1244 bp, Zea Mays
cgttccttctgttttctgcggattttttttttttttgtcgcgaacgctcgagtcgaagtttcctttctggtatgagagtggtctgatccatccgcccactttgttgccgatttgtctgcaagtattcggttgtggttggtgagggtgggcggttggcaattgagcaggtggtgggtagctggttgggggagctcagaaccttacacttacaactatgttctccttgttctatggtctatggaagcacgtcttcagcaaggcagagttccatgtgcttatcctcggagttcataaggctggcaagacgaccttgctagaaaagttgaagtcgatctacttgaagggagaagggcttccgcatgatcgtattgttccaacagttggccttaatattgggcgtattgaagatgcaaatgtaaagcttgttttctgggatctgggaggccagcctggcctacgaacaatatgggagaaatattatgaggaagcccatgctgtaatatatgttatcgactctgcttctgcatcatcatttgaggatgctaaatctgctctcgagaaagttctccgccatgaagatctgcatggagcgccaatacttatatttgcaaacaagcaggattcaccagcagctgtcacggaggaagaattggctagacatctgcatcttaaggagttagacgagaggccatgcatgttccaggctggatctgccttcaatgggacggggatcaaacatggcgttgactggttggtggaagaaatggagaggagtaaacgcaccgaggcactaagggcgcgtacagaagcagctgggaagatttaacacctcaattcagggctatcacctgtgattttccaaatgcaaagcatctgaggaggatggcttctgttaactccatgaatagagacgcttgtccgggtggagccttgtcctttcagtcacgggatccccagaaaagatttcttggttgtgctgctcttgcagttttgtagtagggtgtccattgtagcaatggcaggggtgaccgttgcttgggtttgttgacctgcgtagcacttaagattgtgtatctaaagttgtagggattcatgttcatgcgattatgcttggatatacggagtgacatcgtggagcataaagatgatttgtacattcgtcatgttcatcgagagtcatgtgacttttatcaaaagaaacaaatacattgtgatatcaatcacgatatatgtttttcatatcc

SEQ ID NO: 144861 - DNA, 1893 bp, Zea Mays
ccatggccttcctcttaaggctcctcaagacgtcaatggcggtgtccgtgtccagcatctgcaggaccgacctggagaaacataggttctattttgtatgttgttttggtctacggaatatgtagttgttggcactattgtgcatgtaggagtagctattttggggtacaccatgcacaaaataatgttcaaagtttattatagggccggaagtgtatccatatatgagttacacacttaactgcagcagctctgcttggttctttagcatatacggaactctgtcattgtatgaatgcaaatattttttagtgggggacgaggggattgtttaggtgccacagtctccatcagcaatacctgaaccatcttattcactaaaacacactacccgtcattggcatttggttgcacaaattcatttaggaattgggttactggtgaacattttaggacccattccattacaaaaatatatcatccatacattttcattatctaaatgatgcatttggtatgacaaattcagtatgttgttattttaattgagatactctttggtacatgtggcaattccatctctcgcacagttgtatgaggaagcaaattgatggtgctgaactagatgagctgatatgcaagacaagaaaactaccccacacagcccttcatatgtggacattcagcaggactaacagaaagggcagcttcttgcttgaacctctgcagcatgggatgtgcaataatcttcaagaaacatatgagagaaacttcccctatgtcaaatttgcacaggaataatggacaagtcaacttaaccgctgcaaacaaacttttcatggcccatgcagctgattaatgatgaggccaatgaaaatcagctctggataggttccaaggacgattggtagtggtccttatagcgagttgctggaaatgctcaaagatgtcggccttaaaaattgggttgtctcatttggccaacttcctgttgatctgtttgagctcagatcaaccatctggagataatttccctacgttcgggcaactgataagctcccatacagcatgtttctactcagatcaactactgaacagctcccaaatgtgatcggtaaagttcctgaaggtcctctttttgtctcaccttagctcaataaaagttaaaataaaaacagcataagggtttgctttgttttatcatggttcatggtaaatttgtgccatttctgaacttcttttagtttgatgacatgttgtccaaacacttttgaagatgtgttgcacactggtacttgccacaagctcacaatttcttatcttattttgatttttttcatacaattttttcagatcaagaactgaggtggttatcatttttcataggggtgtccctttcttttcttaagaataactagattctaatccaatatctttagctgcaaaaccatccttttcctttgatgttatcgcttatattatgatttttttcctacgcgcgttgggcgcgcgccagttactagtatatactaagatgcttcatccacgcaaggagaaagtatacaacgattgaagaatgttccactcaatatatactgagatgcttcatccacacaaggagaaagtaaataagtccactgcctcctgcagctcagtgatggggtagggtgtcccaagtcccaacagttagatagatagctgtaggcagtaggatggtgtaccaatgattaagaaaattatgaccatagtttagactgccaagagtaaactgcaagaaggtgctaatcgccgctaaacaagtaaacaaccattcaacattcacatagctgtgggttctgataattcaggggtgcatgtgcatcatccaggaattaaatttcaaagagaagcaac

SEQ ID NO: 144862 - DNA, 5160 bp, Zea Mays
atgctccgatctcaggaccgccgacccttccgcccgccggatcgggctccacggcctccccacccccaccgcgaccagcacaaccacaacgaacaccggtaccagcctctctcccacccccacatcgaccgacgctacagcaatgaacaccggtatcagccccgcggccagcatcagcgcggttgccacgtgcagccgccccttcgcccgtcgcagttcgaggtattcctcgtccgcccgggccccgatttatccgcgccgaccgccattgaggtggaggccctcctcgcgggcctcccgtcgccggccccggccagcatatccgtccaatcctccggccgccatgccgcgcgcctcgtcttcacctccatcccggccgccgcggccgccgcgcgcgagctctgggcgctccgcctcgaggggctccacctcctcaccctggacctcccgcaccccgccctcgccgcccacgcctcgccgctcatcgcctcgctcttcgcctcccacgcctcccgccttcttgactctgacatcatggtcctctcggccgcccgctctgccgagcttgaggcgtccgtacgggatgtaaaacaacgtctgggctcgcctaatcgattccgcgacttccatcagctagacctcgagaagaagacactggagtctgagaaggaatttgtcgactccaaaattgcggagtacaaggaggcgatgtggtcgatacagcgggcaatgttgcgtggatcgggggacaaggaggagggtgtcgacttgtttgcggctgtagatgatggggaggtggactttgttaaggtgcatatgatgctgctgcgtgagtgccggaggcttaaggagggcctgccaatctatgcataccgcaggaggattcttaaccatattttcgccaaccaggctgaacttatggaaaaaggtcatgatttaataggagaaacaggttctgggaagagcacacaattggttcagtttcttgctgactcaggtgttgctggtggtggttccatcatatgtactcaacctcgaaagcttgctgctatatctttagcacatagagtagatgaagaaagtaagggttgctatggggacagttctgtgttgtcatattcaaccttactaagttctcaaggttttggcactaagattatattcaccacggacagttgtcttttgcactactgcatgagtgatgtgaatctggatggcatttcgtatattattatcgatgaagctcacgaaagaagcttgaatactgatcttctgttagctatgatcaagaagaagctgcttgataggctggatttgcggctcattataatgtctgctactgctgatgctgacagacttgctgaatacttttatggctgtcaaatatttcatgttagaggacggacttttcctgttgaaattaaatatgtcccagatgtatcagctgaggcttccttgaatagtgtaccaagtatttcttctgttgcttcctctactgcttcctatgttactgatgttgtacaaatggtaaacatcatccacaagaatgaagaagagggtgctatacttgcttttttgacatctcaactggaagtagaatgggcctgtgaaacattcagtgatccaaatgctgtggtacttccgatgcatggcaagctttcttctttagaacagaatcttgtcttcaaaagctaccctggaaagagaaagattatcttctgcacaaatatagctgaaacatcattgaccataaaagatgtgaagtatgttgttgattgtggcttggccaaagaatacagatttgttcccactagtggtctcaatgtactgaaagtcaactggatttcccaaagctctgctaatcaacgtgctggccgtgctggtcgaactggagcagggaagtgttacaggctctaccctgaatctgattttggtatgatggaagtgcatcaagaacctgaaattcgtaaagttcatcttggcaccgctgttcttagaatacttgctttgggtgttacggatgtaaagtgttttgagtttattgatgccccagatcctgaggctatcgctatggctgtgaataatcttgaacaacttggtgctatagaatgtttagtcctagcctctgttatggcaaatgctagtagcatattttgtagagtgggtactaatgaggagaaatataaagctgaccgcctgaaagtccctttctgtcaccctgatggagaccttttcacctcacttgctgtttataagaagtgggagactgggtatggtaacaaaaatacatggtgctggcagaatagtatcaatgccaagaccctgaggaggtgccaggaaactatatctgaacttgaaaaatgtctaaagcatgagctaaacattatcgttccaagttactggagttggaaccctgagaagcctactatgcatgatacatcgctaaagaagattattctatcatctcttagaggtaatcttgctatgttttctggacatgagaatcttgggtataaggttatttcagcaggtcagcgtgtgcaacttcacccttcgtgctcattgttcatttatggcagcaaacctgaatgggtggtattttcagaaatcttgtcggccgtgaatcaatatttggtatgtgtaactgctgttggtcttaacgaagtgcttacagttcaccccatgtcttttattaagcaactggaggagagtaaattgcagaggaaagtgattactgggataggaaataaatcgctgagaagattttgtggtaaatctggccaaaatctgcagaatattatctcacttctgagaaaagattgcagagatgatcacataatggttgatttagacttcagtagcagtgaagttttattatttgctaaagaacatgacatggaaaaggtcttttgcaaggtcaattatgctttggaacttgaagctaaattgctgagagacgaatgtgacgagagaagacctggtagctctactattgcactatttggctctggtgctgaaatcaagcatttggaacttgggaagagatatctaacagtggaaattctgcatcaaaatgctcgtgttatagatgaaaaggaacttgtttgtttggtagattctcttgttcctggtatagcaaattttcataaaaccgggaattttcagacaaacttagatgaaacaaagtgggggaggtttacgttcctcaaaccggattatgctgaagatgctatttcaaaattgaacgggattgagtttcatggttccttactgaaggttagtcctgtaagcatttacagccactcagggctaccatttcctgcagtaagagctaaagtttcttggccacgtaaggcaagcaggggagttgcacttgtaacatgtgctagtggtgaagctgaatttattgtaaaggactgctttgcccttggagttggtggaaggtatgtcaactgtgaggttagtaataggtacgcaaactgtgtctttgtcacagggattccattgcatgtaacagagccagaattgtatgatgcttttcatagtacaacaactaggagaatccttgacatccgcttgcttagaggacagcccacagctagctcgtccgtttctgaatgtacagaagcactgatgagagcgatatcactattcatgccaaataggaactttccttgccaaaaattccgtgttcaagtgttccctccagaagagaaagacttaatgatgaaagctaccataacctttgatggaagttttcacagagaggctgcaagagcactggaccatcttcaaggaagtgttcttccttgttgtctaccttggcagataatccagtgcgagcatgtatttcatagtactgtctcctgtccgatgcgcatttacaatgttatcagccaagatgttggtgctctacttgagagcttccgtagccaaaaaggcgtggcatacaatttggagaagaatgagaatggaaatttccgtgttaagcttactgcaaatgccacaaaaacaatagcagatttgagaaggcctcttgagcttctgatgaagggaaaaataataaaccatcctgatctgatgttaagcacagttcaattgctatggtcccgtgatggtatggaacaattgagatcagttgaacgggagaccggcacttatattctgtatgacaggcaaagtctgaatattaaaatttttgggagcactgataatgtggctgcagcggaggaaaaattggttcacgcacttgtacagctccatgagaagaagcctcttgaggtttgtcttcgtggccggaacctcccaccaaacttgatgaaggaagtgattgtaaagtttggggctgatttagaaggactgaagaacgaggtccctgcagtagatcttcagttaaatacacgaaggcagacactttatgttcgaggcagcaaggaggataagcaaagggtggaagggatgatctctgaactgataacctctagtgaccataatgctcaactgtcgtcagagaatgcatgtcctatttgcctgtgcgagctagaagatccctttaagcttgaatcatgtggccatatgttctgtttagcttgcttggtggatcagtgtgaatctgccatgaaatcacaggatggcttccctcttcgttgcctcgaaagtgggtgcaataagctgttcctcctagctgatctgaggtctctgctgcctgacaagctggacgagctgttcagggcttccttgaatgcatttgttgcatctagcgcagggttataccgtttctgccccacaccggactgcacatcgatttaccaagtagctgctgcaggcgcacaaggcgacagaccctttgtctgtggggcttgctctgtggagacctgcaccaagtgccatctcgagtaccatcctttcatctcctgtgaggcatacaaagagtacaaggcagacccggatgcaactatgcttgaatggcgcaaagggaaggagaacgtgaagaactgcccttcatgtggatttacaattgagaagagtgaaggctgcaaccatgttgagtgcaggtgtggcagccacatttgttggaattgcctggagaacttcaagagcagtgaggagtgctatggccatctcagatccgtgcacttatcctatgcagatctgatgtaa

SEQ ID NO: 144863 - DNA, 1315 bp, Zea Mays
ccaaaaaagagaaaaagaaaagcaccgaaaaactagcaaaccctacctcctctcctccccctcctcggcggcggaatgtccgaccgccgccgcgacaaggagaagccccgcgaccgcgacatcgaccgtcatcgcgaccgagaccgcgacatcgaccgtcatcgcgaccgagaccgcgaccgggaccgggacagggacagagatcgcgagcgagaccaccgccgcgagcgcgagcggaagcgctcccgctcccggtccccgtcggcggatcgggaccgctcccaccgccgccactctcattcgcaccgaggccgtccttccccctctcccgacgccggccgccacaagcgccgccgcgaggcgtcccctgcctccgcggaccatcaccataaggaggaaaagaaggctgccgactctcacgcgacacccggcggaggggacatcgcggccgcggccgctgcggtgggtgacggcgacgtgaatgcggaggaactggagatgatgaagatgatgggcattcccgtcggtttcgactccaccaaggggaagcacgtgcccgacgccgacgtcagcggggtgcgtgccgtcaccaagcgccagccgcgccagtacatgaaccgccgcggcggattcaaccgccctctgccgcctgagcgcaaccgctaaggatgggaaaaggatcatgcgccaacacaaggatgtgctgatttctgggtagcagttactctgttactggacagtgtagtgagcatgaaaacagaatttggtggatcattttgaaactgtggctttacagctttaacatgatgtttctggctttctccgtgcaatttgcatttgtttcaggtaatcaggcatgcaccacatggattcccaagtgaaactgcttttgcttttagttgtatgctttgcaatgaaattattggtaatggacatgagtgcaacatttgtgattataagtttcgaagatctcactgagtagcaggaccaaagagacctgttctttcaataatacgtagaataattctgtaataataatttaagtttaggctactgcattagatccagaaaccagtaccttgagtggtcgaccagtttatggtttgagggaattatagggcaatagtttgaggttgctagatcacttactagtttgctttatgctccagtggttgtttcatgtaagtttgttgtatgctgatgctgccatcctgacaatttaccttggctgctgtcgtgcgctgtttggacaagacaatgcaatatcagaactcgggtatgtgtttgatgttaaatgattaaggactgggttggc

SEQ ID NO: 144864 - DNA, 920 bp, Zea Mays
ccaaaaaagagaaaaagaaaagcaccgaaaaactagcaaaccctacctcctctcctccccctcctcggcggcggaatgtccgaccgccgccgcgacaaggagaagccccgcgaccgcgacatcgaccgtcatcgcgaccgagaccgcgacatcgaccgtcatcgcgaccgagaccgcgaccgggaccgggacagggacagagatcgcgagcgagaccaccgccgcgagcgcgagcggaagcgctcccgctcccggtccccgtcggcggatcgggaccgctcccaccgccgccactctcattcgcaccgaggccgtccttccccctctcccgacgccggccgccacaagcgccgccgcgaggcgtcccctgcctccgcggaccatcaccataaggaggaaaagaaggctgccgactctcacgcgacacccggcggaggggacatcgcggccgcggccgctgcggtgggtgacggcgacgtgaatgcggaggaactggagatgatgaagatgatgggcattcccgtcggtttcgactccaccaaggggaagcacgtgcccgacgccgacgtcagcggggtgcgtgccgtcaccaagcgccagccgcgccagtacatgaaccgccgcggcggattcaaccgccctctgccgcctgagcgcaaccgctaaggatgggaaaaggatcatgcgccaacacaaggatgtgctgatttctgggtagcagttactctgttactggacagtgtagtgagcatgtataaaccttgatggctatttaatttgcaaaacactgtagaatgatatcccgttcccttttgtcatcgtttattctgtgggcattccaggaaaacagaatttggtggatcattttgaaactgtggctttacagctttaacatgatgtttctggctttctccgtgcaa

SEQ ID NO: 144865 - DNA, 109 bp, Zea Mays
gttcttgtatagtctatttgccttatcatacaatttgtgaaagaatacccaaagaaaatctttgtgaatactacttatattttgttatctttgttagattgttcgaaag

SEQ ID NO: 144866 - DNA, 2086 bp, Zea Mays
agaggagagagtcgctcagcactgcacgactcctcccccatctaccactacctgtctacctacccagcccatcgatcacccctcgcaacgcaatggcgctggccaccaactccgccgctgccgcagcagctgccgtatccggcggcgcggcatcccagccgcaccgcgcggccacgttcctcccgctgaagaggcgcaccatctccgccatccacgccgccgacccgtctaagaacaacgggcccgccgtccccgcggccgccgccgctaagtcatctgcctctgcggtggccacgccggagaagaatccggcggcgccggtaaagtgggcggtcgacagctggaagtcgaagaaggcactgcagctcccagagtacccgaaccaggaggagctggacacggtgctcaagaccatcgagacgttcccgccggtggtgttcgccggagaggcgcgccaccttgaggagcgcatggccgaggccgccatgggccgcgccttcatcctccagggcggcgactgcgccgagagcttcaaggagttccacgccaacaacatccgtgacaccttccgtatcctgctccagatgggcgccgtgctcatgttcggtggtcaggtgccggtcgtcaaggtggggaggatggctggccagtttgccaagccaaggtccgaaccgttggaggagagggacggcgtcaagctgccaagctacaggggcgacaacgtcaacggcgacgacttcaccgagaagagccgcgtgccagacccgcagaggatgatccgcgcctactcgcagtcggtggcgacgctcaacctgctccgcgcgttggcgaccggagggtacgctgccatgcagcgcgtcacacagtggaacctcgatttcatggatcacagcgagcaaggtgataggtaccgtgaattggcccatagggtggatgaggctcttgggttcatgactgcagcagggcttacagttgaccacccgataatgacgactactgacttctggacctcgcacgagtgccttctcttaccctacgagcagtctcttacccgtaaagactcgaaagattacgcctgtttatttgttgatgcttggtgtggaggcctggtgggtgctcttggcacaagttacatgctggggagctataggagggtacctgttgcgttgtggaagacagtagctagtattatgtgttgtaattgtatgccttcgtttcatgttctgggtgcgtgacttgtcgactttgctgcttctggggttctgaccttggtaaggagagaataaagagataatatgagtgcgagatgcttgctgaactggtgctcagtaaattgatcccttgattgaatggttctgttctgttatcttttgccgcacttctccgaaaaagtttcaggtatgccatcaaattttatactcattcattatgtgtcacaaaaattgtgtgtatgacatgtggaaccagtggtacacaagaaacgattatattttccaatggaatacagagaattggtcctaaaattttcactagcgttttgtggtaccacctactgcaaagccatcctacttagctttggagacgagaaagtgcctgtatggaagtagttgccgctcatttattgttggaggccttctccttcagaagatcttcaaaaaaataattaacaatttgttttcaggataatctattacaggaaacttcgtcttcaagatacaagctcttctcctttatgacgaaggcatacaagataaagacagatcaaagaggataaaagtaaacgctgaagctatcaccagatagacagcttcggctcgcaatgaagatgatgaataatgatgatgatcgaaagaggaaaagactatttagtccttaataaattgtattacgatcatgtgtaaatgttgagagcataaatgtacttttgtccgggctgcgtcccgtgcctataaatagatgaacaataacactgtactgttcacgctgaattgtattcactttctcgcatccacacatttgagcaagccgaatgtattaatgtaatattaacattattgatattcatttatgttctatggaattgaag

SEQ ID NO: 144867 - DNA, 2779 bp, Zea Mays
agaggagagagtcgctcagcactgcacgactcctcccccatctaccactacctgtctacctacccagcccatcgatcacccctcgcaacgcaatggcgctggccaccaactccgccgctgccgcagcagctgccgtatccggcggcgcggcatcccagccgcaccgcgcggccacgttcctcccgctgaagaggcgcaccatctccgccatccacgccgccgacccgtctaagaacaacgggcccgccgtccccgcggccgccgccgctaagtcatctgcctctgcggtggccacgccggagaagaatccggcggcgccggtaaagtgggcggtcgacagctggaagtcgaagaaggcactgcagctcccagagtacccgaaccaggaggagctggacacggtgctcaagaccatcgagacgttcccgccggtggtgttcgccggagaggcgcgccaccttgaggagcgcatggccgaggccgccatgggccgcgccttcatcctccagggcggcgactgcgccgagagcttcaaggagttccacgccaacaacatccgtgacaccttccgtatcctgctccagatgggcgccgtgctcatgttcggtggtcaggtgccggtcgtcaaggtggggaggatggctggccagtttgccaagccaaggtccgaaccgttggaggagagggacggcgtcaagctgccaagctacaggggcgacaacgtcaacggcgacgacttcaccgagaagagccgcgtgccagacccgcagaggatgatccgcgcctactcgcagtcggtggcgacgctcaacctgctccgcgcgttggcgaccggagggtacgctgccatgcagcgcgtcacacagtggaacctcgatttcatggatcacagcgagcaaggtgataggtaccgtgaattggcccatagggtggatgaggctcttgggttcatgactgcagcagggcttacagttgaccacccgataatgacgactactgacttctggacctcgcacgagtgccttctcttaccctacgagcagtctcttacccgtaaagactccaccagtggccttttctacgattgttcggcccacatgttgtgggttggtgagcgcactcgtcaactcgatggagcgcatgttgaattccttcgtggtgttgccaatcctcttggcataaaggtgagcgacaaaatgaaccccagtgacttggtgaagctgattgagattctgaacccttcaaacaaacctggaaggatcaccataattacaaggatgggggcagagaacatgagagtgaagttgcctcatctcatccgtgctgttcgcaatgctggattaattgtcacatggattactgatcctatgcatggaaacaccatcaaggccccttgtggcctgaagactcgtccattcgactcaattctggctgaagtgcgcgcattcttcgacgtgcatgatcaagaaggaagtcacccaggaggcatccaccttgaaatgactgggcagaacgtgaccgagtgcattggtggatcacggactgtgaccttcgatgacctgagcgaccgctaccacacccactgtgacccaaggctgaacgcctcccagtccctggagctcgccttcatcattgcagagaggctcaggaagaggaggatgcggtcggggctcaacaacagcctgcctctgccaccactggctttctaagtagccgaagctgaacagagaaggtagagggatagttgcggcgactcgaaagattacgcctgtttatttgttgatgcttggtgtggaggcctggtgggtgctcttggcacaagttacatgctggggagctataggagggtacctgttgcgttgtggaagacagtagctagtattatgtgttgtaattgtatgccttcgtttcatgttctgggtgcgtgacttgtcgactttgctgcttctggggttctgaccttggtaaggagagaataaagagataatatgagtgcgagatgcttgctgaactggtgctcagtaaattgatcccttgattgaatggttctgttctgttatcttttgccgcacttctccgaaaaagtttcaggtatgccatcaaattttatactcattcattatgtgtcacaaaaattgtgtgtatgacatgtggaaccagtggtacacaagaaacgattatattttccaatggaatacagagaattggtcctaaaattttcactagcgttttgtggtaccacctactgcaaagccatcctacttagctttggagacgagaaagtgcctgtatggaagtagttgccgctcatttattgttggaggccttctccttcagaagatcttcaaaaaaataattaacaatttgttttcaggataatctattacaggaaacttcgtcttcaagatacaagctcttctcctttatgacgaaggcatacaagataaagacagatcaaagaggataaaagtaaacgctgaagctatcaccagatagacagcttcggctcgcaatgaagatgatgaataatgatgatgatcgaaagaggaaaagactatttagtccttaataaattgtattacgatcatgtgtaaatgttgagagcataaatgtacttttgtccgggctgcgtcccgtgcctataaatagatgaacaataacactgtactgttcacgctgaattgtattcactttctcgcatccacacatttgagcaagccgaatgtattaatgtaatattaacattattgatattcatttatgttctatggaattgaag

SEQ ID NO: 144868 - DNA, 2295 bp, Zea Mays
tgagcgctggggcctgggtgggagccaccaggtatgggtctcttccttggctcgcactcagatcggtttcgatgcgtttcctccgtcgacaaggcgcttgcttgtccagtctgcaggaaccaggaacggggctggtgctggtcccagccagtttctctctgtctctccctctccgtgcatgggcccgcccaacttgcaaatatttgaaggcttgcagtgatgttccactgcgtcgggcaggctcggccgctcgggcacaaggaaggctggctggtgcaagtaaagtattattaccgctaccgccacttcaccacgccgtgacagaacagagtgacacttcctcctagagtcctagcgtttcgtttttattacgcggtgatggtgaatgatgaggagcatcatctggactgaaaccaccccaggccccgactccggccaataaccacgcaaccgccaagattagcagaaccccaggattaaccaggccacccccgcgctccagcctcccgcgcccgggccgccctcgggcccttcccccctccccgcgcgatcgccgccgcagcatcaatgcctccacctccgccgccggccgcctgcagcagggggcggtgcagcgcgctcagcttcgcggcggcgcgggaccgctgcttcagccaccgcttccgcagggcggggctgcgcccgctcgccgtgccgctccctggcccgggccccgacgccgacccggccaccaccgtccacatgtgggtgcccgcgggcccgccgccgcggaacccgctgctcctcctgcacggcttcggcgcctccgccacgtggcagtgggcgccctacctccgcccgctgatcgccgccggcttcgaccccatcgtgcccgacctcctcttcttcggcgcctcctgcacgcgcctccccgaccgctccgacgccttccaggcctccgccatcaaggccgccatggacgccatcggggtccccaggttcggcctcgtcggcgtcagctacggcggcttcgtcgcctaccggatggccgccatgttccctgaggcggtccaccgggtcgccctggtctgcgccggggtctgcctcgaggagagagacctggcggagggcctcttccccgtggccgggatcggggaggccgccgcgctgctcgtgccgcaccgcccggaggaggtgcgccgcctagtccgcctcaccttcgcgcgcccgcccctcatcatgccctcctgcttcctatgggactacatcaaggtgatgggctctgatcatatccaggagaaggctgagctgctatacgctttgattaacgggaggcaactctgtactcttccaaaattgacccagccgacgcttataatctggggagagcaagatcgggtgttcccaatggagctggctcacagattgaacgggcatctagaggggaattctcgattagttgtcataaaaaatgctgggcacgcggtcaatatcgagaagcccaaggaagtgtgccggagcatcattgagttcttcaaggagcctgtcgctggagctgcaaatgcggacgacaaggtgtagtagcttccaccaatggcggacgtggataggttttcgctgggcatcggcagacggcacacccgcttgtggaacgcaaacacaaggcagatacgtggcattgtacatctacatccctctgccattgttctgatgtacttaaagggtgtatgtagagtcattgcagtagcgattcataaagcatgtaacggggaacagagggaaaccatagtggctcaaatccgagtgaaaccactgtgttgttgccgttctcggatccctgcccgtatcgcatttctcctgccatgacgaccacatggcaaatcgcgggtgacatccggcactcatgcggcaagcaggcaacgtgtcgcagaaactatggagtgttggtgcatggaatggaagcatacgagtacgatttgatcggtccctgtctaaaatccagcatatgatcccagcgactacaacgcgaccctcgcgtagtcgcgtgtaagagcagtcttttattcatgggccgccgcagtccattgttcgttgaacacacccgaccccacggcccgtcagcccaacaaagttaagctggaggacaaaaaaattatggggtgagagaggctcgaactctcgacctcaggataaactcaacttagctatgagacctacgcgctagccaactgcgccaccacccctttgtgataaagtgtactataaatttaatgtaactatataacaggccggagacattatgcttcagttaactcc

SEQ ID NO: 144869 - DNA, 1986 bp, Zea Mays
tgagcgctggggcctgggtgggagccaccaggtatgggtctcttccttggctcgcactcagatcggtttcgatgcgtttcctccgtcgacaaggcgcttgcttgtccagtctgcaggaaccaggaacggggctggtgctggtcccagccagtttctctctgtctctccctctccgtgcatgggcccgcccaacttgcaaatatttgaaggcttgcagtgatgttccactgcgtcgggcaggctcggccgctcgggcacaaggaaggctggctggtgcaagtaaagtattattaccgctaccgccacttcaccacgccgtgacagaacagagtgacacttcctcctagagtcctagcgtttcgtttttattacgcggtgatggtgaatgatgaggagcatcatctggactgaaaccaccccaggccccgactccggccaataaccacgcaaccgccaagattagcagaaccccaggattaaccaggccacccccgcgctccagcctcccgcgcccgggccgccctcgggcccttcccccctccccgcgcgatcgccgccgcagcatcaatgcctccacctccgccgccggccgcctgcagcagggggcggtgcagcgcgctcagcttcgcggcggcgcgggaccgctgcttcagccaccgcttccgcagggcggggctgcgcccgctcgccgtgccgctccctggcccgggccccgacgccgacccggccaccaccgtccacatgtgggtgcccgcgggcccgccgccgcggaacccgctgctcctcctgcacggcttcggcgcctccgccacgtggcagtgggcgccctacctccgcccgctgatcgccgccggcttcgaccccatcgtgcccgacctcctcttcttcggcgcctcctgcacgcgcctccccgaccgctccgacgccttccaggcctccgccatcaaggccgccatggacgccatcggggtccccaggttcggcctcgtcggcgtcagctacggcggcttcgtcgcctaccggatggccgccatgttccctgaggcggtccaccgggtcgccctggtctgcgccggggtctgcctcgaggagagagacctggcggagggcctcttccccgtggccgggatcggggaggccgccgcgctgctcgtgccgcaccgcccggaggaggtgcgccgcctagtccgcctcaccttcgcgcgcccgcccctcatcatgccctcctgcttcctatgggactacatcaaggtgatgggctctgatcatatccaggagaaggctgagctgctatacgctttgattaacgggaggcaactctgtactcttccaaaattgacccagccgacgcttataatctggggagagcaagatcgggtgttcccaatggagctggctcacagattgaacgggcatctagaggggaattctcgattagttgtcataaaaaatgctgggcacgcggtcaatatcgagaagcccaaggaagtgtgccggagcatcattgagttcttcaaggagcctgtcgctggagctgcaaatgcggacgacaaggtgggaacctttcatctctaaccaagacagtgagctctatcagttggaggactaatttatgatttttttcactcgctcgatccttggattgctcaacagatgatgcactagccatcattcaaaacacgcacttgcacgcaaatagacgtagatcatggaggctactatactatacacgcatgttggctgactggtttccggcggcaaatcttagaacgctgtgctgtggttcgtctcgcaggtgtagtagcttccaccaatggcggacgtggataggttttcgctgggcatcggcagacggcacacccgcttgtggaacgcaaacacaaggcagatacgtggcattgtacatctacatccctctgccattgttctgatgtacttaaagggtgtatgtagagtcattgcagtagcgattcataaagcatgtaa

SEQ ID NO: 144870 - DNA, 914 bp, Zea Mays
ctcggaccaagcagcggcagcaaagccacgacagcagtcgaagcgcgcggcgcgcctgcctagccatcccggccacccggggccagggcccagggggaggggaaaccgaggcaggcggcggccgcagcagcggcagcgcagggcgcacgcgcttctcgtttcgtgtccccacaccccagccgagggggagttggagggaagtaaccggaggcgcagcttcaaggaggaggctggcggccgagcgttcgtgcggcatggggagggacgagctgctgcggcggagcctcgtggcgctggcggcggccgtggcgctcacgggcttggccacggcgtcgctgcgcaaggcggcggccacatacgggttcggcatcctcgccatcgctggcgtgctgctcccggactgggagttcttcgaccgggactactcccagtggctcacccccatgcccgcctcccgacgcacggccgcggccgcggccgccgaccgggagcacgacgtctggaaattcaagccctatcctctcagggtggccatgctgacgaccatctacgggttcggtcttcacaagtggtggacgtacgtatctagctagcggagtgggtcttcacagcatgaccgacgaacccgaaggttgaaatatcattgattaggttgtagccaagttcctcttttttttgttgttggattggaagaagcaaaatactgtgacagcgccttgtcatatatcatcagttcttcactgtgatcatgagattagccagctgttctaatggggagcgaccctcgacacaaattgatatatgtagcgtaactagcgatcttccattcgcgctgctgctgctctttgatcgccgtcattgcttctgaaggactattgcttctgaaggactatgaatcttacagtttgctcgta

SEQ ID NO: 144871 - DNA, 3986 bp, Zea Mays
atggcgcgaagcaacagctggtacgttctgcacttctgctccacctccctaaaatcttggccgagctccgccactgaccatccccacttgtttccccagatacgctgccgcctcctatcgctccccttcctccgccgcggcatccactcctccgtgccaacttcggtcggcgccgctacagatgctacactcctgggtcgcctcacccgcctcctcctcctccaccgtttctctgccgtcgctcgcctcctctcctcctcggcccccctcacccctgcactcctccacgcggcgctgcgccgggtccgcctcgacgccgacgccgcggtgcacctcttccgcctcgcccctttccccccttccctcctcgcgcacgcccagctgctccacatcctcgtccgcgcccggcgctccgccgacgcccgcgcgatcctggcatccctcctctccgcacggcccccggctccgcctctctttccgcacctcgtcgaggtatataaggagttctccttctccgcagcctcattcgacctgctcctccgtgcacttgccaacgccggccaactcgacggcgccctccaggtgttcgacgaaatgcgaacgctcgggtgccgccttagcatgcggtcctgcaacagtatactcaacaggttagcacagactggggacctgggcgccacagtggcagtgtttgagcagatgcagcgtgcaggggctctgccagacaagttcacggtggcgattatggcaaaggcttactgcaaggttaagggggtggtgcatgcattggagttcgtggaggagatgacaaagatgggtgtggaggtgaacctagtggcgtaccatgcggtgatgaatggctattgtgaggtggggcagaccaacgatgcaagaaggatgttggactcgctgcctgggagaggtttttcaccgaatatagttacatatacattgcttgtgaagggatattgtaatgagaagaacatggaggaggctgagggggttgttcaggagattaggaagaataagcagcttgtggttgatgaggctgtttttggtgcagtgatcaatggctattgccaaatgggaagaatggaggatgcagctcgattattgaatgagatggtggattctaggctccaggttaatttgtttgtgtataacataatgattaatggatattgcaagttggggagaatggtggaagcacataacattttgcatgaaatgacaggtgttggtgtgaggcctgacacatacagttacaatagcctagttgatgggtattgcaaaaagggtttgatgaacaaggctttcgaaacatataatacaatgttaaggaatggattcgcggcgacgacattaacatataatgccctcctaaaaggtttttgctcgcttggctcaatcgatgatgcgctcagactttggttcctgatgttgaagaaaggtattgcacctaatgaaatcagttgtagcaccttgcttgatggtttcttcaagtcaggtaaaactgagaaggccttaaatctttggaaagaaaccttagcaaggggtttagcaaaaaatacaaccacatttaacacagttatcaatgggttgtgtaagattgagaggatgcctgaagcagaagagcttgttgacaaaatgaagcaatggagatgtcctcctgatattataacttacagaacattatttagtggttattgtaagataggtgacatggatagagctagccgcattctgaatgaactggaaaatttaggttttgctcctacaattgaatttttcaattctttgataactggacacttcatagctaagcaacatggaaaggtgaatgatatactctttgaaatgagtaataggggactttctcctaacacggtcgcatatggagctctgattgctggatggtgtaaagagggagatttgcatacagcctataacttatatcttgaaatgattgagaaaggtctggtaccaaatctttttatttgcagttctttagtgagttgtttctacaggaagggaaagtttgatgaggcaaatttagtgttgcaaaatcttgtgggtactgacatgattccagatatcagtgcgcccagacttgagatagggaaagtagcaaatttcattgataccgttgctggtggaaatcatcattctgcaaaaatcatgtggaacattgttatttttggtctatgcaaattgggaaggattgaagatgctaaaaacttgttggcagatctaaaagacaaggggtttgttgctgataatttcacttattctagcctcatccatggttgttctgcttcaggatttgttgatgtagcttttgatttgagggatacaatgttgagtgttggtctcactccaaatatagtaacctacaattctcttatatatggtctctgcaagtctggggagttatccagggctgtcagtctttttaagaagttgtggacaaagggtatatcccctaatgctatcacatataatacattaattgataagcattgcaaggatggttacataaccgaggcctttaaactaaagcaaaggatgatagaggaaggtattcatcctactgtgttcacctattctatactgattaatggtctctgtactcaaggctatatggaagaagcaatcaagcttcttgatcaaatgattgagaataatgtggatccaaattatgtcacatattggacactgattcaaggttatgttagatgtgaaagtgttgatgttccaataatgccactagatcaatcaaccatagttgttaaggcgtcgcctaggcgggcggtaaggcgccccggcagcgtaagtcgtcctgctcgccttactccagcacctaaggcgagtgggagagactatgtgctcaacatgcaagtctcaatcactttccagcaatataattgtctaattgtcttctgcgaaggggcctggtcatatcatgagaaatgtttccaacctccctcacatgtcagccaagtggtatcttctaactacaggctggattggctttctaagtgcagagacttgttgctggtgactttgccccttttatctggtacacgctacattccatcaatattgcagtccgtatcctatccacgattgttcttcatggatcaggctttaagcaaggtttaccctctttttatacctaggaaaaatgtttgcacaggtggtgaagaaaccccattgacagaaagtggttcgagttactttggagctgactctggattctgtcaagaaacagtcttttggttccaagagaagcaatagttttagtttctctggtgcatcttctcactccatggagaggcatcgatatttgcagagaggaatgttgtcgtcatcaaaggcccttcgaactgcttttgaatcgaacattgcttcaaggtcagaaaagcaagcgcagccgctaaacagattgatttgaagtgaagttcagccgtatcatcagacatcatgcacacaaccatcatggtaaattcctgttcagcacgcacagtaggtctccgtgtgctctgtacggcctagtgctgctgcgctagctggttgggtgcgtccgtgcgtggacgcgctgtagcaaccagggcacccctgtccatggtcgcgatcgcggcctccgctggcctggcccttggcgtgtgcggggcgtagagacggaggagaatgttgtactatgtgcgggcgcggcgagcgaagccggctggaccagaccagaccacaccagggccagagccagggccacgtggcattggctcggcgtagagaacgtcctcccaatatctatgaatttactacaatatacgtctcattatttttagattcatatatgtatccatcacgggggcctccggcctcgttatagcaagtatgggctgactgtaatataatatccaactccgattcaaaactgtaatgtttattacaaaatttgacttagaagtagtgtctaaaaagtggca

SEQ ID NO: 144872 - DNA, 2878 bp, Zea Mays
gtcctgcatgctcaaactctttcgctagtcagagccaggtagcctcccgatctatggatgctgaaagcccaattagtggacagatttcggaatatgaagatgctgaaacagataattctcgagcaagctccagataccaccctttcactgagatgcagcagcctgtggatggtaccgtgatgggtaacttctttggcgcttcatctccaagtgtttctgtaaataatctagctgcaggttatcttggtgaaatgcaacctacgggagctaattttaccagtcattttgccactcgcaatgacatagctagtgtgttcaatgatactggctctgagttaggaggtggtcccaaaacttcaattgattcagtactgttgggtgaaccatttccagaatatccaggcggcttcatggagtcgacactctattcttctgttgcaacattgggtaacagtctggaagatggtttgcagacatttatgtctgaggctctctacaccaacaatctcactcaaaaggaagttgatgcacttggtgcagcaggcataacatcctcgaagtatcttaagaatgatgccgtagggcattggagtttacctatttccatgagctggtatgatgtaaccctttattttcagacagagaatgatggttatacagatcaaagtgtcaggtatccacttttaaagcagtcatcatcagacctctttaagatggagccagatggtttgaaaaaattcgacagcttttcaaggtggatgagcaatgagcttccagaggttgttgatttggatatcaagtccagctctgatgctttctggagtactactgaaaccgtgaatgttgctgatggatctagtatacctattaatgagccattggatgtatttgtagtcagcccctcactttcccaagaccagctcttcagtattattgatgtatctccaagctgggcatacaatggcacaaaaaccaaggtcttaattactggtacattcttggcaaaaaaagaagatgtggaaaattgcagctggtcttgtatgtttggagactctgaagtctctgctgaagttttagtggatggctccctgcgttgctatacaccagtacaccattctggacgagtcccattttatgtgacatgttcaaatagagtagcttgtagtgaagtgcgagaatttgagttccgtgattctgagacccattatatggatatctcagataagcatactacaggcataaatgaaatgcatttacgtatccgccttgataagttactttccctggaaccagaagactatgaaaagtatgtcttgagtaatggaaataagtctgagctgatcaacactatcagttcattaatgcttgacaataatttgtctaatctggcattaccatctgatgagaaggaattgtgcactgtacaggatcagaatcttgagaaacaggtgaaagaaaagctatattactggcttatccataagatacatgatgatggaaaaggtccaaatgtcctaggcaaggaaggacaaggtgccattcatttagtagccgcacttggttatgattgggctatcaaaccaatagttgcggcaggagtaaatataaacttcagggatattcgtggatggactgcgcttcactgggctgcatgttgtggaagggagcggacagttggtgccctgatagcaagcggagctgcatctggtgctttaacagatccaacgcagcagtatccatctggaagaactcctgctgatttagcatcagaaaatggtcacaaaggcattgctggttttcttgcagagtctgctttgacaagtcacctctcagctcttacattaaaagagtcgccaagtggcaatgtggaagaaatatgtggattaacagcagctgaaggttttgcagcatcaagttcttcccagcttgcttgtgttaattctcaggaagagtccttaaaagattcacttggtgcagttcgtaaatcaactcaagcagcagccagaatatttcaagcttttagggtggaatcattccacagaaagaaggttattgaatatggagatgatgattgtggattgtctgatgaacgcacactttcacttgtttcccttagaaacccgaaatctggacacggtgattcacattctgctgctgttcgtattcaaaacaagttcagaggatggaaaggaagaaaagagtttatgcttatccggcagaaaattgtgaagatacaggcccatgtacgtggacatcaggtaaggaaaaactatcggaaggtagtctggtctgttggcatcgtggagaaagtcatactgaggtggaggagaaagggaaggggtctgcgaggtttccaacctgagaaacaacttgaaggtccatcatggcagatccaacctgcaaaggctgaggctgaggatgaatatgacttcttgaaggatggcaggaaacaggctacaggcaggttggatagagcactggctcgtgtgcgttccatgaatcagtatcctgaagcaagagaccagtaccgcaggctgcaagcctgtgttaacagcctacgagagtcccaggcgatgcaggacaggatgctggctgattcagctggcaccgatgggggtgatttcatgactgaattggaggagctatgccgggatgatggcgatgccccgatgtcgactatttcttgacatggagcttactatagatcagttaggcagtgacatgttctttaccagactagatgtaaattgttgttactaaatggtctctactcaccgttgaacaccataatataatgatatataccagctaatacatggacttctacagattatgataattgatcagtataatttgtggaattattatattttaaagc

SEQ ID NO: 144873 - DNA, 2359 bp, Zea Mays
ggggctaacctccgagcggcgaggatgaggggcggcggcaggatgattgacgatgaagagcgggtgggccacgcggagatcccgaccagcttcggccccgagctgcgcgcctgcctccgatgccgcctcgtcaagacctacgactaggaacccttctccgctggcgccgctcccctcccccctcctcacgcctaggcctgcggtctaggttcaccagccttccgttgaagggacggttcgaggactgggggtttcgtttctcctggtgcggtccgttctcggcggcggctaagaattatctctttgatggaccccagtaggagttgggcagctcgttggttgagaattggtgacccttgttctcgtgtatcctgcagtttgtttgcctcttcaatctagtgcgttcatttttgtctttttttttcttcactcgtgcaagggtttagtattttgaactgtgagcgaagtctcacatcaggtgcagtttatattaaatgttgtttatgtagtaactcccttggtttacatggttttccagattagagagcaacatctgtaggaaaggcacttttattttcagttgtcgttcatagcaaaactgcacagctaaggttacctcatgtggcagtgtaaaaagtaaaagagatgaaaaatacatgtttgcattttacttttgtcataacttttaggtggcacctctgtttctgtgcaatacgaattaagagatgttatagtttctacatgatcagcatgtcagttccaaataagtgcctgatgtttatgtttgagcttgtatttagagctaaataaaatcaaggccttgcatcagtttgtttaaagttcacttctgttcttggttcatagtagaatttatttatggatacgtctattcgttgcgctgtggcattattaaccgggatcatgcaaatctgcaggtaggttcattccgggttgctacacacttgctgtttcggaggaacttcaagaagagtatcaggggatttgccaagacaacaacgtgtagtatgtgccacccaagcgatgtctagagctcctgaagcagtatgaataatttagcttatataaaatggtgcatgtgcttgttgccaagcgaactgccctgctttgttgtatctgagtgctaatcaggacccctaattaaccctttcgtgctacgaatgggttttttagccaagatggcataaaacattagcacaaatgtcagacacatgaccaagacaagttcataggccagcaattctgttcaacaaacacctcgtcttcgtcgtacacggatgtggataccaatttgcagattgcgagccacgagcccatctaccagtagcctctccagtgtccatactgagaaatttatcgcaccagcaccactgtcacaatacaatggtacaggtactgcaccgtgcacgtgcccacaagctttcgacatctgcgtgtcagcatcggttatcatcaatcaccaagaatgactggaccgtggcgcgctggtcctctgcgctggtcctccgggaggtcagatgatacgggcgtaacttatctaagaacaatcaaataaataatttaattcggctgagcacaaagtaacatttgacccgattaataatccaacagtcaatgtttaccagtactttaaagagaagaacacagcactaccaaatgctgaagtaattcacacaaacagatcaaaagctagtcttacaaaaccatcggtagttacacagcttgatcggtcgacggactccacaaatgacacggtacgaagtctttgcggcaaatcatcagcattcagatccaggtcaatcgaccagtcagcgattctgttgctagaacctctcccacgccttctattgctgaagaagggtaacgagcaccaaaaaatacaaatactcgcatgcggcatgcaatcatacctttcctactctagatgcattagtgcagtatttcatgcaaaacatgaaccattaacttgcaagcctacgtgggtatgttcaaagaacagttggggtagccagataaggatacccttttatgaccataagcatgtcaataaacttgaattgcgtcacaagtgtgtatacagctttaatactcacctgcttaagacatgcgcttatgcattctcgataagacatgtttggcaaaccgcagaaatgaattgacagcacatccagtgcatgcaacgattaattgtgcacatgcagaccttatgatccaaaaacccaaaacaggactatgatagatcagtgcagacacatctaaatccaaatactataatgggggttaacacctatagcatgtagatgcatggggcgatgcataaatcattggaatcttacttgtc

SEQ ID NO: 144874 - DNA, 1256 bp, Zea Mays
gcgcgccgttgttgatctatgcagctgcgggttgagaacttcgttggatttgtttgaggtttgctgcgatatgcgccctagagtcttttaactcggttcttgaagagtttcttttttcagttctggtctataggctccggaaaaggaatggctagtagtgttaccgtaatgtgactatggtttagcccttcatggaattgccatctcaccaactatgttggagtactgcaaactgaccgtagccatcaaaatgctccccgtaaggaaaccatgctctgctcccaagtggaaggagatgacaggaagcggtatatttgcagctgggggcgagggtgaagaagatgaatccgccaatgtctctgcaacttccgtccggacggctccaaagaattatcaggcaatcagtactataagccacatctcatttgccgaggaagaaagcatctctccaaagaagccaacttcgatatcagaggtcgcaaagcagcgcgagctaagcggcacgcttctgagcgaggacgacagcaagatgaagaggcagatatcggacctgaaatccaaggagctcagcggccacgacatctttgcccctccggaggatcccaggccacgcaactcggagaacggctcgacctcgcagactccgggcaaaaatgcacacgtaagcaacttcaagttcggcgaggccgacgaggacagcgcggtgaagaccgcgaagaagatccccaccaagaagttcaccgacctcgcgggcaatatcttcaagggcgacgacgaggcacccgggacggcggagaagcaccacctgagcacggcgaagctgaaggagatgaccggcagcgacatcttcgcggacggggaggccccctcccgggactacctgggcggaatccgcaagccgcccggcggggagagcagcatcgcgctggtttaacagcagggacaaacaaccagatggacatagcagcccctcccctacatcattcgtttcttcctcatcgccgtcgccgtcgccatcttaggagtgatcttttattagggagttttttttttcgttcattggaggactgatcgattggaacccctggcttgctttcctgtttcccgtgactttcgtcaggttttcgttggtaatcccctccgatggtggtgttgtgtgggtatgacaacaacgatggttatctctaatttaacattgatttggcttgggcttacctgatgcaacaacaaccgccagtggtgcgttgtctgatttc

SEQ ID NO: 144875 - DNA, 1386 bp, Zea Mays
cgttacggcatgtcccgtcccgtcccagagagagaaaccacggctgcgcacagcgagttagatagagagagagagagagagagaccaagaccaaggccaaggagcaccgctccccgtacatccccagcaggagagggagagagacagagaaggctgtgcgaagggaagaagacccggcgggagagaagggcgacatggagaggccggcgcccgtgaggaagtcccacacgtcgacggcggacctgctggtctggccggaaggtgcgccgcaggagttgcccgccgggtccacgccgccatccaaccgccggccgcaccagccgtcggaggcgctcaggaaggtggtgttcggcgggcaggtgacggaggcggaggccgagagcctcaacaagaggaaaccatgctctgctcccaagtggaaggagatgacaggaagcggtatatttgcagctgggggcgagggtgaagaagatgaatccgccaatgtctctgcaacttccgtccggacggctccaaagaattatcaggcaatcagtactataagccacatctcatttgccgaggaagaaagcatctctccaaagaagccaacttcgatatcagaggtcgcaaagcagcgcgagctaagcggcacgcttctgagcgaggacgacagcaagatgaagaggcagatatcggacctgaaatccaaggagctcagcggccacgacatctttgcccctccggaggatcccaggccacgcaactcggagaacggctcgacctcgcagactccgggcaaaaatgcacacgtaagcaacttcaagttcggcgaggccgacgaggacagcgcggtgaagaccgcgaagaagatccccaccaagaagttcaccgacctcgcgggcaatatcttcaagggcgacgacgaggcacccgggacggcggagaagcaccacctgagcacggcgaagctgaaggagatgaccggcagcgacatcttcgcggacggggaggccccctcccgggactacctgggcggaatccgcaagccgcccggcggggagagcagcatcgcgctggtttaacagcagggacaaacaaccagatggacatagcagcccctcccctacatcattcgtttcttcctcatcgccgtcgccgtcgccatcttaggagtgatcttttattagggagttttttttttcgttcattggaggactgatcgattggaacccctggcttgctttcctgtttcccgtgactttcgtcaggttttcgttggtaatcccctccgatggtggtgttgtgtgggtatgacaacaacgatggttatctctaatttaacattgatttggcttgggcttacctgatgcaacaacaaccgccagtggtgcgttgtctgatttc

SEQ ID NO: 144876 - DNA, 522 bp, Zea Mays
cgttacggcatgtcccgtcccgtcccagagagagaaaccacggctgcgcacagcgagttagatagagagagagagagagagagaccaagaccaaggccaaggagcaccgctccccgtacatccccagcaggagagggagagagacagagaaggctgtgcgaagggaagaagacccggcgggagagaagggcgacatggagaggccggcgcccgtgaggaagtcccacacgtcgacggcggacctgctggtctggccggaaggtgcgccgcaggagttgcccgccgggtccacgccgccatccaaccgccggccgcaccagccgtcggaggcgctcaggaaggtggtgttcggcgggcaggtgacggaggcggaggccgagagcctcaacaagaggtgagcttccgggcgttttgcccctgccatgttctcttgccggagtggtgggattttttgctctgtttcttgttgtgtcgcctggcgacgagcttctggccttggccactagatctccagagatttac

SEQ ID NO: 144877 - DNA, 1684 bp, Zea Mays
catccatcctgcgctgcgctgcgctcgtgacaagcatcgcaagcagctcctcctcctccccctgtagccaacaccttcctgttccgggcgcagtagcggctgtcggccctcgatctgacgagccatgacgaagcacgccgcctactccagcgaggacgtggtcgcggccgtggcggcgccggcgccggccggccggcatttcacgtcgttccaggcgctgaagggcgcgcccctcgactgcaagaagcacgccgccgtggacctgtccgcgtccggggcggccgtcgtgggcggcggcccctggtttgagtccatgaaggcttcgtcgccgcggcgcgccgccgacgccgagcacggcgactggatggagaagcacccgtccgcattggcccagttcgagccgctgcttgccgccgccaaggggaagcagatcgtgatgttcctggactacgacggcaccctgtcaccgatcgtcgaggaccccgaccgcgccgtcatgtcggaggagatgagagaagccgtgcggcgcgtcgccgagcacttccccaccgcgattgtgagcggaagatgcagggacaaggtgctcaacttcgtgaagctgacggagctgtactacgccgggagccatggcatggacatccagggccccgccgcctgcaggcagcccaaccacgtccagcaggctgaagccgcagctgtccattaccaagctgcgagtgagttcctgccggtcatcgaagaggtgttccgcacgctgacggccaagatggagtccatcgccggcgccagggtggagcacaacaagtactgcctgtccgtccacttccgctgcgtccgggaggaggaatggaatgccgtgaacgaggaggtcaggtcggtgctcagggagtacccgaacctcaagctcactcacggcagaaaggtgctggagattcgtccgtccatcaagtgggacaagggcaaggccctcgagttcttgctcaagtctcttggctatgctgggcgcaacgacgtcttcccgatttacatcggagatgatcgcactgacgaggacgctttcaaggtgctccgcaacatggggcagggcatcggaatcctggtgtccaagcttcctaaggagacggcggcatcctactcgctgagtgaccctgccgaggtcaaggagttcctccgcaagctggccaataagaagggggcgcgccaaccatgaaaatgaagacgacctcgtgcatgcatgtagctaagctaggcatggcgtggacgatggatggatggacgagcacaacagcaaagaggcgcttattagctacaactactggccttttttgttgttttctttttgctcctacctatgcatagatagtagtctctactctctactctctacctagcaacaacaacaacctagctgatgcgcgcatgcatgcatgcattggtcgtcgcttactacatgcatggccattcagtgcagtgcgtgtgtgcgatggcggagaaacaacctagctagctagctgctcgatcgatcgatcggccttgtcttggaagaaggcggcagggagggggtccctgtgtaactgctggggatccgatatatcgatctgtccttccggccggcaagatcttgtaattagccgctgtggtactagctagcagctagagagaaatggataacaaaacaaataac

SEQ ID NO: 144878 - DNA, 1977 bp, Zea Mays
gtacagtcattcatgcatcagaaactactaaaaagcaaaatgaaaagttaatctatgtagattttgcattgcattcccctcaaccaagcaagcatccagaggaacgaaggacaaatgttattcaattttgtattgctttcccctcaaccaagcaagcagcccaaagaacaacaaatggcattcccatgagagaaaaaaaaaatacttgtaggtggggccaccctcccctacctatatatacccctgttcacgccgttcccaagaccacaccaccagtccatccatcctgcgctgcgctgcgctcgtgacaagcatcgcaagcagctcctcctcctccccctgtagccaacaccttcctgttccgggcgcagtagcggctgtcggccctcgatctgacgagccatgacgaagcacgccgcctactccagcgaggacgtggtcgcggccgtggcggcgccggcgccggccggccggcatttcacgtcgttccaggcgctgaagggcgcgcccctcgactgcaagaagcacgccgccgtggacctgtccgcgtccggggcggccgtcgtgggcggcggcccctggtttgagtccatgaaggcttcgtcgccgcggcgcgccgccgacgccgagcacggcgactggatggagaagcacccgtccgcattggcccagttcgagccgctgcttgccgccgccaaggggaagcagatcgtgatgttcctggactacgacggcaccctgtcaccgatcgtcgaggaccccgaccgcgccgtcatgtcggaggagatgagagaagccgtgcggcgcgtcgccgagcacttccccaccgcgattgtgagcggaagatgcagggacaaggtgctcaacttcgtgaagctgacggagctgtactacgccgggagccatggcatggacatccagggccccgccgcctgcaggcagcccaaccacgtccagcaggtcgtacacacgcaggctgaagccgcagctgtccattaccaagctgcgagtgagttcctgccggtcatcgaagaggtgttccgcacgctgacggccaagatggagtccatcgccggcgccagggtggagcacaacaagtactgcctgtccgtccacttccgctgcgtccgggaggaggaatggaatgccgtgaacgaggaggtcaggtcggtgctcagggagtacccgaacctcaagctcactcacggcagaaaggtgctggagattcgtccgtccatcaagtgggacaagggcaaggccctcgagttcttgctcaagtctcttggctatgctgggcgcaacgacgtcttcccgatttacatcggagatgatcgcactgacgaggacgctttcaaggtgctccgcaacatggggcagggcatcggaatcctggtgtccaagcttcctaaggagacggcggcatcctactcgctgagtgaccctgccgaggtcaaggagttcctccgcaagctggccaataagaagggggcgcgccaaccatgaaaatgaagacgacctcgtgcatgcatgtagctaagctaggcatggcgtggacgatggatggatggacgagcacaacagcaaagaggcgcttattagctacaactactggccttttttgttgttttctttttgctcctacctatgcatagatagtagtctctactctctactctctacctagcaacaacaacaacctagctgatgcgcgcatgcatgcatgcattggtcgtcgcttactacatgcatggccattcagtgcagtgcgtgtgtgcgatggcggagaaacaacctagctagctagctgctcgatcgatcgatcggccttgtcttggaagaaggcggcagggagggggtccctgtgtaactgctggggatccgatatatcgatctgtccttccggccggcaagatcttgtaattagccgctgtggtactagctagcagctagagagaaatggataacaaaacaaataac

SEQ ID NO: 144879 - DNA, 906 bp, Zea Mays
gtatcaagtgagacagtaaccgcgtttaccttttgcattgcacgccctcgaatccattagcctccgtgcagccatggcgcgcctcatcagcctcgccgtcgccgtggcggtggccgtcctcgcgctagcgtccggcgcggcgtcgcaggcgccgggtccggcttcgtcggtggactgcacgtcggcgctggccgggctcgtgggctgcctgccgtacgtgcagcaggggagcacgcagggcaagcccgccagggagtgctgcgccggcgtcaaggccgccctcaagaggcacgccaccgtcgcctgcctctgcgccgctttcggccggaactacggcatgccgctcaacctcacccgcgccgccggcctgcccgcggcgtgcggcgaagaccccgccgccttcagccggtgcaacatcaaagtgcccggcgcccctgcttctgcgcctatagcttccggaacggctccggcagccccaaccccgggctcgtccaagtcagcggcggtgatccgatcgccggtctcagcgttcgccgtcctcgtcggcgtggccgcgactctcctctcgcactgccccctctgaagatgacgggtgtttgggtgactggttttagttcatgatgagttgtgctgtgaacctatgacattgtatccgcactgtgccataatccattcactttagttgattgtctcatctgtgagaaacgtttgctacctagcgctgctctttttttttttcgtgtgatcgtccatgtcggccgccaatcggccgtgttggtattctgcccggttcctcaacggagatccgcgtgcgtttgggcttttgaggaatagtgctccagatatagagaacccattatatgttagtgattggtattatagattttatgataataaaaaaataaa

SEQ ID NO: 144880 - DNA, 1003 bp, Zea Mays
agccctgtctcgaacccgaaccagctcgagcctcgaaccctaacccccaccacgtaactccttggaattaccgaaatgccactcttcttctccaaattcgcaccattggtcccccgcgtccgccgcctttccatcgccgcggcgacagccgccggcgaggaccctaagctgtctcgaatcgcggatgagctcctcgccctatcccccgccgagctggacgactacgcggcgctcctgcgcctcaagctccgcctgtcgctcacctccagcgcagctgctggagcctctccggccggggccggggacgccgcggctgcagccgtggaggccgccgcggcggtgaagacggcgttcgacttgaagatcgagaagtacgaggccgcggcgaagattaagatcatcaaggaggtgcgcgcgatgacggacctgggtctgaaggaggcaaaggagctcgtggagaaggcgcccgtagtggtgcgcgcggggttgcctaaagaggaggccgaggcgctcgccgctaagctcaaggccgccggtgccgctgttgcactcgagtgatcccacgaaggtgtcgcctcttttttttttttttgttcctagtgtttttagacgatgcaacgtatctttgcgccttaatttgtttggaatggaattcaatggattggataggggtataaagaggatgcaacgtatgctctacttgcgttgttgtagcttcggataagcctcaagcctaatcactgatacgagtgacagcattttcctgaatcgcacaataaggtgttcctgcacaatgttctatattactggcctggattggtttgaacagccaaccttcagtagttagtggtggtgttactgtaaaaggtggctagaatatgctagcttggattacttgttcatttcaagtggtgctcaactgaaatgtgtccattatctttattctggtgcatgaaactgtttgtggtcatatcattaagggtaaagcttatgttctcttagt

SEQ ID NO: 144881 - DNA, 3631 bp, Zea Mays
tcctgttattactcacccatcccctcccatttctaaaaatttggcctttctctcgctcacccatctcctcactacccccagctcaccgctctctcccgtctccaatggcggccgccactcccacctccccttcctccgcccccgcctcccgcaagccccaaccctaggtaggtcgctccactccccacccccacacttctatggctgccctcctcgctctcgttctcctgctgctttccgggggcgctgccggcgacgacgtggcggcgctcctcgagttcaagaagggcatcgcggaccgagaccgggaccagttgctggggtcctggtccccgccggcggcgacggaggccggcaacggaggcggcggctgccccgcctcgtggcgaggcgttgtgtgcgacggcggcgcggtggttggcgtcgcgctcgacggcctcggcctcgccggggagctcaagctcgggactctctccggcatgcgcgcgctccagaacctctccctcgccgggaatgccttctccggccgcctgccccccggcatcggctccctctcctcgctacgccacctcgacctctccgggaaccgcttctacgggcccatcccgggccgcctcgccaacctctccagcctcgtccacctcaacctctcccacaacaacttcacgtccggcttccccaccgacgggatccagcagctgcagaacctgcgccgcttcgacgtccgcagcaacaacttctggggcaatgccaccgatctgctcgccaagctccgcaatgccgagcacgtcgacctcagcgacaacctcttcaccgggaccatcgatctggacatccaaagcctcgccagcatcgggaacacggtcaagtatctcaacctcagccacaacaagctggacggcggcttcttccggaatgagacggtggccgcgttcaagaacttggcggtccttgatttgagcaacaacgggcttggtgggatagtgccgaggctcgatgcgtggttctcactggagtttttcagtgtcgccgggaatgggctatttggaatgatgcccgaggcactcctccagaattctatgcgccttatcgaggttgatctcagcaggaacggcttctcagggtcagtgccaactgtgaattctacgactttgaaggtgttgaatctctcttccaatgttctatcaggatcattaccagccaccatgggcaaatgtacctcagttgatctgagcgggaaccagttttcaggggaattagctatattgcgttcctgggatgggattgttgaggtcattgacttgagctcaaacaaactggtgggaagctacccaaatgatgtctcccagtttcagaacctagtgtccctcaaactacgaaacaattcattgtcaggatctctcccttcggtgttgggcacctatcagaagttatctgtccttgatctgagtcagaacgcaatcgagggatctgtgttacctaccttcttcatgtcaccaactttgactgtgttaaatctttctggaaacaaattttctggaactattccatttcagagcacccattcaacggaatcgatacttctttcatctcaatcggctctcaggattgtggatctgtccagcaattcattggctggaccattgccaccagatatctctaatctgcaaaaacttgagttccttattcttatgatgaatgaattatctggggagattcccagtgagataagcaagcttcaagcactggagtatcttgacttatcacataaccacctcacaggcagaattccggatatgcctcaaaatggcctgaaggtgttcaatgtatcttacaataatctagaaggaactgttcctaaaagtgttgaaaagtttcctttatcttgcttccgacctggaaatgacatgttagttttcccagatggccttcctgctggaaatgatgattacaccggagttgatcagggccaaacatctcatggacataaggctggtgttcgagttgctcttattattggctgcattggagctgtcttgctagttatctccatagccctagcattctatttggtaaggtctcaagagctttgcggaagaaatggatttagaggtcaaattactatcagggatctaaaggggagaataagccgtccaaatctgttcaggtcccccaaagacaacgttataccaagtaaaacaagcttctcaaatgaccatctcttaagagccgcaactagatcgatgtctgcgcagaaagagttattggctgaagcctctgtcgaatatggctacacagatccaaaggaagttgccgagtccacaagtttaggtgtgactgagacttcatctgcgatccaggctcacgagtctcctccacggtctgcattgccagcagcaccacattttgctgactctagattcctcgaggaacctgtagcttttgaagtgtactctccagaccggctggttggagaactgatcttcacggacagcactttggttttcacagctgaggatctgtcgcgtgcaccagcggaagttcttggaaggagcagccatggaacgacatataaagctgttctacaaagcgggcatgtcctgacagtgaaatggctgcgtgttggccttgtgaagcataaaaaggaattcacaaaggagataaagaggatcggcactatcaggcatccaaatatagttccatggagagccttctattggggccctaaggagcaagagaggttaattatttctgattatgtcagtggtgatagcttggcactctacctctacgagtcgactccaagaagatactcccgcctgtcggtttcgcagcgtctcaggatcgccatcgacctagctcgctgcctccagttcctacaccacgagaagggcctgcctcacggcaacctgaagccgactaacatattcctgactggtcctgatctcactccaaagctggtggattacggcctgcacaggttcatgactccaagtggcgccgccgagcagatactgaacctaggagcgctagggtaccgagcaccggagctggcgaacgcggggaaggcggcaccgacgttcaaggcggacgtgtacgctttcggggtggtggtcatggagatgctgacgcggaggagcgcgggagacatcatctcggggcagtccggcgcggtcgacctgaccgactgggtccagatgtgcagcagggaagggcggggagccgactgcttcgaccgcgacatcgccggcctggaagagcgccccggggtgatggaggagctgctggcggtctcgctcaggtgtatcctccctgtaaatgagaggcctaacatgaagacagtctgcgatgacctgtgctccatcataacagcgtgagtttagtttccccttccttgccttgccttgccttgccccagtgtacatgtaaccgatcggttttcccgtccgttggttggtccctattttttctttctttctcccggtgggttttccggagcccgtgtagccagggtgggttcgtttgattggtaactgctagtgtaaagaggattcgattcgatccacccccattgattgattgatatcccaaccattgccgtcttgatgagttggaacacctctgttcgctg

SEQ ID NO: 144882 - DNA, 3070 bp, Zea Mays
atggaggagctcccagtaccagtagaccacccaattggggaaaccgccggccggcctcttcacgacgctggtcgctgcaagcgcaacacgcccatgcacgtccccgcaccccacctcctccccgcgccgcccaagccccactaccatgccgcgctccgcttcaccgtggccgcttccgcggcgccggcgagcccccgcaaagccgtcattgtaggcggcgggctcgcgggccttgccgcggcgactcacctgacgtcgctctccgtgccgttcacgctcgtcgaggcctccgaccgcctcggcggccgcgtcgccaccgacgtggtggacgggtaccgcctggacaggggtttccagatcttcctcaccgcgtacccggagtgccgtcgcctcctcgacttcccggagctcaggctccggccattctaccccggcgcgctcgtcttcgtcggcgccggggagccgttctacctgctctccgacccgttccgcctcccgctgcgttccctctccgcggtgttctcccccgtgggcaccctcaccgacaaggtcctcgtcgggctcacgcgcctccgggcggccgccaccccggacgacgtcatcctctcggcgccggagacgaccacgggggagcacttggcgcggctcggcttctcgccctccatcgtggagcggttcctgcggccgttcctcgcaggaatattcttcgaccctgcgctcgacacgtcgtcccgcctcttcgagctcgtgttcaagcgcctcgccctgggcgacaacgccctgccggaggacggcatcggcgccatcgcggcgcagctcgcggctcgcctgccagcgggctccgtccgcctcaacacccgcgccgtcggcatcgaccagtccggtgtgacgctggataccggcgaaaccgtcgccggcggactcggcgtcatcgtcgctgtcgagcagcctcaggccgagaagcttctgccgcagctaccagctcaaggaaaggccaagaaatcggagaggagcaccgtgtgcctctacttctccaccgaccgggcgccggtccaggaccccatcctgctgctcaacgggtcgggcaaggggatagtgaacaacatgttcttcgtcaccaacgtggcgccgtcgtacgcaccggcgggtaaggtgctggtgtccgtgtccctcgttggctcgttcgccgacagggaggacgccgatctggccgacgaagtggtccgggagcttggcgggtggttcggcgacggagaggtcgcgtcgtggacacacttgtcgacgtatcgcatcgggttcgcgcagccggaccagacgccgcccacgacaccggcggggagggacccgagagtgggtgacggattgtacgtctgcggtgaccactggtgctctgccacgttcgacggcgcgctggtcccacaaagtcataacgagttccggaccggaacttctaaagaacagatacgaaagcctaaaggccccatacagcccagaaggcccaaccccgaatcgctcacagtcacatctgatccgctccggctccgacgacgaatgggctctatggaagcgtcgaccgcgccggagaacggctccgccgccggtggcggagccggcaacggggcgggcgccgcgtcgaacggaggaggtgttgagaggaggctgaggtcctcggctgcgcccgcgtcgtgggcagcccagcttcccctggaggtgggcacacgcgtgatgtgccggtggcgcgaccagaagctccaccctgtcaaggtcatcgagcgccgcaagggctccgcttcctcttcccccgctgactacgagtactacgtccattacaccgagttcaatagaagacttgacgagtgggttaagcttgagcagcttgatcttgctactgtcgagaccgatgttgatgagaaagtcgaagataaggcaacaagcttaaagatgacacggcaccagaagcgtaaaattgatgaaacacatgtggagcaaggacacgaggagcttgatgcagccagcttgcgggaacatgaagaattcacaaaagtgaaaaatattgcaaagattgaacttgggagatatgagatagatacatggtatttctctccttttccaccagagtacaatgactgcccgaagctgtttttctgtgaattttgcctcaacttcatgaagcgcaaagaacagcttcagaggcacatgaagaagtgcgatcttaagcaccctccaggtgatgaaatctatagaagtggaactctttcgatgttcgaggttgatgggaagaagaacaaggtttatggacagaatctttgttatctggccaagctatttcttgatcacaagacattgtactatgatgttgatttattcttgttttatgttctctgcgaatgtgatgaccggggatgtcatatggtgggatatttctctaaggaaaaacactctgaagaatcttataatttggcttgcattctcactcttcccccataccaaagaaaaggatatgggaagttcctgattgctttctcatatgaactttccaagaaggaaggtaaagttgggacaccggagcgccctctttctgatcttggcctgctcagctatagaggttattggactagagtgcttctggaaattctaaagaaacataagggtaacatatctataaaggaactcagcgacatgacggcaataaaagccgatgacatcttgagcacgctgcagagcctggacctaatccagtatcgcaaagggcagcacgtcatctgcgcggacccgaaggtcctcgaccgccacctgaaggcggcgggtcggggaggcctggacgtggacgttagcaagctgatctggactccctacaaggagcaaggctaaaagcgcagctgctcccagccccagattagagtccctgtacataacgtttggtactaggatctcccctcagctctcacttcactcgtgtaccgtgaaaactgtacactgtaacaaccacattgctgtgtttgtgctgtctgccgcgatagtctccgaaatcgaaagaaacatcacccaactctttactcttggctcgcaa

SEQ ID NO: 144883 - DNA, 3102 bp, Zea Mays
atggaggagctcccagtaccagtagaccacccaattggggaaaccgccggccggcctcttcacgacgctggtcgctgcaagcgcaacacgcccatgcacgtccccgcaccccacctcctccccgcgccgcccaagccccactaccatgccgcgctccgcttcaccgtggccgcttccgcggcgccggcgagcccccgcaaagccgtcattgtaggcggcgggctcgcgggccttgccgcggcgactcacctgacgtcgctctccgtgccgttcacgctcgtcgaggcctccgaccgcctcggcggccgcgtcgccaccgacgtggtggacgggtaccgcctggacaggggtttccagatcttcctcaccgcgtacccggagtgccgtcgcctcctcgacttcccggagctcaggctccggccattctaccccggcgcgctcgtcttcgtcggcgccggggagccgttctacctgctctccgacccgttccgcctcccgctgcgttccctctccgcggtgttctcccccgtgggcaccctcaccgacaaggtcctcgtcgggctcacgcgcctccgggcggccgccaccccggacgacgtcatcctctcggcgccggagacgaccacgggggagcacttggcgcggctcggcttctcgccctccatcgtggagcggttcctgcggccgttcctcgcaggaatattcttcgaccctgcgctcgacacgtcgtcccgcctcttcgagctcgtgttcaagcgcctcgccctgggcgacaacgccctgccggaggacggcatcggcgccatcgcggcgcagctcgcggctcgcctgccagcgggctccgtccgcctcaacacccgcgccgtcggcatcgaccagtccggtgtgacgctggataccggcgaaaccgtcgccggcggactcggcgtcatcgtcgctgtcgagcagcctcaggccgagaagcttctgccgcagctaccagctcaaggaaaggccaagaaatcggagaggagcaccgtgtgcctctacttctccaccgaccgggcgccggtccaggaccccatcctgctgctcaacgggtcgggcaaggggatagtgaacaacatgttcttcgtcaccaacgtggcgccgtcgtacgcaccggcgggtaaggtgctggtgtccgtgtccctcgttggctcgttcgccgacagggaggacgccgatctggccgacgaagtggtccgggagcttggcgggtggttcggcgacggagaggtcgcgtcgtggacacacttgtcgacgtatcgcatcgggttcgcgcagccggaccagacgccgcccacgacaccggcggggagggacccgagagtgggtgacggattgtacgtctgcggtgaccactggtgctctgccacgttcgacggcgcgctggtcccacaaagtcataacgagttccggaccggaacttctaaagaacagatacgaaagcctaaaggccccatacagcccagaaggcccaaccccgaatcgctcacagtcacatctgatccgctccggctccgacgacgaatgggctctatggaagcgtcgaccgcgccggagaacggctccgccgccggtggcggagccggcaacggggcgggcgccgcgtcgaacggaggaggtgttgagaggaggctgaggtcctcggctgcgcccgcgtcgtgggcagcccagcttcccctggaggtgggcacacgcgtgatgtgccggtggcgcgaccagaagctccaccctgtcaaggtcatcgagcgccgcaagggctccgcttcctcttcccccgctgactacgagtactacgtccattacaccgagtcctgttctgataattgtggactgacatatcttaaatgatatgggctcgcagtcaatagaagacttgacgagtgggttaagcttgagcagcttgatcttgctactgtcgagaccgatgttgatgagaaagtcgaagataaggcaacaagcttaaagatgacacggcaccagaagcgtaaaattgatgaaacacatgtggagcaaggacacgaggagcttgatgcagccagcttgcgggaacatgaagaattcacaaaagtgaaaaatattgcaaagattgaacttgggagatatgagatagatacatggtatttctctccttttccaccagagtacaatgactgcccgaagctgtttttctgtgaattttgcctcaacttcatgaagcgcaaagaacagcttcagaggcacatgaagaagtgcgatcttaagcaccctccaggtgatgaaatctatagaagtggaactctttcgatgttcgaggttgatgggaagaagaacaaggtttatggacagaatctttgttatctggccaagctatttcttgatcacaagacattgtactatgatgttgatttattcttgttttatgttctctgcgaatgtgatgaccggggatgtcatatggtgggatatttctctaaggaaaaacactctgaagaatcttataatttggcttgcattctcactcttcccccataccaaagaaaaggatatgggaagttcctgattgctttctcatatgaactttccaagaaggaaggtaaagttgggacaccggagcgccctctttctgatcttggcctgctcagctatagaggttattggactagagtgcttctggaaattctaaagaaacataagggtaacatatctataaaggaactcagcgacatgacggcaataaaagccgatgacatcttgagcacgctgcagagcctggacctaatccagtatcgcaaagggcagcacgtcatctgcgcggacccgaaggtcctcgaccgccacctgaaggcggcgggtcggggaggcctggacgtggacgttagcaagctgatctggactccctacaaggagcaaggctaaaagcgcagctgctcccagccccagattagagtccctgtacataacgtttggtactaggatctcccctcagctctcacttcactcgtgtaccgtgaaaactgtacactgtaacaaccacattgctgtgtttgtgctgtctgccgcgatagtctccgaaatcgaaagaaacatcacccaact

SEQ ID NO: 144884 - DNA, 1817 bp, Zea Mays
cctacacacaccccgtcacatctcaccccacaggcagtatctccgatacggtctgcacacaaacaccaagtccatgcaagaatccaccatatccacaagcccatggaggagctcccagtaccagtagaccacccaattggggaaaccgccggccggcctcttcacgacgctggtcgctgcaagcgcaacacgcccatgcacgtccccgcaccccacctcctccccgcgccgcccaagccccactaccatgccgcgctccgcttcaccgtggccgcttccgcggcgccggcgagcccccgcaaagccgtcattgtaggcggcgggctcgcgggccttgccgcggcgactcacctgacgtcgctctccgtgccgttcacgctcgtcgaggcctccgaccgcctcggcggccgcgtcgccaccgacgtggtggacgggtaccgcctggacaggggtttccagatcttcctcaccgcgtacccggagtgccgtcgcctcctcgacttcccggagctcaggctccggccattctaccccggcgcgctcgtcttcgtcggcgccggggagccgttctacctgctctccgacccgttccgcctcccgctgcgttccctctccgcggtgttctcccccgtgggcaccctcaccgacaaggtcctcgtcgggctcacgcgcctccgggcggccgccaccccggacgacgtcatcctctcggcgccggagacgaccacgggggagcacttggcgcggctcggcttctcgccctccatcgtggagcggttcctgcggccgttcctcgcaggaatattcttcgaccctgcgctcgacacgtcgtcccgcctcttcgagctcgtgttcaagcgcctcgccctgggcgacaacgccctgccggaggacggcatcggcgccatcgcggcgcagctcgcggctcgcctgccagcgggctccgtccgcctcaacacccgcgccgtcggcatcgaccagtccggtgtgacgctggataccggcgaaaccgtcgccggcggactcggcgtcatcgtcgctgtcgagcagcctcaggccgagaagcttctgccgcagctaccagctcaaggaaaggccaagaaatcggagaggagcaccgtgtgcctctacttctccaccgaccgggcgccggtccaggaccccatcctgctgctcaacgggtcgggcaaggggatagtgaacaacatgttcttcgtcaccaacgtggcgccgtcgtacgcaccggcgggtaaggtgctggtgtccgtgtccctcgttggctcgttcgccgacagggaggacgccgatctggccgacgaagtggtccgggagcttggcgggtggttcggcgacggagaggtcgcgtcgtggacacacttgtcgacgtatcgcatcgggttcgcgcagccggaccagacgccgcccacgacaccggcggggagggacccgagagtgggtgacggattgtacgtctgcggtgaccactggtgctctgccacgttcgacggcgcgctggtgtcgggaaggagggcggccgaagctctggccaaggacaggggactatgagcttcctagcatggggctgtgtttgagttgggtccgtgctgcactgcagagtgcagactgcaaagaaaatccatctcgcatgacgaacgagttttttttttgagagagacaagtacatgtacatctccatcaacgactaaaattcagcttgtaatttcctctgtaaatctgatttatatttactcattgaattcctatgttatgtgcagcatggtaccattttagtggtctgccgatatttgtttgattgc

SEQ ID NO: 144885 - DNA, 261 bp, Zea Mays
atgctacaaccagacaagaaacagaagatttattcattcttgatactacaccgtggggaggatcaaaaagacgagagctctgctcaatataaagcatctagttcttttattctggctaattacagaaggtcgatgttgatctgccacccccttttctgtttcatatctcatcatatttacagtcgtggaatctccccctggcctttacatatacagcaaggaaaacgaagaaccgcttctgaccctcgtgcacaaaggtaa

SEQ ID NO: 144886 - DNA, 1921 bp, Zea Mays
caattgaaagtcgcctagagggggggtgaatagggcgaaactgaaattctcaaaaataatcacaactacaagcaaattctttatttggcttgcatcccttaacaaatgttggaccgcagatagactggctcgtaggggtttgaaccatcctgacaaatgtcttctttgtgatcagcaagaggaaacagcacaacacattttggtggcttgcgtttttgctagagacatttgggcccagactttgaacaaggtgggattgctgcctttggctccagaaataacagatgtggttttccaagaatggtggaggaaggctgagcagaaagtgccaaatagtaaaagaaaggggtttaattccctagttatcttggtgtcttggaggttgtggaaacaaaggaatgcttgtgtgtttgatggggtatccccgagtatccgcagcatgttgcaagagattcatgaggaggttaagctttggggaatggcaggagcaaaagatattagacaattgtggccttaatttaagtggggtggtgggggttgcccccccccttgtttctagtttctagtttttctttcttttattttggtttctttctttttttctttttgtccccctcttctcgtttgctgccttctcgggcactttgttttcttagtccacttgggacctttttcctcttaatataatgacgcgcagttctcctgcgtgttcgagaaaaaatcacaactacaagccgggttagcgttagaaatataatcgagtccgcgagagagggtgcaaaacaaatcgtaagcgaataaggagtgagacacgtggatttgttttaccgaggttcggttcttgcaaacctactccccgttgaggtggtcacaaagaccgggtctctttcaaccctttccctctctcaaacggtccctcggaccgagtgagctttctcttctcaaatgcttggaacacaaagttcccacaaggaccaccacaagattggtgtctcttgcctcaattacaagtgagtttgatcgcaataaagaatcaaagaaagaagaaagcaatccaagcgcaagagctcgaaagaacacaagcaaatctctctcactaatcactagggcgttgtgtggagtttggagaggatttgatcacttgggtgtgtctagaattgaatgctagagctcttgtaagtagttgaagtgggaaaacttggatgacttgaatgtggggtggttgggggtatttatagccccaaccaccaaactagtcgtttggtggtggctgactgtcgaatggtgcaccggacagtccggtgcacaccggacatgtccggtgttccagccacgtcaccaggccgttgagattcgaccgttggagcttctgacttctgggcccgcctggctgtccggtgtacaccagacaagtactgtagattgtccagtgcaccgtcccgcgcgtgcctgacttctgcgcgcttctggcgcgcattgaatgcgcctgcaggtgaccgttggcgcgaagtagccgttgctctgctggttcaccggacagtccggtgtacaccggacatgtccggtgaattatagcggagcaatttcccgaggctggcgagttccagagccgctcttccttggggcaccggacactgtccggtgtacaccggacagtccggtgaattatagcggagcgcctctggattttcccgaaggtgaggagttcagcgtgaagtcccctggtgcaccggacactgtccggtggcacaccggacagtccggtgcgccagaccagaggtgccttcggttatcccttgctctctttgttgaacctcatacttggtctttttattggctaagtgtgaacctttggtacctgtataacttgtacactagagcaaactagttagtccaattatttgtgttggacaattcaacc

SEQ ID NO: 144887 - DNA, 2930 bp, Zea Mays
tataatttgcaagcatcgatctgcgtcgcagattcgcgatacgtccacacctcatacagaacacgtttacatcgcgaacttaccaaacgctgtggtctggctggtggtacagtacgttcttgacaattttacacgctacaggatatagacgctacagagtacacagcactgaagctttagaaaacgaagaaggaacaaacaaaaaaagcccggaaaagttccgctcagaggtctccatcagggcgccgcgccgacggcgagaccttcctcctgaccttctcggtggtcctctcgagcgcctcctcggtggccctggccgccgactccgccaacttctccaccatctccttgcccatctccagggtgctcttggccgccttcgtcaccgacgccgccgggctccgcggcagatggtaccttgccacacacacacacacggcaggcgtgagaactgagagcacacacgtctcccgatccagaacagcggggcagtagtgaaacggataatcatctaccgcggctcggccggcggccggcggaggttgaagcacgcgagcttggcccacgcgcggagcgcgtccagccagcgctcgtgcccggcgaggccgatcgccagctccaccggctctcgaggcggcccgttccccggtacccccgtcgccggcggcggcgacgacgacagcaggaacagcagagccgacgccgcgacgagcagcacgacgacgcagacgatgatggcggccatgcatgtcgccacgggccgcgcggcgccacccttgcccctgccgttcctgttgccgctcattgccgcgggctgctgcaagctggtggcgatcgagaggcgtcgcgtcgcgtcgcgcggctggaacctggaaccggtggacggaagcgagcgaaggttgggttgggagcccctcctcctccagcccggccccattggccaggagctttcttcgtgcgggcggacacacgtccggcggcggcacgtgttgggctcgggagcaacgcggtgacgtgccgggccacgtcgggtgctgcatgtggtgacgtggcgggggcgttgattgcattgcacgcgacgcgagcgcgatacgtcgtcgccgggctttcagagtgcgcgacgcagcaggccgcgacggcaagtgcaggtgattcgtggcggccagtcccatcgggacgatgaggcctgacctaccactaccactaccactctaccagactgatgcatcgatgtatcttctcgcgcaaagcacgtactccttcctaccaagctagctcaaacgaccactgatctggacacacctgacctggcgaccggcggcggtgaatggttgtttactcctgccgtctccgtcctgacgacagggaataatcagcggcgtatcattcccggaaacttcggccttggttcagcccacatgaaccagaactggctagctaacaaccacggccaccgctgtctgctcaactcccattgagctaatccggttttataatgctgccaggttttatttacacgcttgccagtgcgttcctcgagcggtgttcaatatggaaccgtcagtgtgttcaacaaactcacggacacactcgatttcttttctttttctttttgagttaaatttgacagcggacatgtcataccaaaatccgctgcagctgcaaagatggtttttatttccagagaagaaagtaagccaaatcttccaacaccaccacggtaggaaacccgccggccgcaccatccgaccgttagttccaaaccctccccggccggcttaaaacgcgccgatccaagaaaagcaccccccctccaacccgcgcacagacgcactaacccccttcaaggcttgcacgtaagcgtaaccggcgttgccttccttcatcacggcggctgggcggcagagcgcgccgccatgccgcaccgccaccatgacgccgccgccggcgacgaagccccgtccccgcgcccctcggcggccggctgctacgcgttcctgacgcgctcccaccgcagcgcgggcgcgtaccgccgcctggactccgcgcgggcgctcgaggccgaggccgacgccgccgtggcggcggtgagggtggaggtcgggacggcggcgaaggggagggcgaggagcgtgttccacgtcgaccccgccgtgctggaggccgggccggtgcgccggctgctggcggccgcggggaggcgggcccccggcggaggcgtcgccgtcgacgtcgacgccctgctgttcgagcacctgatgtggctggcaaccaaggcccgcgacggtggcggggtgggcggcgacggcgacggcgacgaagacgaaggctccgcccccgccgctgatgacgacctttccgagatcgtcgagttctactcgcaggacgacgaggatgacgaggaggagggccgcgaccacgggttgagcagcttaagcttctagtaaattcccggtggctaagttaaataatctaaagtatattcttaatccgcgtcatttagttctcgtcattcatgtgtataatgctatatatacatgtaaaatgtataatcaagattactactaattgttgttttaaataattagcccgtgaggtagaccactgagtcaagaaccgacgatttgtttgtttaggaagagtctgacaaacgggtctaggtttgaatgaggacaaggaaggaaaaaaaaaaggtaccacactgattggttaatgttaatctattattgggctaggtcagcacatccatcgtcaagcttttttttaaacacttcactccgtaatatgggatctaagagctaagttaggccatgtttggtttgtttagtctagtgactaaagtttagttacgggactaaagtttagtctctaacatgtttggttctaagagctaaaaatagtaagaatatactaaatgactcataagaaga

SEQ ID NO: 144888 - DNA, 1337 bp, Zea Mays
gttttttgattcgttcattgtgtgttcctggactccgttgttcaagggaactgttaactcgtgctgcattttttggacgatccggtttcgtagtccatgtatccaaactctttttccctcttcgaagtttttttggaacccttcgagccccgtggaaggaattcaatcttgcgaacggaaccgcggatttatcgtgatccacaagaccgcaaccctcgttagccgcggatttatcgtgatccaaaatttcgaacgagaccaattctcttgaaaatttcaacccccatccgcgaatctctctctttccaaatctcgccccaccctccagcccttaaccctttgcggtgatttggtgcgcagctccacctgagagatacgggctcgccgcgatggaattcgagtcagcggcgcggcggcggcagcgcagactctcttcgccgtcgttgaggacccacctcacgccggcttttgacgccgtggccggtggggagggcggcgtgtctgggtactcttcatcgtcgtcttccagcggtctcgaactcgggttcgacgcctctctcctccgcaaccgccgctccggtttcgccgccccctcggacctggacagccgtgtcctcctctactccccgcagtccgtgccgccgcagatgagggcggcgtacctggcagcggatgatggggtcagggcacctggcgtcaaccactacggatccaaatatgaggctgcccggcttactggcgcgccaggttttcagggttcagaaaaccacatttcttttgcctccccgccgcagacaagtagcaatattcctactacagttctgggcgcctccacctccaccaagcttcctgctgaactccagttgccagagggcagcgtcgtagcgaccaatgcagagctcaagacgccaggaccagaagctacgccttcaactctcaagccatctgctaatccagaaccacgcgtggatggcgatgacatcactgatgctctctacggtgaccatggtcatcgcaggctccctattttcagggagatctgtccagattgagtgtcagcctcagcattctcaacgtcgctgatggatgcatttcggccctagctgtatattctgtttatctatcttgtacccagggtcttggtagcaattactctggagggtcatttctagtttcctaaaggagaatctctcttctcttgatctattcataatcgagaaagctatgatataatttacttgattaagccagcaattgaccgttttgcttgacgttggttgtagatgaaccttgtcatatatatgaattgagccttggtttttttttgccttttgtaa

SEQ ID NO: 144889 - DNA, 1142 bp, Zea Mays
gagccgtcgcagagatccgagcgagcatagagtagatcaaaaaaaaaaaaaccataccaacatggtgaccctagaaaacctacgccgcatatatggccatgtcgtggagagggcgaccctggcgcgcgacctcctggcccccgccgccggccaactctccggcaatctgcacagccgttgtattctggcccagcaactcgacctgtccttccccgagaaagacgacgacttgcgtgccgatctggagaagttcggcgccattgaggcgatcgctttatgccgacacctgttcatggcggtgattgtcttcagggacgaagcgagcgtgccggtcgctttccggaggcaagaggaaatatcatctgggctgtacagcgccgtcccgcctccccaccttgcgctctccacgagttttattcatccaaacagtatcaaggttaatttgtactccaacacatcaactgcgtcgtctggagattcaactgcaaaacatagcacggagccaactactacagaggcagcaacaagcatcggacaatcaatgatgccgctatggatggaatcgaggccagcgactgtgttccaaaactaccttggcgatggcagtcggttcgtgccatcaaggaggtcacagatttatgggccaacactgggtgcagatggtcgcttgtggatggaaggcttcaacattgtccagtgtggaaattacgcacaatcagtacctacggccataccagttgctcaggtgcctcagctactttaccagtcagaggatgaactagcggcgaggcgaacacgcagtcacatcacaatctcatcgtcagttgggtcccctataaacccgctccagcgctctccgatcagagcgactccattgcgagtcggttcatacccccggtcgacagaggtgtccgtctgtactgctgtgaatataggttcggcttttccggccattatgatcacgacccgaaaatagtagctcaaagcacggccggacacgaaatttgtctttaccaatttatctttaccacgcttctgtttccctaacaacttgaggcttgtccccttaaatatttcttgagtgtctggaggaatccttgtcatctaaacacttaaaacacaatactaattagttgcacgtg

SEQ ID NO: 144890 - DNA, 660 bp, Zea Mays
atggcggtcttgcgcgtcgaggcggtcacagatctgcttcagcagccgagcttgggcggccatggtctgcgcctgcgcctcaagcgccacagcgacgctcgaatcccccgaagtcgccatcgcctttacatcttccatcagaactccatccggctgctgcacttcgtcaacatgttggctcacatgttgtctgctgacaagcgcctagatgctgagttgaagctggttggtgagtatggcctccgctgcaagcgtgagctgtggcgcgtgcagtatgccctgagccgtatcaggaatgcagccagggagctgctcaccctggatgagaagaacccacgccgtatctttgagggcgaggcactcctccgccgcatgaaccgatatggtctccttggcgagggacagaacaagcttgattatgtgcttgccctcactgttgagaactttctccagcgccgcctccagaccatcgtcttcaagaatggcatggccaagtccatccaccatgctcgtgttctgatcagggtcgagtcagagaagcacatcgacttctccctcaccagtcctctgggtggtggtcctgctggaagggtgaagcgcaagaaccagaaggcctctggcggcggtggcggcggcgatggcgaggaggacgacgagtag

SEQ ID NO: 144891 - DNA, 1298 bp, Zea Mays
cccctttcttctccgtctcctccctgcctatcccatcccatcatcgtcgtctccctaccgcaatcgaagaaagggccgggctcaaccgagccctcaaatcgccgcatcgcgcccctagctctctccgtctccctcatcctgacctcgattcgagctagtttcgggaagcaaaggtaccggatcaacccccttgatcacccatggtgcccagggatagggcgcacagcgccgctgctgccaccgcgcccccgacggagaagcccgttcaagggcctatccagaacaacaagtgcgaaaagaaggctccaaagaaggtgcataaatctgagagagagaaacgtaagcgggacaagcagaatgatctctttggtgagctgggaaacatgctagaacctgatagacagaacaatggaaaggcatgcatattaagtgacactacacgaatacttaaagatctactttcacaagtagaatctcttcgaaaggagaacaacacgctgaagaatgagtctcattatgtcgctttggagagaaatgaactactggatgaaaccaatatgatccgtggcgaaatatcagaccttcaaaacgagatgaggatgcggctagaagacaactctatctggagtcatgacacttctagaccaaatcttacagcaccccatccagcgaccacagtatttacattgcagcattcaccacatccacaagtcattgcaacaatgacacttcctctgcaacagccagcagtcgttgagcaatcttacgctgccccacggcgggagctacagctattccctgaagctgcacccactgaagatactgagccaccacaaaacgaggggacctctaatcatgtgatgcggccgcaggcgaggtacccaccagcaatgaccactttgcctgggcatgtatatccagtccttccaagagtggaagatgagcaacgcagcagcggcactactggtagcagagaggaaggcggggtaggcaaccgttaacagctcgagtacaaaacgagagatctggctcacagtttgaaaagttctcgtagtttcaactttaatgtttccattctagctgatgtgctaaagaaaccttaaaacctatgcggctgtgcctgcacatgtaaatatcattccactctgtattacccgaacttaatcttcaactagttacttcgatgggagcaatctatctttgttagttcgtccacttcgtagtttatctgtagtacttgtaccaagcagaagttcaaggagtacctgattcgagaaaacatgttaatcactctttgt

SEQ ID NO: 144892 - DNA, 1178 bp, Zea Mays
cccctttcttctccgtctcctccctgcctatcccatcccatcatcgtcgtctccctaccgcaatcgaagaaagggccgggctcaaccgagccctcaaatcgccgcatcgcgcccctagctctctccgtctccctcatcctgacctcgattcgagctagtttcgggaagcaaaggtaccggatcaacccccttgatcacccatggtgcccagggatagggcgcacagcgccgctgctgccaccgcgcccccgacggagaagcccgttcaaggacctgatagacagaacaatggaaaggcatgcatattaagtgacactacacgaatacttaaagatctactttcacaagtagaatctcttcgaaaggagaacaacacgctgaagaatgagtctcattatgtcgctttggagagaaatgaactactggatgaaaccaatatgatccgtggcgaaatatcagaccttcaaaacgagatgaggatgcggctagaagacaactctatctggagtcatgacacttctagaccaaatcttacagcaccccatccagcgaccacagtatttacattgcagcattcaccacatccacaagtcattgcaacaatgacacttcctctgcaacagccagcagtcgttgagcaatcttacgctgccccacggcgggagctacagctattccctgaagctgcacccactgaagatactgagccaccacaaaacgaggggacctctaatcatgtgatgcggccgcaggcgaggtacccaccagcaatgaccactttgcctgggcatgtatatccagtccttccaagagtggaagatgagcaacgcagcagcggcactactggtagcagagaggaaggcggggtaggcaaccgttaacagctcgagtacaaaacgagagatctggctcacagtttgaaaagttctcgtagtttcaactttaatgtttccattctagctgatgtgctaaagaaaccttaaaacctatgcggctgtgcctgcacatgtaaatatcattccactctgtattacccgaacttaatcttcaactagttacttcgatgggagcaatctatctttgttagttcgtccacttcgtagtttatctgtagtacttgtaccaagcagaagttcaaggagtacctgattcgagaaaacatgttaatcactctttgt

SEQ ID NO: 144893 - DNA, 2070 bp, Zea Mays
cccctttcttctccgtctcctccctgcctatcccatcccatcatcgtcgtctccctaccgcaatcgaagaaagggccgggctcaaccgagccctcaaatcgccgcatcgcgcccctagctctctccgtctccctcatcctgacctcgattcgagctagtttcgggaagcaaaggtaccggatcaacccccttgatcacccatggtgcccagggatagggcgcacagcgccgctgctgccaccgcgcccccgacggagaagcccgttcaagggcctatccagaacaacaagtgcgaaaagaaggctccaaagaaggtgcataaatctgagagagagaaacgtaagcgggacaagcagaatgatctctttggtgagctgggaaacatgctaggtatgcgttctgttacaaattgaatctacaacagcatgatctatggctgcataacattagagtgttcctttcttaactcgaaaaatccatgctgtttcgatttattttgtgccatcctgtttcttccatatcattttgtccaggtcagtgcagtttgcaactcacctgcgtgcctgctgtttgttgatttccttcagttttggatttccaagtccaactttcagagtttagcatgtttacgtggataatattcaaaacacacttgtcattgttatacagacaacctgctgcaagtgttccatgcatatgtggttattgattattttgtctcaactctactactactactaccatacttatgctcaaagttgcatttaaatttttcctaaccagtgtcatctgttttcagaacctgatagacagaacaatggaaaggcatgcatattaagtgacactacacgaatacttaaagatctactttcacaagtagaatctcttcgaaaggagaacaacacgctgaagaatgagtctcattatgtaagtgagctcctcttagtttctgaaatctgaccatatcataattcggggaattttaattaaatttgtatggacttctgattaacttgatgctctgtatactttaagaaagagaaaaatctgtgccctgtgggtggtaatttttcctattcagaaaaacctgtgagtagtattatttgtttttgtatccagaagaatttgctcgcccaagggcctaattttacttgtgtaatattgaaggttccattatgtgtaacatcatttgcgaagatatccgcaaataaaacttacaacaccacttgaaaagatttgctataccctagccactgattcaacatatgcttctttcattgtacaaaacaggtcgctttggagagaaatgaactactggatgaaaccaatatgatccgtggcgaaatatcagaccttcaaaacgagatgaggatgcggctagaagacaactctatctggagtcatgacacttctagaccaaatcttacagcaccccatccagcgaccacagtatttacattgcagcattcaccacatccacaagtcattgcaacaatgacacttcctctgcaacagccagcagtcgttgagcaatcttacgctgccccacggcgggagctacagctattccctgaagctgcacccactgaagatactgagccaccacaaaacgaggggacctctaatcatgtgatgcggccgcaggcgaggtacccaccagcaatgaccactttgcctgggcatgtatatccagtccttccaagagtggaagatgagcaacgcagcagcggcactactggtagcagagaggaaggcggggtaggcaaccgttaacagctcgagtacaaaacgagagatctggctcacagtttgaaaagttctcgtagtttcaactttaatgtttccattctagctgatgtgctaaagaaaccttaaaacctatgcggctgtgcctgcacatgtaaatatcattccactctgtattacccgaacttaatcttcaactagttacttcgatgggagcaatctatctttgttagttcgtccacttcgtagtttatctgtagtacttgtaccaagcagaagttcaaggagtacctgattcgagaaaacatgttaatcactctttgt

SEQ ID NO: 144894 - DNA, 1707 bp, Zea Mays
cccctttcttctccgtctcctccctgcctatcccatcccatcatcgtcgtctccctaccgcaatcgaagaaagggccgggctcaaccgagccctcaaatcgccgcatcgcgcccctagctctctccgtctccctcatcctgacctcgattcgagctagtttcgggaagcaaaggtaccggatcaacccccttgatcacccatggtgcccagggatagggcgcacagcgccgctgctgccaccgcgcccccgacggagaagcccgttcaagggcctatccagaacaacaagtgcgaaaagaaggctccaaagaaggtgcataaatctgagagagagaaacgtaagcgggacaagcagaatgatctctttggtgagctgggaaacatgctaggtatgcgttctgttacaaattgaatctacaacagcatgatctatggctgcataacattagagtgttcctttcttaactcgaaaaatccatgctgtttcgatttattttgtgccatcctgtttcttccatatcattttgtccaggtcagtgcagtttgcaactcacctgcgtgcctgctgtttgttgatttccttcagttttggatttccaagtccaactttcagagtttagcatgtttacgtggataatattcaaaacacacttgtcattgttatacagacaacctgctgcaagtgttccatgcatatgtggttattgattattttgtctcaactctactactactactaccatacttatgctcaaagttgcatttaaatttttcctaaccagtgtcatctgttttcagaacctgatagacagaacaatggaaaggcatgcatattaagtgacactacacgaatacttaaagatctactttcacaagtagaatctcttcgaaaggagaacaacacgctgaagaatgagtctcattatgtcgctttggagagaaatgaactactggatgaaaccaatatgatccgtggcgaaatatcagaccttcaaaacgagatgaggatgcggctagaagacaactctatctggagtcatgacacttctagaccaaatcttacagcaccccatccagcgaccacagtatttacattgcagcattcaccacatccacaagtcattgcaacaatgacacttcctctgcaacagccagcagtcgttgagcaatcttacgctgccccacggcgggagctacagctattccctgaagctgcacccactgaagatactgagccaccacaaaacgaggggacctctaatcatgtgatgcggccgcaggcgaggtacccaccagcaatgaccactttgcctgggcatgtatatccagtccttccaagagtggaagatgagcaacgcagcagcggcactactggtagcagagaggaaggcggggtaggcaaccgttaacagctcgagtacaaaacgagagatctggctcacagtttgaaaagttctcgtagtttcaactttaatgtttccattctagctgatgtgctaaagaaaccttaaaacctatgcggctgtgcctgcacatgtaaatatcattccactctgtattacccgaacttaatcttcaactagttacttcgatgggagcaatctatctttgttagttcgtccacttcgtagtttatctgtagtacttgtaccaagcagaagttcaaggagtacctgattcgagaaaacatgttaatcactctttgt

SEQ ID NO: 144895 - DNA, 1833 bp, Zea Mays
cccctttcttctccgtctcctccctgcctatcccatcccatcatcgtcgtctccctaccgcaatcgaagaaagggccgggctcaaccgagccctcaaatcgccgcatcgcgcccctagctctctccgtctccctcatcctgacctcgattcgagctagtttcgggaagcaaaggtaccggatcaacccccttgatcacccatggtgcccagggatagggcgcacagcgccgctgctgccaccgcgcccccgacggagaagcccgttcaagggtgagtcttgcgtcgtgagtcgtgactcgtgattttgactaatcaatggaagaaaggaaaaagaaaaaagcagcagctacatactgtagtttttgctgcgcgtttgatcgcattaggtctttggtgatcgatcactagtgtttcttgtcggtctctgcacacgtagttcggaatcatgtctaacattggtttaaacctctctttaattcaacaacgatgatgtgctgcagttcgagagaaaaaaaaggtttcatgagtttttttttaatttgtagtacttcactctccctccccatgttttttttggcaccctgtacctgcaaaactagtagaagcaaatgtggatgtttgtcactgaatagttgataatcccttcaaaggaagttctgctttctctaatgtcgaggctgtggataaggcagagccaaagagtggcgaaggcttgttacattcttcgagcatgattccctaattagcaagcttttctactgcaagtgcgcgacacaatttatcgctgataccgaacattcgataggcctatccagaacaacaagtgcgaaaagaaggctccaaagaaggtgcataaatctgagagagagaaacgtaagcgggacaagcagaatgatctctttggtgagctgggaaacatgctagaacctgatagacagaacaatggaaaggcatgcatattaagtgacactacacgaatacttaaagatctactttcacaagtagaatctcttcgaaaggagaacaacacgctgaagaatgagtctcattatgtcgctttggagagaaatgaactactggatgaaaccaatatgatccgtggcgaaatatcagaccttcaaaacgagatgaggatgcggctagaagacaactctatctggagtcatgacacttctagaccaaatcttacagcaccccatccagcgaccacagtatttacattgcagcattcaccacatccacaagtcattgcaacaatgacacttcctctgcaacagccagcagtcgttgagcaatcttacgctgccccacggcgggagctacagctattccctgaagctgcacccactgaagatactgagccaccacaaaacgaggggacctctaatcatgtgatgcggccgcaggcgaggtacccaccagcaatgaccactttgcctgggcatgtatatccagtccttccaagagtggaagatgagcaacgcagcagcggcactactggtagcagagaggaaggcggggtaggcaaccgttaacagctcgagtacaaaacgagagatctggctcacagtttgaaaagttctcgtagtttcaactttaatgtttccattctagctgatgtgctaaagaaaccttaaaacctatgcggctgtgcctgcacatgtaaatatcattccactctgtattacccgaacttaatcttcaactagttacttcgatgggagcaatctatctttgttagttcgtccacttcgtagtttatctgtagtacttgtaccaagcagaagttcaaggagtacctgattcgagaaaacatgttaatcactctttgt

SEQ ID NO: 144896 - DNA, 1066 bp, Zea Mays
cccgctcccgttccccaatcccagcaccgatccccgcccctccgacgcgccggcggccatggacatgtcgtcgatcgccgcgaacctcggtctctcggggtcccgccccgtcatccgcaaggccggcgagctccgccgcctctgcgacgtcaacttcgattcttctgtcctcggcatcggcgaggtctgcaaggccatcatctgcctggagatcgccgcgtccaagttacaggtgatatttgaccgggcggaggctgtgcgtatgagcgggatgtctgagaaggcgtacatcagatcattcaattcgctccaaaatggtcttggtgtcaagacgactttggatgtgcgtgaattgggcatccagtttggctgtgtcaggctgatacctttcgttcagaagggattgtcactctataaggagcgcttccttgctgcattgccaccttcacgccgggcaagcactgactttggtcggccagtgtttactgcagcagcattctacttatgtgcgaggaggcacaagctcaaagttgacaaactaaagctgatcgatctatgtggcacatcgagcgccgaatttacaacggtttcaacatcaatgacagacctctgctttgatgtttttgggatagccaaggagaagaaggatccaaagtccatcaaagggaacagagaactgctggatgttttgccaagcaaaaggaaacatgaagatggcggtgattcatctgcatccgatgaatcctcagacaacgatcaagacgagctagatttaccaactcacaagaggcgcaagaagatggagagagaagcatacaaggactggaagtcgtccgttctctcctcgaacaagaaaaccaaaccagaccctgccaagcctaggaggcaagctcaactcaacttcaagaagccggcagaagtacctcctgcagccaactagatgagtacgaaccctcttcgcaacaaatgcagtttgctgagactgaaagtggtgtatttgctccatcctcatctatgttccttctgaacgcatatgggaaaaaaaagcccggacgcctttttgctc

SEQ ID NO: 144897 - DNA, 1723 bp, Zea Mays
cctgtcctcaacctcaagccgccacgctccaccaacacgcgcgcgctggcttcttcaacctcggttgcttgctcgcaacaagacacggatcgtcagagcaagagctctggtgacctgacgattctgctcttgttctcgtacggcgccggtgcctagcgtctgtagcctttttgtgtgtgttttttcgcccatatctccccaccaccaccaccaccaacctcagccgcagttcacccgcgtcaccgcacgagtacacgagcaatccgcaagcgataacctgcaagctgaggggaaaggaaggtgaaggccagctgttttgctcacggagaaagaggttcgtcgttgatcaacacggacacaccatggtgaggccgccgtgctgcgacaaggagggcgtcaagaaggggccatggacgccggaggaggacctcgtcctcgtctcctacatccaggagcacggccccggcaactggcgcgccgtcccggccagaaccgggctgatgcggtgcagcaagagctgccgtctgcggtggaccaactacctccggccgggcatcaagcgcggcaacttcaccgagcaggaggagaagctcatcgtgcacctccaggccctcctcggcaacaggtgggcggccatcgcgtcgtacctgccggagcggacggacaacgacatcaagaactactggaacacgcacctcaagcgcaagctgcagagcggcggcgacggggcggccaagccgccggcgcacaggccgccgtcgtcgtccaagggccagtgggagaggaggctgcagacggacatcaacctggcgcgccgcgcgcttcgcgaggccctcaccccgctcgacgacctcaagccgcagctgcagcgcgacgccgccgccgacgcgccggccgctggcgcgggcacgggcggcggtgacagcccggcttcgagctcgtcgggcgcgtcgcagtcctcccctttggcgccagcggccttcgccgccgccgccgcggggccgtacgttctcaccgcggagaacatctcgcggatgctggacgggtgggctggccggaaggtccgcggcggcgggaccccgggcacccccggcggtgccgagagcgcgtccacgggatcctcggacgcgtcggaggtgtcgtacggtggcgccgccgtcgcatcggccgcgccggcgcccgcttgtggtgggccggtcttcgaatacgaggcgaagccgggcgtgccgacgtcccatcagcagatgccgctgtcggcgatcgagtcgtggctgttcgacgacgacagccacttgcaccatgctgtccagagcgccagcttgctcgatgccgcccccatggattaccccttctagctctagtgtgtccaatcgatcaagctcaagctaatcccttcaagcgaggagtgtgattacagcgctgtctcctaaagaaaactacacagatcctgcagtacgacgtcggtggctgattaatcgatcggctaggtagctgattcagatcggtcgcttgatcaggttgtttacgtgggatctgcgtagttttcatttagattccaaagaacataagtagaaccacacttatgctactacccttactatgacgacgacggagtatgttcttgggccttttttttttactgttttctagccttttctccaagtaaagcttggggtacgtagatccccttgtgcaagttgcatgttgtgtggaaaaataattg

SEQ ID NO: 144898 - DNA, 1990 bp, Zea Mays
cctgtcctcaacctcaagccgccacgctccaccaacacgcgcgcgctggcttcttcaacctcggttgcttgctcgcaacaagacacggatcgtcagagcaagagctctggtgacctgacgattctgctcttgttctcgtacggcgccggtgcctagcgtctgtagcctttttgtgtgtgttttttcgcccatatctccccaccaccaccaccaccaacctcagccgcagttcacccgcgtcaccgcacgagtacacgagcaatccgcaagcgataacctgcaagctgaggggaaaggaaggtgaaggccagctgttttgctcacggagaaagaggttcgtcgttgatcaacacggacacaccatggtgaggccgccgtgctgcgacaaggagggcgtcaagaaggggccatggacgccggaggaggacctcgtcctcgtctcctacatccaggagcacggccccggcaactggcgcgccgtcccggccagaaccggtatgtgctttactgcatgcttatttccatcacgctttccactatcagtatcagtatagtttttcttttttctttttttgaactactccgtaaagagcaagagctgatcggtggaggatttttcgcgcagggctgatgcggtgcagcaagagctgccgtctgcggtggaccaactacctccggccgggcatcaagcgcggcaacttcaccgagcaggaggagaagctcatcgtgcacctccaggccctcctcggcaacaggtacgtacggcgggcgcggatttattgggcacacggtgttacagctggcgatcggagtagctacctagtgtgggatgggatgggatgtgatggccgatgtgggtgtgtggctcatggcttcgcgtggtgcggcgtaggtgggcggccatcgcgtcgtacctgccggagcggacggacaacgacatcaagaactactggaacacgcacctcaagcgcaagctgcagagcggcggcgacggggcggccaagccgccggcgcacaggccgccgtcgtcgtccaagggccagtgggagaggaggctgcagacggacatcaacctggcgcgccgcgcgcttcgcgaggccctcaccccgctcgacgacctcaagccgcagctgcagcgcgacgccgccgccgacgcgccggccgctggcgcgggcacgggcggcggtgacagcccggcttcgagctcgtcgggcgcgtcgcagtcctcccctttggcgccagcggccttcgccgccgccgccgcggggccgtacgttctcaccgcggagaacatctcgcggatgctggacgggtgggctggccggaaggtccgcggcggcgggaccccgggcacccccggcggtgccgagagcgcgtccacgggatcctcggacgcgtcggaggtgtcgtacggtggcgccgccgtcgcatcggccgcgccggcgcccgcttgtggtgggccggtcttcgaatacgaggcgaagccgggcgtgccgacgtcccatcagcagatgccgctgtcggcgatcgagtcgtggctgttcgacgacgacagccacttgcaccatgctgtccagagcgccagcttgctcgatgccgcccccatggattaccccttctagctctagtgtgtccaatcgatcaagctcaagctaatcccttcaagcgaggagtgtgattacagcgctgtctcctaaagaaaactacacagatcctgcagtacgacgtcggtggctgattaatcgatcggctaggtagctgattcagatcggtcgcttgatcaggttgtttacgtgggatctgcgtagttttcatttagattccaaagaacataagtagaaccacacttatgctactacccttactatgacgacgacggagtatgttcttgggccttttttttttactgttttctagccttttctccaagtaaagcttggggtacgtagatccccttgtgcaagttgcatgttgtgtggaaaaataattg

SEQ ID NO: 144899 - DNA, 1584 bp, Zea Mays
cgctctagctaccgagactcaaactcggctgtgctgtgtctgtgtgggtggccttctccctcccgcgcgccaaaggcccacggcggcacggccacgggcagccgccgcccgccggccgctgcgagccaccacaggctggatcctgcaccgctggtggtctcccggcccgtcagatcctgatatatcttcaaagataaagagagaaaatcataacagatggcggcggcggcaatcgcgaccgtgtccctcagttcagttcctcgcgaaaagcggccccggcactgtgccagtaccttcaacttcaacgcacggcagttcagtaactccagctcccactgccactctttcacgctgagaccaagagtgccaagaccccgagccgcgtgccgggtcatcgtcgcgcaggccggcggcggctacaaggtggccatccttggcgcggcgggaggggtcgggcagccgctgtccctgctggccaagatgtccccgctcgtctcggcgctgcacctgtacgacatcgccgccgacgtggagggcgtggccgccgacctgagccactgcaacaccccggcgcgggtctccggcttcacgggcgaagacgagctcgcggggtgcctgtcgggcgcggacgtcgtggtggtcgccgccggcgtgccgcggaagcccggcatgacgcgggaggacgaccggttcggcgccaacgcgggcgtggtgcgggagctcgtggcggcggtggcggaccacgcgccgccgggcgcgctggtgcacgtgatcagcgacccggtggactcgacggtgccggtcgccgccgaggtgctgaagcacaagggcgcgtacgacccgcggaggctgttgggcgtgacggcgctggacgtggtccgcgccaacgcgttcgtggcggcgcggaagggcctgccgctggcggacgtggacgtgccggtggtgggcggccacgcggcggccaccatcctgccgctgctgtccaaggcgcggcccaaggcggcgttcacggacgatgaggtggaggagctcacggccagggtccgcgacgccggcgccggcgggtccgccacgctgtcgatggcgtacgccgccgcgcggttcctcgaggcgtccctgcgcggcctcgacggccacggcgacgtgtacgagtgcgcgtacgtgcagtcgcaggtggtgccggagctcccgttcttcgcgtgcagggtgaggctcgggagggacggcgtggaggaggtgatgggctccgagctcagggcgctcaccgactacgaggcgcgcgcgctggaggccctcaagcccacgctcaaggccagcatcgacaagggcgtcgcgtacgtgcagcagcaccaggaggcagcgttgaactgaaactgactgctggggctgctgcagctggcggcccaccaaaaatacatggatcatgtagcggccgacgtcccgcaaaaggcccatgagctgaaacagtaacctacagagtaattcattttgtgatcttctgtgatgaaaaataccgcagtttcctcaaaatgatgatgacgatgatgaccatgaatgaaacagacgtgaaacatttccttcctc

SEQ ID NO: 144900 - DNA, 1292 bp, Zea Mays
cttcttgccttctcgcgctcgcctccgtttcgtgtcggctcgctctaaacgtgagatcggggaggtggtggacttggggtcgttgtggtatcggcggcgagccgcgggggcctagggtttcctgccttcctggtttggatccgcgccctggcccatgggatccggaggcttcgcggccgcggtggccgcgtgcccctccgccgccgaggccttccttaagtactatggtattgtatcaggaggtacaagtgcggagtcaagacaagcattggttgagctttcactagctatagacggaattgaaggaatgagggatgtgatatttgctgatattccaaagctcattccatttattgatctggaggatatgagcctattcagttgcttctacgattttgttttcttcatctgccgtgaaaagggtcaaaagagtgtcactattcagagagctgtagcagcatggaggattgttctaagtggaaggttccgtttgcttgatcgatggtgtaacttcgttgagtaccaacgccataacatatccgaggatacttggcagcagctgctagctttcagcaggtgtgtaaatgaagatctggaaggttatgacccacgaggtgcttggcctgttctgattgatgattttgttgagcaaatgcacagaatttatcactccactgactgcagcagtgcgatggaatcacagtgtaacatttccagtacccttaaaggactggatcctcaacctggatcaaagaggaaatgcccacacctcaaatccaatgaagaggatgtagagctttcggatagctttacgcgctctgtccatcttacaccaataaagcgactcaaggaaagccatgacgccagatatggagcgggggaatccgccaaaactacccatttctctaatagttcctctggtggttaccacgaggatatgaatttacacaactcaagaggttgccttcagaactccccctgtaatgttgaggatgccctgtccaaagggtttgagggttgtatttcgatgaaatgtccattttgatgtaacaaatttcgtgtcagcccagaagctatacattcccttttagcggcaaaatcatcctgtgtgtgtatctagtcattttgtgcaaaaaaaatgcagtaattgaatgcattttttttaaaatgctttaaagtgtattgatcagcatcggacctgtttttagaggcatcggtatgaagggagggctgttggttgtgtttgcttgacagcaaatccctcccattcaataccccgcactttctgaaaa

SEQ ID NO: 144901 - DNA, 1295 bp, Zea Mays
cttcttgccttctcgcgctcgcctccgtttcgtgtcggctcgctctaaacgtgagatcggggaggtggtggacttggggtcgttgtggtatcggcggcgagccgcgggggcctagggtttcctgccttcctggtttggatccgcgccctggcccatgggatccggaggcttcgcggccgcggtggccgcgtgcccctccgccgccgaggccttccttaagtactatggtattgtatcaggaggtacaagtgcggagtcaagacaagcattggttgagctttcactagctatagacggaattgaaggaatgagggatgtgatatttgctgatattccaaagctcattccatttattgatctggaggatatgagcctattcagttgcttctacgattttgttttcttcatctgccgtgaaaagggtcaaaagagtgtcactattcagagagctgtagcagcatggaggattgttctaagtggaaggttccgtttgcttgatcgatggtgtaacttcgttgagaagtaccaacgccataacatatccgaggatacttggcagcagctgctagctttcagcaggtgtgtaaatgaagatctggaaggttatgacccacgaggtgcttggcctgttctgattgatgattttgttgagcaaatgcacagaatttatcactccactgactgcagcagtgcgatggaatcacagtgtaacatttccagtacccttaaaggactggatcctcaacctggatcaaagaggaaatgcccacacctcaaatccaatgaagaggatgtagagctttcggatagctttacgcgctctgtccatcttacaccaataaagcgactcaaggaaagccatgacgccagatatggagcgggggaatccgccaaaactacccatttctctaatagttcctctggtggttaccacgaggatatgaatttacacaactcaagaggttgccttcagaactccccctgtaatgttgaggatgccctgtccaaagggtttgagggttgtatttcgatgaaatgtccattttgatgtaacaaatttcgtgtcagcccagaagctatacattcccttttagcggcaaaatcatcctgtgtgtgtatctagtcattttgtgcaaaaaaaatgcagtaattgaatgcattttttttaaaatgctttaaagtgtattgatcagcatcggacctgtttttagaggcatcggtatgaagggagggctgttggttgtgtttgcttgacagcaaatccctcccattcaataccccgcactttctgaaaa

SEQ ID NO: 144902 - DNA, 1193 bp, Zea Mays
atctctggagggactggacaaagtttgagagatcctataatagggtccaccattgatctctgtctaggtccatccaaccgtcgaacgacctttccaccatggacatctcgggaggaggctggcgagtattgtatcaggaggtacaagtgcggagtcaagacaagcattggttgagctttcactagctatagacggaattgaaggaatgagggatgtgatatttgctgatattccaaagctcattccatttattgatctggaggatatgagcctattcagttgcttctacgattttgttttcttcatctgccgtgaaaagggtcaaaagagtgtcactattcagagagctgtagcagcatggaggattgttctaagtggaaggttccgtttgcttgatcgatggtgtaacttcgttgagaagtaccaacgccataacatatccgaggatacttggcagcagctgctagctttcagcaggtgtgtaaatgaagatctggaaggttatgacccacgaggtgcttggcctgttctgattgatgattttgttgagcaaatgcacagaatttatcactccactgactgcagcagtgcgatggaatcacagtgtaacatttccagtacccttaaaggactggatcctcaacctggatcaaagaggaaatgcccacacctcaaatccaatgaagaggatgtagagctttcggatagctttacgcgctctgtccatcttacaccaataaagcgactcaaggaaagccatgacgccagatatggagcgggggaatccgccaaaactacccatttctctaatagttcctctggtggttaccacgaggatatgaatttacacaactcaagaggttgccttcagaactccccctgtaatgttgaggatgccctgtccaaagggtttgagggttgtatttcgatgaaatgtccattttgatgtaacaaatttcgtgtcagcccagaagctatacattcccttttagcggcaaaatcatcctgtgtgtgtatctagtcattttgtgcaaaaaaaatgcagtaattgaatgcattttttttaaaatgctttaaagtgtattgatcagcatcggacctgtttttagaggcatcggtatgaagggagggctgttggttgtgtttgcttgacagcaaatccctcccattcaataccccgcactttctgaaaa

SEQ ID NO: 144903 - DNA, 603 bp, Zea Mays
atggcgaggctcctggtgatgatcttgctcgctctgtttctcctcgccgtcgcgcccgctcaagcggctcgcttcacaagtaattatctaccggttgtcgtctcttgctcttgcttccatatatatgtctttcttccctgcatgcgcactggatatctgaacggcggccgtgtggtacgtgatttccatgtggacgacgcagatcacgcagggggcttgagagcgaggatcggcgaggctccggcgctagaggctgcgcaagtttcagcagagcgaacgacacaggaggggcagatctggcggtctttgcttcgaatcgtcggtgttgacgcctctgttttcttccggatgccggtgaagaagaccggcatgggagcggccggtgaatttacctacgcttcattggagaagaccgacgtgggtttggagggaggcatcgcgcgctccgtcggtggacgagggggcgggcacggcggtgggatgggtggggtgcgggtgagatttgctggggaggctggcgcaagggggcagggctggggctgcgggtgcggggcgggggcaagcgggggcacggagctatggacaacctccttagcttcttaa

SEQ ID NO: 144904 - DNA, 1874 bp, Zea Mays
aatagtaggatttccagagagacagaaacaaacggagacgcagagaaaccctttccacccagattcgttcggttcggttcggttccgaccacgcgggcgcgggagagagtggggagatgagcgcggctgcggaggacgcggctgcggccgaagggggatccggaggcgggagcagcggcgcggggtcgtcggaagggggcgcgcggcgccggttcgacgacaagggcctcgtcgcccgcacctcgctcatcctgtggcacacgcaccagaacgacgtcggcgccgtgcggaagctgctggaggaggacgccgcgctcgtcaacgcccgggactacgacagccgcacgccgctccacgtcgccgcgctccacggctggcacgacgtcgccgagtgcctcgtcgccaacggcgccgacgtcaacgcccaggaccgctggcagaacacgccactagctgatgcggagggcgcaaagaggcagcccatgattgagctgctcaaggagcacggtggattgacatatgtatgtggtcgataacttgatttaacaggtattccaattccacctgtcactgtatggtatggatttagtgggggaaaactggaagccattttgaaccaaagacgattccaccacctctaacaaataaggctgactgggagattaacccacttgaattggacttcacaaaagcaactgttatcggaaagggctctttcggtgaaattctgaaagcaaattggcgaggaacacctattgctgtcaagcgcattcttccatccttatctgatgacaggctggtgatccaagattttaagcatgaagtcaacttgctaataaagctgagacatccaaatgttgtccagttccttggagcagttacagaaaccaagcctctaatgctaattactgagtttctacgaggaggtgatcttcatcaatatctgaaggacaaaggtgcactcaacccacttaccgctgttaattttgcactggatattgcaagaggaatggcatatcttcataatgagcctaatgttgtgattcaccgagatttaaaaccaagaaacattcttctggtgaattctgctgccaaccacttgaaggttggagacttcggccttagcaagatcatcaaagcgcagcatgcgaatgatgtatacaagatgactggagagacaggaagctatcggtacatggcccctgaagttttcaagcaccggaaatatgacaagaaagttgatatcttctcttttgccatgattctatatgagatgctggaaggtgattcacccttctccaactacgaaccttatgaggctgctaagtacgtggcagatgggcatcgtccggttttccgtaaaaatcataccactgagttgaaggatttggttgagctatgttggtctggggacatcagtctgaggccatctttcttggagatcctcaagaggcttgagaagctcaaggagcattattcacacgagaaccactggcatttgttccagtagcagtgcgtatatttttttactatgactgttgtcatgattggggatttctcgggagatctgacattgatgaatgtacaaaattgggtgcctctagaaaggtccactgagactgaaaatcttcttgctgttttacgtttatgctatttctggtaaaaaaaacagaagctttctttgtaccacatcctctacaactttgtctttaggcttctctccgtaaatgatggaaaatcttgaactatgttctgcagcatttaggttgatgtggtgttctatatagatcggttgattttctttttctattcttttctgttgccaggatctttatatgcttagactcattggctatgggaagtgtttttaccgt

SEQ ID NO: 144905 - DNA, 1845 bp, Zea Mays
ccgattcagatctcgcgcacagcacgcgagccgagggggacaaatagtaggatttccagagagacagaaacaaacggagacgcagagaaaccctttccacccagattcgttcggttcggttcggttccgaccacgcgggcgcgggagagagtggggagatgagcgcggctgcggaggacgcggctgcggccgaagggggatccggaggcgggagcagcggcgcggggtcgtcggaagggggcgcgcggcgccggttcgacgacaagggcctcgtcgcccgcacctcgctcatcctgtggcacacgcaccagaacgacgtcggcgccgtgcggaagctgctggaggaggacgccgcgctcgtcaacgcccgggactacgacagccgcacgccgctccacgtcgccgcgctccacggctggcacgacgtcgccgagtgcctcgtcgccaacggcgccgacgtcaacgcccaggaccgctggcagaacacgccactagctgatgcggagggcgcaaagaggcagcccatgattgagctgctcaaggagcacggtggattgacatatgggaaaactggaagccattttgaaccaaagacgattccaccacctctaacaaataaggctgactgggagattaacccacttgaattggacttcacaaaagcaactgttatcggaaagggctctttcggtgaaattctgaaagcaaattggcgaggaacacctattgctgtcaagcgcattcttccatccttatctgatgacaggctggtgatccaagattttaagcatgaagtcaacttgctaataaagctgagacatccaaatgttgtccagttccttggagcagttacagaaaccaagcctctaatgctaattactgagtttctacgaggaggtgatcttcatcaatatctgaaggacaaaggtgcactcaacccacttaccgctgttaattttgcactggatattgcaagaggaatggcatatcttcataatgagcctaatgttgtgattcaccgagatttaaaaccaagaaacattcttctggtgaattctgctgccaaccacttgaaggttggagacttcggccttagcaagatcatcaaagcgcagcatgcgaatgatgtatacaagatgactggagagacaggaagctatcggtacatggcccctgaagttttcaagcaccggaaatatgacaagaaagttgatatcttctcttttgccatgattctatatgagatgctggaaggtgattcacccttctccaactacgaaccttatgaggctgctaagtacgtggcagatgggcatcgtccggttttccgtaaaaatcataccactgagttgaaggatttggttgagctatgttggtctggggacatcagtctgaggccatctttcttggagatcctcaagaggcttgagaagctcaaggagcattattcacacgagaaccactggcatttgttccagtagcagtgcgtatatttttttactatgactgttgtcatgattggggatttctcgggagatctgacattgatgaatgtacaaaattgggtgcctctagaaaggtccactgagactgaaaatcttcttgctgttttacgtttatgctatttctggtaaaaaaaacagaagctttctttgtaccacatcctctacaactttgtctttaggcttctctccgtaaatgatggaaaatcttgaactatgttctgcagcatttaggttgatgtggtgttctatatagatcggttgattttctttttctattcttttctgttgccaggatctttatatgcttagactcattggctatgggaagtgtttttaccgt

SEQ ID NO: 144906 - DNA, 2483 bp, Zea Mays
gccgattgcttccccgaatctcttcccccaatccggcgcccggcagaatgcgaggccgccacctcctaaaacccatgcccgtcctcctcaacactaccccttcccggctccccgccgcccacttccgcgtccgtgacgcagcccgcccgcccgcgccgctggcagagcccgacgtcggcatctctcgcttcgcctcctccatcccgggcttccgcggcgcgctgaagcagcgctactccgacttcatcgtccacgaggtcgcctgcgacggcgccctcgtccgcctcacttccttcgatctccccgacatcgaggagagtggagataatgcggaggacggtgattccgacgccaccgcggatccatcgcgggcgctcgagtcgttccggctgctctgcggcgaagcggattaccacgccttgaggggattcctggagagggtttcggagggaggtgatggttatttgtcgccaatcattctgtcagctgatgcagataaggcacatcgatccgaggtgcacgagttcatcaagaggaatttcaagttcctgaacacggatacagttgagcacaatgatggtattcagaaatgcattagggtgcgcttgggttcagggccacgctgtggtaggggaaggaacaggagaggcatggacacttcaggctggagagatgacaagccgtttgacagtagaggctctacattctggccttatcacctggggaagttcctgaggtttcacctttataaggagaacaaggacacgcatgaggcactaggggttataggaaaattggcaggggttcagccaagatcgtttggatttgcagggacaaaggataaacgtgctgttacaacccaacaggtgacagtttttaaagtgcatgctagcaggctggctgctcttaatagcaaactcacaggtatcagagttggagactttagttacgtgaaggagggccttgctcttggtcgactcagagggaaccactttgcaattactttgaggaatgttattgcagaatcggccgatgatataaatgctgcagttaatggtctaagtaaaaatggatttatcaattactatggcttacagcgctttggcagcggttctgtacctacccactttgttggtgctgctttgctcagaggagaatggagacatgctgttagcttgattcttggtacaagggtacattataaatggcatgttgatgttgatgcagcacttaggggcatgccccgacatctcacagtggagagagctattcttcagagattgaagaactaccctggcaactatctacaagcactaatggctatacctaaagcactgaggctgatgtatgtacatagctaccagagttacttatggaatcatgctgcaagtatgagagtggaaaagtatggtatttcacaagttgtagaaggtgacttagtttacaaaactgggtcctcccttggagaagcaattaccacagatacatttgatgacgatgatagccacgttaattcacctgaaatggaaatgtcttgtgaaacacttactgaagaaatgatccaatctgtgaaggtagttgattctgaagatttattgaaggcagtctattcgtttgaggatgttgttctccctttgcctgggtcagaaacattgtttcctgggaatgaagttactatgatttatcatgaaatagccaagaaggatggcattagcctgatagagagcgcccatggtatcaaggacctgatgacttacacagatgacaatacacctttagtaccaactgatttagatgttctatcagaaacccagttatcagaaacaaatgagccattatctgatgggacttgcagttgtccatcaagtgattccaggttgcaagttttattggacacctctggaccaaccattgaagctagctcagtagaaaccaaatcaattggcatctcagatctgtcaccagagaaactggctgtgaaattagaatttactctaccagcatcatcttatgctacaatggccataagggagttgacgaaaacttcaacttcggttgcttgccagaaaacattaaacggctgaccaagccttgcagtgtaaaatgctttcttcgcaagctggtatccattgtgacaaaacacaccatgtgggtttaactgggcccaggggatggaaccaagcttcggaaaagaaggaacatttcggttctttgctctcactaggaatgatgttccatgattttttagaaaactggaacaggtgttggtctgacatacatggatgtaaacttagatgactgaaaagtagctttaccttttgcagacagatctttttgtctttagtttatgcatcgtatattgtgatgtctgaactggggtcgcaacctcgtgggcatgcacgtatggccatgcacttctttgaggcgtgcactacctcataacgttcacgtccttaccagcactgggtcattttgtggacggc

SEQ ID NO: 144907 - DNA, 2552 bp, Zea Mays
gccgattgcttccccgaatctcttcccccaatccggcgcccggcagaatgcgaggccgccacctcctaaaacccatgcccgtcctcctcaacactaccccttcccggctccccgccgcccacttccgcgtccgtgacgcagcccgcccgcccgcgccgctggcagagcccgacgtcggcatctctcgcttcgcctcctccatcccgggcttccgcggcgcgctgaagcagcgctactccgacttcatcgtccacgaggtcgcctgcgacggcgccctcgtccgcctcacttccttcgatctccccgacatcgaggagagtggagataatgcggaggacggtgattccgacgccaccgcggatccatcgcgggcgctcgagtcgttccggctgctctgcggcgaagcggattaccacgccttgaggggattcctggagagggtttcggagggaggtgatggttatttgtcgccaatcattctgtcagctgatgcagataaggcacatcgatccgaggtgcacgagttcatcaagaggaatttcaagttcctgaacacggatacagttgagcacaatgatggtattcagaaatgcattagggtgcgcttgggttcagggccacgctgtggtaggggaaggaacaggagaggcatggacacttcaggctggagagatgacaagccgtttgacagtagaggctctacattctggccttatcacctggggaagttcctgaggtttcacctttataaggagaacaaggacacgcatgaggcactaggggttataggaaaattggcaggggttcagccaagatcgtttggatttgcagggacaaaggataaacgtgctgttacaacccaacaggtgacagtttttaaagtgcatgctagcaggctggctgctcttaatagcaaactcacaggtatcagagttggagactttagttacgtgaaggagggccttgctcttggtcgactcagagggaaccactttgcaattactttgaggaatgttattgcagaatcggccgatgatataaatgctgcagttaatggtctaagtaaaaatggatttatcaattactatggcttacagcgctttggcagcggttctgtacctacccactttgttggtgctgctttgctcagaggagaatggagacatgctgttagcttgattcttggtacaagggtacattataaatggcatgttgatgttgatgcagcacttaggggcatgccccgacatctcacagtggagagagctattcttcagagattgaagaactaccctggcaactatctacaagcactaatggctatacctaaagcactgaggctgatgtatgtacatagctaccagagttacttatggaatcatgctgcaagtatgagagtggaaaagtatggtatttcacaagttgtagaaggtgacttagtttacaaaactgggtcctcccttggagaagcaattaccacagatacatttgatgacgatgatagccacgttaattcacctgaaatggaaatgtcttgtgaaacacttactgaagaaatgatccaatctgtgaaggtagttgattctgaagatttattgaaggcagtctattcgtttgaggatgttgttctccctttgcctgggtcagaaacattgtttcctgggaatgaagttactatgatttatcatgaaatagccaagaaggatggcattagcctgatagagagcgcccatggtatcaaggacttctcgattacaagcatgaaaggaggttaccgccgcgtactccaacgccctattgattttgaatgggacctgatgacttacacagatgacaatacacctttagtaccaactgatttagatgttctatcagaaacccagttatcagaaacaaatgagccattatctgatgggacttgcagttgtccatcaagtgattccaggttgcaagttttattggacacctctggaccaaccattgaagctagctcagtagaaaccaaatcaattggcatctcagatctgtcaccagagaaactggctgtgaaattagaatttactctaccagcatcatcttatgctacaatggccataagggagttgacgaaaacttcaacttcggttgcttgccagaaaacattaaacggctgaccaagccttgcagtgtaaaatgctttcttcgcaagctggtatccattgtgacaaaacacaccatgtgggtttaactgggcccaggggatggaaccaagcttcggaaaagaaggaacatttcggttctttgctctcactaggaatgatgttccatgattttttagaaaactggaacaggtgttggtctgacatacatggatgtaaacttagatgactgaaaagtagctttaccttttgcagacagatctttttgtctttagtttatgcatcgtatattgtgatgtctgaactggggtcgcaacctcgtgggcatgcacgtatggccatgcacttctttgaggcgtgcactacctcataacgttcacgtccttaccagcactgggtcattttgtggacggc

SEQ ID NO: 144908 - DNA, 1073 bp, Zea Mays
tatacatcagtgaaaatgctctttgtttgtgcggatccagtagtactttgttttgcctttttgcttgagcaagtgtagttcaccgccacttatttgccagtaaagatgtacgtggagcctgcatgagggcagccgtgctgaaactgccgtcgatctgggtccagactcggaggacggcagcaagaggaggtcgctggccaccaccatgttctgtgtggcgaaacagggcgcggacgcgacggcgctgcaggcagggctcaactgggcgtgcgggcagggccgagcgaactgtgcgcccatccagcccggcgggccgtgctacaagcagaacgacctggaggcgctagcgtcctacgcctacaacgactactaccagaagaactttgctaccggcggctcctgcggcttcaacggcacagctacgaccaccaccagtgatcccagctcggggcagtgcgtcttcacaggaagctccatggcaggaggcggcacgccggctgcgagcgcccccagcggcctctccccgccgtcgtcgttcacgccgggcattgggagcccctccaacaccctgatccctctggacggcgccgagagcctggtgtccagcgtctggtcggcgatttgcgccccgctgctggcgttgccgctcttcttcctctgaccaccagcggcggcagatgagtggccggtgcttgctagtagagcgcttattatgtttttttgttcttgttcctgggtagatcgctctcgtgtggcggtgttgatgtacatgtcagagtcgtgttggatgcgctgggatgggagattacataagatgctacagagatctattcatacgtagaaagtggaccggactccaccgtgtttccgtgtgttctggtctcagatctgttcgtggcagaaaccagatgtaaatgtatcatgttcactactctctgtgcacagaccaagggaagctgcagtccactgaccacacacacaccacgctaggattcagactcagaggcttcgtctctgtccgatgccgtcgcgcccagcgtcggcgtggccctggacgctgctgccttctcccg

SEQ ID NO: 144909 - DNA, 1170 bp, Zea Mays
attcatgcccacaaattccttccaaacagaaacagcaccagactcctttccttttcctctcgctccctcgctctttctcccgcaactcggcgtcggcgaccgctgccgctgccctactacgccaggtgcactgctgctggtctagtagcctcgtcggtcccttcgacaggttttcttcgggtcttcgccggcgacgagcacccgccaggtggccaatgataatgttggcggtcagagggctgaacagtaaaatgctggagaaaagactgcacggatgcctgctcctgctcgtcttccttctggcagacgtatcaggcagccgtgctgaaactgccgtcgatctgggtccagactcggaggacggcagcaagaggaggtcgctggccaccaccatgttctgtgtggcgaaacagggcgcggacgcgacggcgctgcaggcagggctcaactgggcgtgcgggcagggccgagcgaactgtgcgcccatccagcccggcgggccgtgctacaagcagaacgacctggaggcgctagcgtcctacgcctacaacgactactaccagaagaactttgctaccggcggctcctgcggcttcaacggcacagctacgaccaccaccagtgatcccagctcggggcagtgcgtcttcacaggaagctccatggcaggaggcggcacgccggctgcgagcgcccccagcggcctctccccgccgtcgtcgttcacgccgggcattgggagcccctccaacaccctgatccctctggacggcgccgagagcctggtgtccagcgtctggtcggcgatttgcgccccgctgctggcgttgccgctcttcttcctctgaccaccagcggcggcagatgagtggccggtgcttgctagtagagcgcttattatgtttttttgttcttgttcctgggtagatcgctctcgtgtggcggtgttgatgtacatgtcagagtcgtgttggatgcgctgggatgggagattacataagatgctacagagatctattcatacgtagaaagtggaccggactccaccgtgtttccgtgtgttctggtctcagatctgttcgtggcagaaaccagatgtaaatgtatcatgttcactactctctgtgcacagaccaagggaagctgcagtccactgaccacacacacacc

SEQ ID NO: 144910 - DNA, 1090 bp, Zea Mays
actttcatgtatacatcagtgaaaatgctctttgtttgtgcggatccagtagtactttgttttgcctttttgcttgagcaagtgtagttcaccgccacttatttgccagtaaagatgtacgtggagcctgcatgagggcagccgtgctgaaactgccgtcgatctgggtccagactcggaggacggcagcaagaggaggtcgctggccaccaccatgttctgtgtggcgaaacagggcgcggacgcgacggcgctgcaggcagggctcaactgggcgtgcgggcagggccgagcgaactgtgcgcccatccagcccggcgggccgtgctacaagcagaacgacctggaggcgctagcgtcctacgcctacaacgactactaccagaagaactttgctaccggcggctcctgcggcttcaacggcacagctacgaccaccaccagtgatcccagctcggggcagtgcgtcttcacaggaaggtgagcgtcttgaggtcacagaagcgcacactatacatgtcactcagtcactgtcagtcagaattcagaaacgtgcaagttgtagcacgtaacgtcttctctttttggcatgcagctccatggcaggaggcggcacgccggctgcgagcgcccccagcggcctctccccgccgtcgtcgttcacgccgggcattgggagcccctccaacaccctgatccctctggacggcgccgagagcctggtgtccagcgtctggtcggcgatttgcgccccgctgctggcgttgccgctcttcttcctctgaccaccagcggcggcagatgagtggccggtgcttgctagtagagcgcttattatgtttttttgttcttgttcctgggtagatcgctctcgtgtggcggtgttgatgtacatgtcagagtcgtgttggatgcgctgggatgggagattacataagatgctacagagatctattcatacgtagaaagtggaccggactccaccgtgtttccgtgtgttctggtctcagatctgttcgtggcagaaaccagatgtaaatgtatcatgttcactactctctgtgcacagaccaagggaagctgcagtcca

SEQ ID NO: 144911 - DNA, 1133 bp, Zea Mays
attcatgcccacaaattccttccaaacagaaacagcaccagactcctttccttttcctctcgctccctcgctctttctcccgcaactcggcgtcggcgaccgctgccgctgccctactacgccaggtgcactgctgctggtctagtagcctcgtcggtcccttcgacaggttttcttcgggtcttcgccggcgacgagcacccgccagcaggtggccaatgataatgttggcggtcagagggctgaacagtaaaatgctggagaaaagactgcacggatgcctgctcctgctcgtcttccttctggcagacgtatcaggcagccgtgctgaaactgccgtcgatctgggtccagactcggaggacggcagcaagaggaggtcgctggccaccaccatgttctgtgtggcgaaacagggcgcggacgcgacggcgctgcaggcagggctcaactgggcgtgcgggcagggccgagcgaactgtgcgcccatccagcccggcgggccgtgctacaagcagaacgacctggaggcgctagcgtcctacgcctacaacgactactaccagaagaactttgctaccggcggctcctgcggcttcaacggcacagctacgaccaccaccagtgatcccagctcggggcagtgcgtcttcacaggaagctccatggcaggaggcggcacgccggctgcgagcgcccccagcggcctctccccgccgtcgtcgttcacgccgggcattgggagcccctccaacaccctgatccctctggacggcgccgagagcctggtgtccagcgtctggtcggcgatttgcgccccgctgctggcgttgccgctcttcttcctctgaccaccagcggcggcagatgagtggccggtgcttgctagtagagcgcttattatgtttttttgttcttgttcctgggtagatcgctctcgtgtggcggtgttgatgtacatgtcagagtcgtgttggatgcgctgggatgggagattacataagatgctacagagatctattcatacgtagaaagtggaccggactccaccgtgtttccgtgtgttctggtctcagatctgttcgtggcagaaaccagatgtaaatgtatcatgttcactactctctgtgcac

SEQ ID NO: 144912 - DNA, 878 bp, Zea Mays
attcatgcccacaaattccttccaaacagaaacagcaccagactcctttccttttcctctcgctccctcgctctttctcccgcaactcggcgtcggcgaccgctgccgctgccctactacgccaggtgcactgctgctggtctagtagcctcgtcggtcccttcgacaggttttcttcgggtcttcgccggcgacgagcacccgccaggtggccaatgataatgttggcggtcagagggctgaacagtaaaatgctggagaaaagactgcacggatgcctgctcctgctcgtcttccttctggcagacgtatcagtaaagatgtacgtggagcctgcatgagggtgggtggtgttgtagacgagaacgctcttggctcttcatccgttgcagcttcacaccgtgctcggttcctacaacgtgcaggcagccgtgctgaaactgccgtcgatctgggtccagactcggaggacggcagcaagaggaggtcgctggccaccaccatgttctgtgtggcgaaacagggcgcggacgcgacggcgctgcaggcagggctcaactgggcgtgcgggcagggccgagcgaactgtgcgcccatccagcccggcgggccgtgctacaagcagaacgacctggaggcgctagcgtcctacgcctacaacgactactaccagaagaactttgctaccggcggctcctgcggcttcaacggcacagctacgaccaccaccagtgatcccagctcggggcagtgcgtcttcacaggaaggtgagcgtcttgaggtcacagaagcgcacactatacatgtcactcagtcactgtcagtcagaattcagaaacgtgcaagttgtagcacgtaacgtcttctctttttggca

SEQ ID NO: 144913 - DNA, 695 bp, Zea Mays
attcatgcccacaaattccttccaaacagaaacagcaccagactcctttccttttcctctcgctccctcgctctttctcccgcaactcggcgtcggcgaccgctgccgctgccctactacgccaggtgcactgctgctggtctagtagcctcgtcggtcccttcgacaggttttcttcgggtcttcgccggcgacgagcacccgccaggtatgcgaccttatcttcccttcctgctgtgcgaaaccgagcatcagaactctatggagtaataagctggggccgccgccgccgccggccgccgccgctatcaggttgcagaatcactcgtcagaatccgctgggttgtcagaatttgatcaacatactgctctttccaatactattttcgctccacatatgacggagtagttcaggatccgccgagaatttccctcgaatataacaggatgtgcacctgtacaacgaagaattcacctgctaatctactatgtaggtcgaaaaggggggaaaaggtaagcggtgtttaacgttcatgccgacgcaatagctttacttgattgcgaggcaagagtagggttagaagtttggagtatgactgtgacgcacgcgtttcactgtcttcgatttccaagagacgtctctggttccgcatctgtcacgtcatgccattatgttgcgaatagtatttcgatcc

SEQ ID NO: 144914 - DNA, 822 bp, Zea Mays
agttttacaatcatgtctcattctcatgatgtgcatatgcagtgaaaaacttcaacccaagaatggcgatgtcttggacaagagggttaaagcatggtgttgttccgaggcatgccgctcaattggtagagagcagaagccttgcaattgcaagcaaggcgaagaagggtggaaaggctgatgctggcaaaactcctgctctcagccaagagctcaagagtacaacagtgttcggggcaaacatcttcaaggagggttctgatccgaaaatccaaccagactctgagtatcctgactggctgtggcacttgctcgacaagcgtcctgtactaagtgagctgcggaggaaagatcccaagacactctcttatgaagacctgaagcgttttgtcaagttggacaaccgatccaggatcaagataaggaatgacctcaatgctaagaactgacctggagtcttggacgaaacaggacctgctctactgttctttttattattaatataatactagacgacatgaataatttttctggagtttttggcaaaacatagcgacttgggatgttaaaatgttaagatgtgcttggtttgttactcttttaggcagcttacgacactggcatgctttttgttcttccatcttgggaaagatgcagctttgtgcccagtacttagcaaattatcaagttccatggttctgcagcattatctgacgtcccagcatacgattcagtcacggtttatgtatcttccagttcatctgaatctttctggggtattgtaagtttggattttcattgcctgtgttaattgggttttac

SEQ ID NO: 144915 - DNA, 1090 bp, Zea Mays
ttcccacccccagccggcgtcaccctcatgagccagccgccagccccaggcttctagcctctgtccaagccggcagcccgccacccgcgaggccgcgaccggcgaccgcccgcccctgacgtggtgactgcgtcctcctccgctctccgtgcgccaccctgaagcggtgaggcgaggacctccaggcaccgccctccctggttcggcggctccctcgaggccttcctccccaccggttcagcagctcccgatccgcacggccaaaggccgattcgcgctcctccagccttcctccgcgtccaacagcaagtgaaaaacttcaacccaagaatggcgatgtcttggacaagagggttaaagcatggtgttgttccgaggcatgccgctcaattggtagagagcagaagccttgcaattgcaagcaaggcgaagaagggtggaaaggctgatgctggcaaaactcctgctctcagccaagagctcaagagtacaacagtgttcggggcaaacatcttcaaggagggttctgatccgaaaatccaaccagactctgagtatcctgactggctgtggcacttgctcgacaagcgtcctgtactaagtgagctgcggaggaaagatcccaagacactctcttatgaagacctgaagcgttttgtcaagttggacaaccgatccaggatcaagataaggaatgacctcaatgctaagaactgacctggagtcttggacgaaacaggacctgctctactgttctttttattattaatataatactagacgacatgaataatttttctggagtttttggcaaaacatagcgacttgggatgttaaaatgttaagatgtgcttggtttgttactcttttaggcagcttacgacactggcatgctttttgttcttccatcttgggaaagatgcagctttgtgcccagtacttagcaaattatcaagttccatggttctgcagcattatctgacgtcccagcatacgattcagtcacggtttatgtatcttccagttcatctgaatctttctggggtattgtaagtttggattttcattgcctgtgttaattgggttttac

SEQ ID NO: 144916 - DNA, 1222 bp, Zea Mays
ttcccacccccagccggcgtcaccctcatgagccagccgccagccccaggcttctagcctctgtccaagccggcagcccgccacccgcgaggccgcgaccggcgaccgcccgcccctgacgtggtgactgcgtcctcctccgctctccgtgcgccaccctgaagcggtgaggcgaggacctccaggcaccgccctccctggttcggcggctccctcgaggccttcctccccaccggttcagcagctcccgatccgcacggccaaaggccgattcgcgctcctccagccttcctccgcgtccaacagcaagggttgctacagataccgaaaaaggggggataaggattccaaaacactcggaggaaacatgtatatggggccatgtccaatcaagaaatacgaacaaacgtggcatcacaaagaaattttctctagtaagcaatgaaaaacttcaacccaagaatggcgatgtcttggacaagagggttaaagcatggtgttgttccgaggcatgccgctcaattggtagagagcagaagccttgcaattgcaagcaaggcgaagaagggtggaaaggctgatgctggcaaaactcctgctctcagccaagagctcaagagtacaacagtgttcggggcaaacatcttcaaggagggttctgatccgaaaatccaaccagactctgagtatcctgactggctgtggcacttgctcgacaagcgtcctgtactaagtgagctgcggaggaaagatcccaagacactctcttatgaagacctgaagcgttttgtcaagttggacaaccgatccaggatcaagataaggaatgacctcaatgctaagaactgacctggagtcttggacgaaacaggacctgctctactgttctttttattattaatataatactagacgacatgaataatttttctggagtttttggcaaaacatagcgacttgggatgttaaaatgttaagatgtgcttggtttgttactcttttaggcagcttacgacactggcatgctttttgttcttccatcttgggaaagatgcagctttgtgcccagtacttagcaaattatcaagttccatggttctgcagcattatctgacgtcccagcatacgattcagtcacggtttatgtatcttccagttcatctgaatctttctggggtattgtaagtttggattttcattgcctgtgttaattgggttttac

SEQ ID NO: 144917 - DNA, 1380 bp, Zea Mays
ttcccacccccagccggcgtcaccctcatgagccagccgccagccccaggcttctagcctctgtccaagccggcagcccgccacccgcgaggccgcgaccggcgaccgcccgcccctgacgtggtgactgcgtcctcctccgctctccgtgcgccaccctgaagcggtgaggcgaggacctccaggcaccgccctccctggttcggcggctccctcgaggccttcctccccaccggttcagcagctcccgatccgcacggccaaaggccgattcgcgctcctccagccttcctccgcgtccaacagcaagccaggaacagccctgtgaggagggggtgacgtgagagccgatagggacaaaaccgtggaggtggatcattgcaatagatgagatgttcatcatcatatagcatcgacaacatatatccgttcaataggtccttaagacagcttcaacaaagagatgtgggttgctacagataccgaaaaaggggggataaggattccaaaacactcggaggaaacatgtatatggggccatgtccaatcaagaaatacgaacaaacgtggcatcacaaagaaattttctctagtaagcaatgaaaaacttcaacccaagaatggcgatgtcttggacaagagggttaaagcatggtgttgttccgaggcatgccgctcaattggtagagagcagaagccttgcaattgcaagcaaggcgaagaagggtggaaaggctgatgctggcaaaactcctgctctcagccaagagctcaagagtacaacagtgttcggggcaaacatcttcaaggagggttctgatccgaaaatccaaccagactctgagtatcctgactggctgtggcacttgctcgacaagcgtcctgtactaagtgagctgcggaggaaagatcccaagacactctcttatgaagacctgaagcgttttgtcaagttggacaaccgatccaggatcaagataaggaatgacctcaatgctaagaactgacctggagtcttggacgaaacaggacctgctctactgttctttttattattaatataatactagacgacatgaataatttttctggagtttttggcaaaacatagcgacttgggatgttaaaatgttaagatgtgcttggtttgttactcttttaggcagcttacgacactggcatgctttttgttcttccatcttgggaaagatgcagctttgtgcccagtacttagcaaattatcaagttccatggttctgcagcattatctgacgtcccagcatacgattcagtcacggtttatgtatcttccagttcatctgaatctttctggggtattgtaagtttggattttcattgcctgtgttaattgggttttac

SEQ ID NO: 144918 - DNA, 2252 bp, Zea Mays
gtctcggcttgcctctccaaacctccgcatcctggaacccgccccgccacgccaccgccatctccccgcgccgccggcctaaaacctagccaagccatctcccccgcccgaaccttccaacgccggccgcttcctatctcaaccactcgccgctccgtctggtcttccttcacaccgattacgtggcgcacctactcgtgctcctcacctacgtctccagcgcttctgctctccgccgccacttccgtcgctcggtcaccgttgactgctgctacggctagctgggtgttaactgaatcgtaggaatttaggaatatagttggcacagcccgccacggcatggaggtcgacggcgaggcacaacatttccgcctcttctccaagagggccaagcccaagctcaagcccgaggtccagccccagccggagccggaacccccaagccgtgaccccgccgccgccgaagcctacctcgaccctgctcccacaatcgtgaccgagaccggccaggccgacgacgcggcggacgctgccggcacggcgccggcgaccttcgcggaccttggcctatcgcagtggctggtggatgcgtgcgaagccctgggcatgcggcgccccacggcggtgcagcgccggtgcattccgcgcgcgctcgcgggggcggacgtgctcgggatcgccgagacggggagcggcaagacggccgcgttcgcgctgcccatcctgcaccgcctcggggaggacccctatggcgtggccgcgctcgcgctcgcccccacgcgcgagctcgcggcgcagctcgccgagcagttccgcgcgctcggggcgccgctcggcctcaggtgcctcgcggccatcggaggattcgactcgctcgcgcaggccaaagggctctcgcgccgcccccacgtcgtcgtcgccaccccaggacgcattgcgacgctcgtcaaaaacgatcctgacctcgccaaagtattctcccgcacaaagtttcttgtgttggacgaggccgatagaattctagatgttaattttgaagaggaacttcgtgtcatatttggctgtctaccaaagaagcggcaaacctttttgttttcagcaacaatgtcagacaatctgagatctttgcttgaactttcggggaacaaatcatacttttttgaagcatacgaaggtttcaagacagtggagaccttaaagcaacaatacatccatgttcctccacagggaaaagagcttcatctttggcatcttttgtcagttatgaagggaaaaacggaagaccctattcgttcagccattgtatttgtctctacttgcaaagactgccaatatttagatctgctgctggaagaacttcgttatcctgcggttgctttgaactctcacaagtctcaggcacagcggctctcagcacttaaccggtttaaatccggtcaggttcctgtattgcttgccactgatgtgggcagtcgtgggttagatatccagacagttgatcttgttatcaactacgacatgccgatgtgtgtttatactttatactggatttatatgcaatatattaaaattgtttgtcaacactttttttgaactgtgtggctttaaacttcttgtttttacttgttgtaggtctccacgtgattacatccaccgggttggacgaactgcaagagcttcaaggggagggctcgctataagctttgttacacagaaggatatatgtcttttacacgagatagaagatgttgtggaaaagcagttggaggcctatgagtgcagtgataaagaagttactaaagatattacaaaggtgttcaaagcaatacgtctctcgaaaatgaggaggagggacgagggacatgatgagaaagtagaagcaagaaaagaacagaagagaagagatcgggcaagaaagaggaaacatgaagactaaaacccatagaaggacgaatgttgaaggccgctgtgcccgatctaaaacgttaaacatgagaggcagttgcttgttcagtctagcgagtagctttaacctggaggagtcgatgatgactcgctccagtgagcccattcagtcgactgctctcagttttgccggcgttgtgctgtggatgtataaatttagggggtggctcggcagatgtgccactgaattcgtggcgcagcagtaatggacgaaacttcaccattgcttgtcagtacttactttgttctaaaggaattataattctcgctctttgacgagttaatct

SEQ ID NO: 144919 - DNA, 129 bp, Zea Mays
caaaggggaaagtttaaggaacagcagttcgtccaaaaggtgcaagagatgcttgaagagcaagtgaagaagtgtattcatattgcgcaaggattgccatggactaccgatgaatccgaggtatgttta

SEQ ID NO: 144920 - DNA, 2268 bp, Zea Mays
atttcgcgcggcgccgacacaacacaacaaacacagaagacaggcagggcggcagcgcccacctccatctcccagccccgctccccaaatctcagccccgctccttcccagtcccagtcccagatccaggatgtcctcctccgacccggacgacgcccccgacgggggcgaggactcgcccctcttccgccgcagcggggggccgtcctccggcggcaccgttggcgacgtccccgtctcgcagtcgctcatcaaggcggcaagcaacgtgtgcttctccctcttcgtgctcgccgtccttgtcgtcaccgtcgtcgccgtcacataccagccgccggacccctggctccagtcctccgccgccatcaccacctcgctctcccgcgtcctccccaactccaccttcctcgtccccgacgactcgctcctccccaccggcgaggatttcaactcctccaccgccgtcccagccccggtgcgggatgacgatgacgcggctgcggccgtcagcgccgcctccgccgcggccgcgggcaacaggacctgcgacccggacgcgccgctgaactgctccgacccgcgcgtcctcgccgccgtcaaggcgttcaacgccagggccttcttccggaagtccatcgtgtttctcagctacgaggcgccggtgtccggccccaagcctggccagtgcgatgtcgcctggaggttccggaaccgccgggagaagtcgtggcgccgctacagggactaccgtcgcttcagcctcgcctcgggcgatggctgcgctcttgacatcgtcagcgtcggcaagttccgctcggggacgaatgcagctcgccggccgtatcctaagggctcgaagtcgaagaggccccgcgtgtcgccgccgcctgtcgatgcggagatcaatgacacaatccctgtcgtcggatcagaggcagagttcaagaagggaaagtacttgtactacatgagaggaggtgaccattgcaagagcatgaaccagttcgtctggagcttcttgtgtggactcggcgaagccaagttcctcaaccggacgttcgtgatggatctgaacatctgtttgtccggggcacacacggtcgacgggaaggatgtggatgggaaagatttccggtactatttcgatttcgagcacttgaaggagagtgtgccggtggtggaggaaggggacttcctgaaggattggaagcgttgggataagaagaagggcccaggacggatcacagtgcggaaggttccatcgtacaaggtaacaccaatgcagctgaagagggacaagagcaacatcatctggaggcaatttaatggccatgagcccgagaattactggtaccgagtttgcgaaggacgagctgccaaagtcatccaaaggccttggtatgctatctggaagtccaagagactgatgaacattgtgactgagattgcaggtaggatggattgggattacgacggtttacatgttgtccgagggtggaaggcgcagaacaagcaaatgtatccaaacctggattccgacacgtcgcctgatgcgctcgttgataaggtgaccaagcttgttaagccgatgagagatctctacatcgcaactaatgagccattctataactacttcgacaagctcaggtcacacttccatgtccatttgcttgatgattacaaggagctttggtcaaacactagtgaatggtacaacgagacaacaacacttagtcggggtaaaccagttccattcgacgcctacatgagggtgattgtggacactgaggtattttacagatcgaagacacaggttgagacgttcaacaacttgacaagggattgcaaagatggaatcaatacgtgcaacttgtgacacatgagttcacgcttcggatcatttgttggtgttcaatatacccttctagtggctggcacatcagaactcagtggaactcatccagggtttgtcttttggcattaccatcgttatgtatttcttgtcatggaatgtttagctggtttcatgtttatctgagttgtgtgctctccattttttttttcttttgtagtttatgtactactcttccagagtccagacgtccgaaaaatttgtatttagtgggcaatctgcaacatctatgctctctgtacccgcactaaattaagtgagaactatagcttcacctttacagtgtatctgttttcacgagtcacacgcttcttgcccgaatatttggaggaaatgaatttgtcagtgagcttata

SEQ ID NO: 144921 - DNA, 106 bp, Zea Mays
tgctctttccgttcttcgttgtagagtagtaaataaacgggctacttttatgccggttgtatgttcgggctgtattttgggtcttctgggccggcatcatcctgtc

SEQ ID NO: 144922 - DNA, 3343 bp, Zea Mays
ccgcgatcctcgcggttggcagaggacgcgccgaggtcaggaggaggccgagattgttcgactcccccacttgatctcttccttcccctctccctttgcctcgccagccatgacgggagcccccgctccagcagctgctcccggcgccgaagcaaccgcggcggcgtcaccggcgggcgagcgcgatgagcagctcgcgtgcgacgacgggttcgccggccgcgcctggacgtccggaggcgccgagcgtcgctgggaccgggagagacggtggcggagggcccgcggggggcgacgagcgtgcgctgctggtcgtgacgacgatgccgccggcgggcgccacggcggtgggggtggccgcgcccggcgtgcctgtggccgagacggagacgacaacgtgggcgcggtggacgtcgatgtcgtccgtgccgtgggcgaggctcgtgtttggattgctgctcctcgttctgctcggcttcgcgttcttcaagtggggcctcccgtttctctccgagaaggtgatgatgcttctcattctgactggtctcctattaggaaggaccgtttaatcatggcagttttttttttgtatcaattcctccggatcggccgagaactttggtcttctctctcggccagtccgaaggaattgtgcgtgcttaatctcacaatccagcagacaagtttcacatgtcatattatcaagcagatgatgggttatcacatcacaattgtcatgctagctgttactgtacttcagttttttcctcctaatttgtgcagcggatgacatttaagttttccgcaccatttgtcgtggtcatgctctgtgttctattttatgtgcgcttgacaatgcaggtgatcatgccaattattgaatgggaagcaaaatctttcggcctccccgtgttagcggtggtgatagtcgtttctctagcggtcttcccggtggtgttgctgccctccggtccaccaatgtggctaaccggaatagttttcggctacggtttcggcttcctgatcatcatggtcggggtgaccatcggcatgtctataccttactggatcggcctactgttccgcgaccgcctaaacctctggctggagaagaaatggccacggcagattgctctgatcaaactggtaggtcaagggagctggttccagcagttccgcgtggccgcgttgctcaggatctcgccgttcccatacgcgttgttcaactacgctgtaaccgtgacggagatgaagttcgtcccttacatatggggttcggttatcggaatggtgcctgatgtgttcatcaacatctacagtgggcggctgatacgcacgttggctgagctgaattatcggaagcaccggatgacagcagtcgagatagcgtacaacgctatatctgtaattgttaccgtcgtctttgcgattgtatttacagtatacgcaagacgagccctggacaacatggaacagtccgaagtcgcctgcgctgaacctgtcgtcggtgaccctgctggatcgaccgagtccagggatcaccttcagggatgttcgactgcacgttctgtaccaatcgatgttgtgtaatgacacaggtacagtacacgtctaaacgactggttgacttaaagttcctttgttgtacatacaacacgatagatcggtagaagggagatcttaacaatgtgtgtaattgttacgtactactgtaagtctgtaaatatgttatgacctgatgctgtgttcagccacacgcatgttgtgtgattgttgttgcttcacagtgatcagggttcagacatgcatactacataaggctatctcgagcagtttcacctatcacatatcttatttgctatttccgtggtactcaaaaatagcttcttccggactcaaaaagccagaccgctgcctatttccgtggccgcagattaccaccaggagaccgacttcgtgatggatcggaattgtcgccagtcttctccgccaaacaagctttcccgagtttaaaaaaaaagacgatgtcgttgcgccttcgagttggaggcgatcgctccggctgtcagctcgtcgaagaccccacgaacgaaatagtccctcgtgctctcctccgcccaagcctcccgccaacactccgtaacccctgaaggatgaacacaagtcaaaattgcagcgaaggccaaccaatgagcgtgtagatgtggcattgtgtaatagcctaggcgaatatggagtgcagtgcaggatctgaagagtggcagaggaacaccattctgaccaagaacaccttagacatgacccagccctgcttttgctggagtcgtcggcaggcaccgaccgagcttgatcagcctcatctccaacagaagcgtaatgcgcagacctgtcgggacaaaatgtcagtgaaatggacattggtggtgtggtgggcattcagagtaggaaatccaaggacctggatcctgtttcaaagaaattgtacagcgcggcctcttgtttcttttccattcaaggccgggtcgcggcatgttcggcgttgttttaaaacgtttgcaggagtacttggagggtacagtacagtacagtcttgcaatgcaagataggtagcatgcatgccatgtgcaatggcgtactagcagaagccaaagccatacatgcatcatgcatgggcacggcgtggggggaattgtagtagtgatcggtacaatcatagtacgccagagccggcgccggagaggctcctgtcaaggtagaagccccgcggcctggagctcctgctgctgctgccgcagtgcggcgacagcacggggagcccccactgggaggagaagacgatggcggggcagtccgcagcggccaccgccgccgcgagcagacgccgcacgacctccgcgaccagcgcggcaacccggcgcgcgggaagcaggagcagcagccgaaccaggcgcagccgcagccgcttgccgccgccgttggcagtcgtggtggtggccccccatctccctcccgccttgcacgccctccgccgcagccgcagccgcagcggccgcctcgccctgacgcttgctcccgtcgacggcgacgagccgccgagctcgccgccgcgcagccgctggtaccggcacgcggagcgcggcagcaggcggtccctcgccgtgagcacctcgagaaggcccatgtgagctaggtagctagaggtgtgacggctatctgggtgacgaagagcgagtcggtgccgagctcggtgattagctgtaggaggaggaggaggaggaggaggatatggaacgtacgtgcgtatatataaccgaaaccgtggacgtggaacggcggcgcggcg

SEQ ID NO: 144923 - DNA, 3063 bp, Zea Mays
cacttttggatcttttcggcccttataggcggccacctaccttttcccttgcaccaccagccgcgatcctcgcggttggcagaggacgcgccgaggtcaggaggaggccgagattgttcgactcccccacttgatctcttccttcccctctccctttgcctcgccagccatgacgggagcccccgctccagcagctgctcccggcgccgaagcaaccgcggcggcgtcaccggcgggcgagcgcgatgagcagcagctcgcgtgcgacgacgggttcgccggccgcgcctggacgtccggaggcgccgagcgtcgctgggaccgggagagacggtggcggagggcccgcggggggcgacgagcgtgcgctgctggtcgtgacgacgatgccgccggcgggcgccacggcggtgggggtggccgcgcccggcgtgcctgtggccgagacggagacgacaacgtgggcgcggtggacgtcgatgtcgtccgtgccgtgggcgaggctcgtgtttggattgctgctcctcgttctgctcggcttcgcgttcttcaagtggggcctcccgtttctctccgagaaggtgatcatgccaattattgaatgggaagcaaaatctttcggcctccccgtgttagcggtggtgatagtcgtttctctagcggtcttcccggtggtgttgctgccctccggtccaccaatgtggctaaccggaatagttttcggctacggtttcggcttcctgatcatcatggtcggggtgaccatcggcatgtctataccttactggatcggcctactgttccgcgaccgcctaaacctctggctggagaagaaatggccacggcagattgctctgatcaaactggtaggtcaagggagctggttccagcagttccgcgtggccgcgttgctcaggatctcgccgttcccatacgcgttgttcaactacgctgtaaccgtgacggagatgaagttcgtcccttacatatggggttcggttatcggaatggtgcctgatgtgttcatcaacatctacagtgggcggctgatacgcacgttggctgagctgaattatcggaagcaccggatgacagcagtcgagatagcgtacaacgctatatctgtaattgttaccgtcgtctttgcgattgtatttacagtatacgcaagacgagccctggacaacatggaacagtccgaagtcgcctgcgctgaacctgtcgtcggtgaccctgctggatcgaccgagtccagggatcaccttcagggatgttcgactgcacgttctgtaccaatcgatgttgtgtaatgacacaggtacagtacacgtctaaacgactggttgacttaaagttcctttgttgtacatacaacacgatagatcggtagaagggagatcttaacaatgtgtgtaattgttacgtactactgtaagtctgtaaatatgttatgacctgatgctgtgttcagccacacgcatgttgtgtgattgttgttgcttcacagtgatcagggttcagacatgcatactacataaggctatctcgagcagtttcacctatcacatatcttatttgctatttccgtggtactcaaaaatagcttcttccggactcaaaaagccagaccgctgcctatttccgtggccgcagattaccaccaggagaccgacttcgtgatggatcggaattgtcgccagtcttctccgccaaacaagctttcccgagtttaaaaaaaaagacgatgtcgttgcgccttcgagttggaggcgatcgctccggctgtcagctcgtcgaagaccccacgaacgaaatagtccctcgtgctctcctccgcccaagcctcccgccaacactccgtaacccctgaaggatgaacacaagtcaaaattgcagcgaaggccaaccaatgagcgtgtagatgtggcattgtgtaatagcctaggcgaatatggagtgcagtgcaggatctgaagagtggcagaggaacaccattctgaccaagaacaccttagacatgacccagccctgcttttgctggagtcgtcggcaggcaccgaccgagcttgatcagcctcatctccaacagaagcgtaatgcgcagacctgtcgggacaaaatgtcagtgaaatggacattggtggtgtggtgggcattcagagtaggaaatccaaggacctggatcctgtttcaaagaaattgtacagcgcggcctcttgtttcttttccattcaaggccgggtcgcggcatgttcggcgttgttttaaaacgtttgcaggagtacttggagggtacagtacagtacagtcttgcaatgcaagataggtagcatgcatgccatgtgcaatggcgtactagcagaagccaaagccatacatgcatcatgcatgggcacggcgtggggggaattgtagtagtgatcggtacaatcatagtacgccagagccggcgccggagaggctcctgtcaaggtagaagccccgcggcctggagctcctgctgctgctgccgcagtgcggcgacagcacggggagcccccactgggaggagaagacgatggcggggcagtccgcagcggccaccgccgccgcgagcagacgccgcacgacctccgcgaccagcgcggcaacccggcgcgcgggaagcaggagcagcagccgaaccaggcgcagccgcagccgcttgccgccgccgttggcagtcgtggtggtggccccccatctccctcccgccttgcacgccctccgccgcagccgcagccgcagcggccgcctcgccctgacgcttgctcccgtcgacggcgacgagccgccgagctcgccgccgcgcagccgctggtaccggcacgcggagcgcggcagcaggcggtccctcgccgtgagcacctcgagaaggcccatgtgagctaggtagctagaggtgtgacggctatctgggtgacgaagagcgagtcggtgccgagctcggtgattagctgtaggaggaggaggaggaggaggaggatatggaacgtacgtgcgtatatataaccgaaaccgtggacgtggaacggcggcgcggcg

SEQ ID NO: 144924 - DNA, 570 bp, Zea Mays
gccagagccggcgccggagaggctcctgtcaaggtagaagccccgcggcctggagctcctgctgctgctgccgcagtgcggcgacagcacggggagcccccactgggaggagaagacgatggcggggcagtccgcagcggccaccgccgccgcgagcagacgccgcacgacctccgcgaccagcgcggcaacccggcgcgcgggaagcaggagcagcagccgaaccaggcgcagccgcagccgcttgccgccgccgttggcagtcgtggtggtggccccccatctccctcccgccttgcacgccctccgccgcagccgcagccgcagcggccgcctcgccctgacgcttgctcccgtcgacggcgacgagccgccgagctcgccgccgcgcagccgctggtaccggcacgcggagcgcggcagcaggcggtccctcgccgtgagcacctcgagaaggcccatgtgagctaggtagctagaggtgtgacggctatctgggtgacgaagagcgagtcggtgccgagctcggtgattagctgtaggaggaggaggaggaggaggaggatatgg

SEQ ID NO: 144925 - DNA, 1496 bp, Zea Mays
ctcgcggttggcagaggacgcgccgaggtcaggaggaggccgagattgttcgactcccccacttgatctcttccttcccctctccctttgcctcgccagccatgacgggagcccccgctccagcagctgctcccggcgccgaagcaaccgcggcggcgtcaccggcgggcgagcgcgatgagcagcagctcgcgtgcgacgacgggttcgccggccgcgcctggacgtccggaggcgccgagcgtcgctgggaccgggagagacggtggcggagggcccgcggggggcgacgagcgtgcgctgctggtcgtgacgacgatgccgccggcgggcgccacggcggtgggggtggccgcgcccggcgtgcctgtggccgagacggagacgacaacgtgggcgcggtggacgtcgatgtcgtccgtgccgtgggcgaggctcgtgtttggattgctgctcctcgttctgctcggcttcgcgttcttcaagtggggcctcccgtttctctccgagaaggtgatcatgccaattattgaatgggaagcaaaatctttcggcctccccgtgttagcggtggtgatagtcgtttctctagcggtcttcccggtggtgttgctgccctccggtccaccaatgtggctaaccggaatagttttcggctacggtttcggcttcctgatcatcatggtcggggtgaccatcggcatgtctataccttactggatcggcctactgttccgcgaccgcctaaacctctggctggagaagaaatggccacggcagattgctctgatcaaactggtaggtcaagggagctggttccagcagttccgcgtggccgcgttgctcaggatctcgccgttcccatacgcgttgttcaactacgctgtaaccgtgacggagatgaagttcgtcccttacatatggggttcggttatcggaatggtgcctgatgtgttcatcaacatctacagtgggcggctgatacgcacgttggctgagctgaattatcggaagcaccggatgacagcagtcgagatagcgtacaacgctatatctgtaattgttaccgtcgtctttgcgattgtatttacagtatacgcaagacgagccctggacaacatggaacagtccgaagtcgcctgcgctgaacctgtcgtcggtgaccctgctggatcgaccgagtccagggatcaccttcagggatgttcgactgcacgttctgtaccaatcgatgttgtgtaatgacacaggtacagtacacgtctaaacgactggttgacttaaagttcctttgttgtacatacaacacgatagatcggtagaagggagatcttaacaatgtgtgtaattgttacgtactactgtaagtctgtaaatatgttatgacctgatgctgtgttcagccacacgcatgttgtgtgattgttgttgcttcacagtgatcagggttcagacatgcatactacataaggctatctcgagcagtttcacctatc

SEQ ID NO: 144926 - DNA, 1517 bp, Zea Mays
cgatcctcgcggttggcagaggacgcgccgaggtcaggaggaggccgagattgttcgactcccccacttgatctcttccttcccctctccctttgcctcgccagccatgacgggagcccccgctccagcagctgctcccggcgccgaagcaaccgcggcggcgtcaccggcgggcgagcgcgatgagcaggcaagcacgtcagtacgccagctcgcgtgcgacgacgggttcgccggccgcgcctggacgtccggaggcgccgagcgtcgctgggaccgggagagacggtggcggagggcccgcggggggcgacgagcgtgcgctgctggtcgtgacgacgatgccgccggcgggcgccacggcggtgggggtggccgcgcccggcgtgcctgtggccgagacggagacgacaacgtgggcgcggtggacgtcgatgtcgtccgtgccgtgggcgaggctcgtgtttggattgctgctcctcgttctgctcggcttcgcgttcttcaagtggggcctcccgtttctctccgagaaggtgatcatgccaattattgaatgggaagcaaaatctttcggcctccccgtgttagcggtggtgatagtcgtttctctagcggtcttcccggtggtgttgctgccctccggtccaccaatgtggctaaccggaatagttttcggctacggtttcggcttcctgatcatcatggtcggggtgaccatcggcatgtctataccttactggatcggcctactgttccgcgaccgcctaaacctctggctggagaagaaatggccacggcagattgctctgatcaaactggtaggtcaagggagctggttccagcagttccgcgtggccgcgttgctcaggatctcgccgttcccatacgcgttgttcaactacgctgtaaccgtgacggagatgaagttcgtcccttacatatggggttcggttatcggaatggtgcctgatgtgttcatcaacatctacagtgggcggctgatacgcacgttggctgagctgaattatcggaagcaccggatgacagcagtcgagatagcgtacaacgctatatctgtaattgttaccgtcgtctttgcgattgtatttacagtatacgcaagacgagccctggacaacatggaacagtccgaagtcgcctgcgctgaacctgtcgtcggtgaccctgctggatcgaccgagtccagggatcaccttcagggatgttcgactgcacgttctgtaccaatcgatgttgtgtaatgacacaggtacagtacacgtctaaacgactggttgacttaaagttcctttgttgtacatacaacacgatagatcggtagaagggagatcttaacaatgtgtgtaattgttacgtactactgtaagtctgtaaatatgttatgacctgatgctgtgttcagccacacgcatgttgtgtgattgttgttgcttcacagtgatcagggttcagacatgcatactacataaggctatctcgagcagtttcaccta

SEQ ID NO: 144927 - DNA, 1507 bp, Zea Mays
cgatcctcgcggttggcagaggacgcgccgaggtcaggaggaggccgagattgttcgactcccccacttgatctcttccttcccctctccctttgcctcgccagccatgacgggagcccccgctccagcagctgctcccggcgccgaagcaaccgcggcggcgtcaccggcgggcgagcgcgatgagcaggcaagcaccagctcgcgtgcgacgacgggttcgccggccgcgcctggacgtccggaggcgccgagcgtcgctgggaccgggagagacggtggcggagggcccgcggggggcgacgagcgtgcgctgctggtcgtgacgacgatgccgccggcgggcgccacggcggtgggggtggccgcgcccggcgtgcctgtggccgagacggagacgacaacgtgggcgcggtggacgtcgatgtcgtccgtgccgtgggcgaggctcgtgtttggattgctgctcctcgttctgctcggcttcgcgttcttcaagtggggcctcccgtttctctccgagaaggtgatcatgccaattattgaatgggaagcaaaatctttcggcctccccgtgttagcggtggtgatagtcgtttctctagcggtcttcccggtggtgttgctgccctccggtccaccaatgtggctaaccggaatagttttcggctacggtttcggcttcctgatcatcatggtcggggtgaccatcggcatgtctataccttactggatcggcctactgttccgcgaccgcctaaacctctggctggagaagaaatggccacggcagattgctctgatcaaactggtaggtcaagggagctggttccagcagttccgcgtggccgcgttgctcaggatctcgccgttcccatacgcgttgttcaactacgctgtaaccgtgacggagatgaagttcgtcccttacatatggggttcggttatcggaatggtgcctgatgtgttcatcaacatctacagtgggcggctgatacgcacgttggctgagctgaattatcggaagcaccggatgacagcagtcgagatagcgtacaacgctatatctgtaattgttaccgtcgtctttgcgattgtatttacagtatacgcaagacgagccctggacaacatggaacagtccgaagtcgcctgcgctgaacctgtcgtcggtgaccctgctggatcgaccgagtccagggatcaccttcagggatgttcgactgcacgttctgtaccaatcgatgttgtgtaatgacacaggtacagtacacgtctaaacgactggttgacttaaagttcctttgttgtacatacaacacgatagatcggtagaagggagatcttaacaatgtgtgtaattgttacgtactactgtaagtctgtaaatatgttatgacctgatgctgtgttcagccacacgcatgttgtgtgattgttgttgcttcacagtgatcagggttcagacatgcatactacataaggctatctcgagcagtttcaccta

SEQ ID NO: 144928 - DNA, 1839 bp, Zea Mays
cgatcctcgcggttggcagaggacgcgccgaggtcaggaggaggccgagattgttcgactcccccacttgatctcttccttcccctctccctttgcctcgccagccatgacgggagcccccgctccagcagctgctcccggcgccgaagcaaccgcggcggcgtcaccggcgggcgagcgcgatgagcagctcgcgtgcgacgacgggttcgccggccgcgcctggacgtccggaggcgccgagcgtcgctgggaccgggagagacggtggcggagggcccgcggggggcgacgagcgtgcgctgctggtcgtgacgacgatgccgccggcgggcgccacggcggtgggggtggccgcgcccggcgtgcctgtggccgagacggagacgacaacgtgggcgcggtggacgtcgatgtcgtccgtgccgtgggcgaggctcgtgtttggattgctgctcctcgttctgctcggcttcgcgttcttcaagtggggcctcccgtttctctccgagaaggtgatgatgcttctcattctgactggtctcctattaggaaggaccgtttaatcatggcagttttttttttgtatcaattcctccggatcggccgagaactttggtcttctctctcggccagtccgaaggaattgtgcgtgcttaatctcacaatccagcagacaagtttcacatgtcatattatcaagcagatgatgggttatcacatcacaattgtcatgctagctgttactgtacttcagttttttcctcctaatttgtgcagcggatgacatttaagttttccgcaccatttgtcgtggtcatgctctgtgttctattttatgtgcgcttgacaatgcaggtgatcatgccaattattgaatgggaagcaaaatctttcggcctccccgtgttagcggtggtgatagtcgtttctctagcggtcttcccggtggtgttgctgccctccggtccaccaatgtggctaaccggaatagttttcggctacggtttcggcttcctgatcatcatggtcggggtgaccatcggcatgtctataccttactggatcggcctactgttccgcgaccgcctaaacctctggctggagaagaaatggccacggcagattgctctgatcaaactggtaggtcaagggagctggttccagcagttccgcgtggccgcgttgctcaggatctcgccgttcccatacgcgttgttcaactacgctgtaaccgtgacggagatgaagttcgtcccttacatatggggttcggttatcggaatggtgcctgatgtgttcatcaacatctacagtgggcggctgatacgcacgttggctgagctgaattatcggaagcaccggatgacagcagtcgagatagcgtacaacgctatatctgtaattgttaccgtcgtctttgcgattgtatttacagtatacgcaagacgagccctggacaacatggaacagtccgaagtcgcctgcgctgaacctgtcgtcggtgaccctgctggatcgaccgagtccagggatcaccttcagggatgttcgactgcacgttctgtaccaatcgatgttgtgtaatgacacaggtacagtacacgtctaaacgactggttgacttaaagttcctttgttgtacatacaacacgatagatcggtagaagggagatcttaacaatgtgtgtaattgttacgtactactgtaagtctgtaaatatgttatgacctgatgctgtgttcagccacacgcatgttgtgtgattgttgttgcttcacagtgatcagggttcagacatgcatactacataaggctatctcgagcagtttcaccta

SEQ ID NO: 144929 - DNA, 762 bp, Zea Mays
cgatcctcgcggttggcagaggacgcgccgaggtcaggaggaggccgagattgttcgactcccccacttgatctcttccttcccctctccctttgcctcgccagccatgacgggagcccccgctccagcagctgctcccggcgccgaagcaaccgcggcggcgtcaccggcgggcgagcgcgatgagcaggcaagcacgtcagtacgcgtgcgggtctccgctattcctttcccttccctctgtccttcattctcattcggtcccgtccccgcgccgcgtggcgtggtggtggtggtggtctgattggggcgccatgcgcgcgcgtgcctattggttttcagcagctcgcgtgcgacgacgggttcgccggccgcgcctggacgtccggaggcgccgagcgtcgctgggaccgggagagacggtggcggagggcccgcggggggcgacgagcgtgcgctgctggtcgtgacgacgatgccgccggcgggcgccacggcggtgggggtggccgcgcccggcgtgcctgtggccgagacggagacgacaacgtgggcgcggtggacgtcgatgtcgtccgtgccgtgggcgaggctcgtgtttggattgctgctcctcgttctgctcggcttcgcgttcttcaagtggggcctcccgtttctctccgagaaggtgatgatgcttctcattctgactggtctcctattaggaaggaccgtttaatcatggcagttttttttttgtatcaattcctccggatcggc

SEQ ID NO: 144930 - DNA, 2406 bp, Zea Mays
aaaaaaactgccatgacagcccagtccatccaacgcaacgcagctgtggcctgtgtctgtctgcgccgtctgtctgcgccgcgcctcgccttcctctcccgccgccgtcgtggtcgtggacgccatgggccgaggccgcaaccgcaagccccgcaacttcgccacgttccgcctctgcccgcgccccggggctgccgatgcctccgaacgcgtcttcgtacgcgtcgacgacaacccctactccgtccccgggttcgcagacgatgatggtctctcgtcctccaccgccgtcaggggagacggcggcgagcccgacccgtcctcctccacctcgaccgacgagggcgggtcccccctgcccgagcacgtccgccgagagatcatggagctcggcctccccgacgacggctacgactacctcgcccacctccgcgagctccgcccctccctctcctccaccggcggcgggggttcttcggccgtattcctccccagccgccgcctcgcacgctccggccttcccgtggacgtgaaggcgtacgacttcactagtaccccgcttggttccggggaggttgcggtggtcgcggctagtcgggctgaggaggctattgacctggatgtcaccaggctgcttgacgggagcgattcgacggccgttgagtcgggggatgaggatttggaggaggactttgttatccttgcgaatgagccagatgagaagcaggagagcgaggaagagaatgttgctggaagcaaggagaaagctctgcagctgcctggcgatcagtttgtttcgcttgctttcgaagaatatgcggacagtggagttggttgttgtgttcaagatgcaaagcatgaactgtcccaggaggttacagataaactgaaaccgcctcacagcgaaaccttcgatgctgataaaagatgcagggcacccacaccacaatatgttgctcaccggatactagagtcaaacgagcaaattgatgcgtcttctaatgccatctccgaacatgttcagtacgctgaaacatatgaagtcagcgaagaagaacaagcgattcttgctccagaaagtagcaaggggtctgcggttatgtactctactgccacggtttctggatcatatctcgatgttaaattgaagtttccaaaacattcccctggagaaacaagtatgaaaaaatccatcatcagaaaaggaatagagaagcttcctgcagggtattcacctcagaggaacactccgactggtgaaactaaacagggaccctacaaaggaacgagacaggaagggacagaaagctagatccaggaccagacctactgcgttttaaaaaaaatgttttaaagaagcagatcatcgagggtgtgttgttcggcttcgttatcaactgaccatgggcttccaccggatgcttaatacaatgatatttactggcgtggcttcccttttttttctaaaggaacttcttttcttgggatctcccttttatgctttccatgccatcattggtaccgataattttgtctcctaggctacaatggaagatcatgccatcattgttactcataattttgtctcctaggctacattgaaagatcaaagtatgcactcatactcactggaccatgttttgtacatcttatgtatgtatttgttatgtaaatctgaaacttgaaccgtgtactttcaagcttgaagagaactgtagaagcgaaaagatggacgccatattgtacagagctgttaatagtttgacgtgaggttttatctcaaggattgtaggctgacattagattgcacgttttaggggtggctatatttgtagggctgctggtcatctgattggaatcggaatcaggcactagactatcacttgtcatcccaatgcagaccagatgtattgtcacccaaatgtctgctgaggaggaaacagtgaaaagaaacaaagatgtactgggtagctgaagggactacagtggcgagcttggttgaaaccaaaagatggttctgctaactggagatttgacggcagtgtaccatggaaggtactatcaactgctggaaaccatccagatcactgtcagacgtgccagtagtacaaggttcagatccgctacgttttgtttcatgagatgagatgggactggaactggtgtgcgtgctgtgcatcagtgcatgagatatatagaacgtagaggtggtgcagtgatgcatctgcacgactgcaccgtacctatagggatgatcggtgctttgtaactttaaaatacgggaattcttctctttttttttgaaaataaactgattccgttaaaatttctgcattccaaaagggccctagagcctattctagtcgcctttcatggtttctgttaggctccaatcattcggtgcag

SEQ ID NO: 144931 - DNA, 1190 bp, Zea Mays
atccaacgcaacgcagctgtggcctgtgtctgtctgcgccgtctgtctgcgccgcgcctcgccttcctctcccgccgccgtcgtggtcgtggacgccatgggccgaggccgcaaccgcaagccccgcaacttcgccacgttccgcctctgcccgcgccccggggctgccgatgcctccgaacgcgtcttcgtacgcgtcgacgacaacccctactccgtccccgggttcgcagacgatgatggtctctcgtcctccaccgccgtcaggggagacggcggcgagcccgacccgtcctcctccacctcgaccgacgagggcgggtcccccctgcccgagcacgtccgccgagagatcatggagctcggcctccccgacgacggctacgactacctcgcccacctccgcgagctccgcccctccctctcctccaccggcggcgggggttcttcggccgtattcctccccagccgccgcctcgcacgctccggccttcccgtggacgtgaaggtccatccgtatctgcttccatcagcatcccgcgctgtttcgtgtgccttccgaggtgcctaactcgttcgcgcgtcgtgcaggcgtacgacttcactagtaccccgcttggttccggggaggttgcggtggtcgcggctagtcgggctgaggaggctattgacctggatgtcaccaggctgcttgacgggagcgattcgacggccgttgagtcgggggatgaggatttggaggaggactttgttatccttgcgaatgagccagatgagaagcaggagagcgaggaagagaatgttgctggaagcaaggagaaagctctgcagctgcctggcgatcagtttgtttcggtgagctcagcgtctgcttcatgatcatactgtctgcgaagaaagagctgttgatctacctgcaatgagtcactctactagctctgctcactgcagatatcaaatagcacgtttgctgtttaacctctgaatttcctcatgtcaacacttcagtgactaagcttccatcactaatctaacatggatgtgagattcttgcattctaactttttgggtttgcttgtgagcattcacgtgcgcagatttgacattatttctacttgtgattcaaattccatacggaatacattgatctgttgaccttttattcacctgcaaaccagtgttcaaggttt

SEQ ID NO: 144932 - DNA, 1280 bp, Zea Mays
aaaaccgtctttccttcggtcaccttgtgtatttctatttggatgaatggaaatagcgcaatgtcttcgtgtaaaaaaaacaatggtagtaacataacagtgagacatttaaaaaacagagaactcaagcacttttcaatagactttggatagcatttgccgaactcgtcaaaaataccgtaaagctctagtaatacagccattattggctagcatgccgctgatctctactatgctccaaccttcttcctcagctcatcaagaatggacgggaactgctgcgacagctgagcaaaaccatccgttaacacagccttcgtcttgaagcccttcccctccccgaagaacccaatgcacttccttttcagctgtgggcagttatatatttcggcacagatcaacgtagcagaaactgtatccaccgagacattattccacagcttgctcgcgcacaggatcttcaagcgatccaactggaaccggtcagcagcagcgagcaggtcctgaaacgcctcgctgggggcttcttcaggacacgcatcggtgtacacgaagcggagcatggccttgaacgtcgctgccgtgatgccatgcaaggtgatggacgacatggtggcttccgccatggagccgaagaactgcgccttgaagaccggcgagcgggcggcaagcacggcccggtgagcagcgaacctctcgccgccgacaacgaacgaaacgtcggaaccgtccgtggagcccagcaggaggccgccgagatggatcccgaggttggagggcggcacgtcgagagggtcctcctgcaaaactttgacggctcccacgatgacgaacgagccagaattcgtcacgtagaacgactgtaggacgcttcgctccacgaagcaaggccaaccatggatgtgcctgccgccggccttgggtgagaaaacgtgcaccagctttttcttatgggccaaagatggagtgccttctttgtacattacaaaggcctcgaagacagctttgacgtctttggattcgctctcatgacagaggtatatagataggtactcaacgttgctctctttcatacctccgatcctacgcgggaagcagatgatcctccagaggtgcccaccggcgaggatttgctccgacctgactgagtgctcgacggcgaccttctccgtctccacatagttgatcttgaatttatgtgtgaaacaggaactgatgagcacgctgtcactcatgtctacagtagctggatgctggggcaggaggccggccatagatac

SEQ ID NO: 144933 - DNA, 1193 bp, Zea Mays
gcaggcgcaaaagccatcaacctgtgcagctacaggacagcgtgcttgtgagtggctgttagggtgattgcgttgcgttgcgttgcgttgcagtgcagaggacactgacggacggcgaagaatcgaagatggaggcgtacgctgctggagccaagttcgactgcttgctgttcgacatggacgacactctgtacccgctgagccttggcatcaacctagcatgccgcaagaacatacaggagtacatgctgaacaagctgcggatcgaggagagccaggtccccaggatgtgcctggacctgtacagggagtatggaaccacaatggccggcctcaaggttttggggtacggtttcgactacgacgacttccacgcctgcgtgcacgggacgctgccgtacgagaaggtgaagcctgacccggtgctcaggcagctgctgctttccctgccgcagaggaagatcatcttcaccaactccgacaaggcccacgcggccagagtcctggagaagctcggcctccaggactgcttccaagggatcgtctgcttcgagaccctcaacccgcgaccaccaaccgagaccgagaagaacagtagtggcagtgctgggacgatcctgtgcaagccctcgctggcgtccatggaagccgtcatcgagatcgccaagctcgacgccgagagaacggtgttctttgacgacagcgcgcgcaacatcgccgcagggaaggccgccggtttccgcaccgtcatcgtggggagctcggcgctggtgccaggggcggacgtggcgctggagagcatccacaacatcaaggaggcgctgccggagctctgggaggttgccgccgccgctgccgccggcgaccgcgtcgacgccgtcctccggtccaccaccgccgtggagaccacagtgattgcctgagcaataataccatgtgacattaaccgtcacggactcaaggtcacggccacgtaatataatgctgccgtgtagtatttctcgtgcctgattaagtaccgaccgaggtaactaatactactgtatgtaccagaccagaactttacggttacgggtaataaggtttgtatagctcatccctgtcggcccgtgcttttttatggcgcggtccgtggtgcaaatggatgccacgtactgaatgcaaatatatataaaaaatgctttgtccatctc

SEQ ID NO: 144934 - DNA, 825 bp, Zea Mays
gcaggcgcaaaagccatcaacctgtgcagctacaggacagcgtgcttgtgagtggctgttagggtgattgcgttgcgttgcgttgcgttgcagtgcagaggacactgacggacggcgaagaatcgaagatggaggcgtacgctgctggagccaagttcgactgcttgctgttcgacatggacgacactctgtacccgctgagccttggcatcaacctagcatgccgcaagaacatacaggagtacatgctgaacaagctgcggatcgaggagagccaggtccccaggatgtgcctggacctgtacagggagtatggaaccacaatggccggcctcaaggttttggggtacggtttcgactacgacgacttccacgcctgcgtgcacgggacgctgccgtacgagaaggtgaagcctgacccggtgctcaggcagctgctgctttccctgccgcagaggaagatcatcttcaccaactccgacaaggcccacgcggccagagtcctggagaagctcggcctccaggactgcttccaagggatcgtctgcttcgagaccctcaacccgcgaccaccaaccgagaccgagaagaacagtagtggcagtgctgggacgatcctgtgcaagccctcgctggcgtccatggaagccgtcatcgagatcgccaagctcgacgccgagagaacggtacggacggtagcacactggcactagcacgtcggtcggtccacaaccaaaccacagtgctcgcttgcttgcttgcatcttcatctccattctccaccgagactcaactgaacctgaacccacccaccactcccgtacg

SEQ ID NO: 144935 - DNA, 745 bp, Zea Mays
tccaagaaactgagcgtgttacgtgtgaaatcaagtactagtgatgagataaattactatttttatccttctctcagctccacatcagctagctatttgagacaaccatcgcgaacacgcccttagacctttagagctcaaaagtaagctttactccaaagcttttagagctctatagtctagaggagtggatctaaacaggccctaagcaagcacaagacaagatatccaaatttgcactacacagtgactatccaccttgcagttctttgccgaacaacagtttcaatctacactcctcgatcacattatcgtatctgcactacgcaatgtcacttgctggaaatgttacattgatatattcatacctgacgacgttttatctaaatcctgccggacattgattatctgtgttagctatctctcattccttccgctgtctttcctggccgaccctcttttgctgatgcatttgttgttttcgtttcgtgatgatgatacagtgtgtagactgcaactgcgcctgggactgaagacctgcagaaaccaacgcatcagccgcatctttcattcgtcagtagcttccgggcttgtctgtgacatctgctgtgatgagaagccattcttttttttttcttttatttcttcatgggttttgtactctggtatctacatcccactcggacaaaacgtgaaggttgacttggttggctgattgattgtcacacgaatcttcttgactgcc

SEQ ID NO: 144936 - DNA, 411 bp, Zea Mays
gatagcttcttggtttctttgggacattcccctgtttgcagcttcatagtactggaccctatccgacagccttgcaatctcgaagttctttgcggcaatcacggtttccatctctgattcaacttcagcacgagcaaaatcctaggaaatagcaacggctacaagttgtgaaacagttatttgctggcacaactcagctccaggattgatgcttgaatcatcagtatcctcagctatacttggagatggaagtgataaggcaacatgtgataggtggtgactcagcttcttccattctttctaccatatctcaagtgcttcttctgcttgcttcctcctctcaatttcggtcaacaggcttaacctcatttcacggaggtcatcatccttggcccgtgaagatcgagttcc

SEQ ID NO: 144937 - DNA, 879 bp, Zea Mays
cgtgcaaaacgaacagaattacatccccgattggatggatcattcatcatcatcatcgcacacagctaataaataaaagaaactggccgggccggggatctgctgtatgcatggcctgccactgtggcaccacctacttgttgcccatcatggaatggagatggatgatgaggtcctcctcttcctgcgagaacgctcccctcttgaggtccggcctgaggtagttgatccacctcagcctgcagctcttcccacacctctctagacctaatgcacacgcaagcatgcaaaaataaacagcatcatcaccataacgattaacgaattgccatcaattcaactctgcgactgctagcaaccaatgcaatgcatcttcgcagcttttttctctccttaatttatataaaaacttgggtacaatccaagaaactttgacagtaggcattattaattgctttatgagaggcggatcggagcagatcgaattaacatattctaataaggtgtctacatggaaaatatatatactagtagcttagctctgctagtagcccaataccactactacctgctagcttggggacggaactccagcagccgtggccatacttggcaatgtggttgacgagcttatcgtcctcctccggcgaccagaggcccctcctcagcttcttcttggggccgctcgtccgcctcgccatgccgcgcgcgcccgaggtatgtagcttgctagctagcaagctgccgtgcaaagggtgggagactagcactagccagttacctcaatggcgcgttatgcgcgcggcagttgtttgcttgcaactgcccgccggaacaacgaagctctcgctggccctgggaaggaagacgacagcgagg

SEQ ID NO: 144938 - DNA, 2020 bp, Zea Mays
gtgagaaacttcccatttttaattgactttggtggcaaaataggaccacgttttcaacccaatctaaggtcgttgggccaaatcagtttcgttccttttccctttctaataacatctgttccggcctggtccatactacaagcccatcagccccgagccacgatcagaccattcgtcactcactaaacccttttgccctaaaccctaaacaagaagctacccgccttccccaccccaacccccaatcctgccgcggtgccgccatgtcgtccacgccgccggccgtcgcgtcccccgcctccgagcaaacaaaatccaagaagaagaagcacaagtccaaggatctccccgccactgacccgccatcgctcgccgaggctgaggagaagactgatggctacctaatcaagccccagtccctggtgccgtccctggacacctcgacctggccgctcctcctcaagaactacgaccgcctcaacgtccggactggacactacaccccgctcccctccggccactcgccgctgaagcgccccctcgccgagcatctccgctacggcgtcatcaacctcgacaagccgtcgaacccgtcctcccacgaggtggtcgcctggatcaagcgtatcctccgcgccgagaagacaggccacagcggcacgctcgaccccaaggtcaccggcaacctcatcgtctgcgtcgaccgagccacgcgcctcgtcaagtcgcagcaaggcgccggcaaggagtacgtgtgcgtcgcccgcttccacgccgccgtgccggacaccgcgcgcgtggcccgcgcgctagaggcgctgacgggcgccgtgttccagcgcccgccgctcatctccgcggtgaagcgccagctcagggtgcggaccatctacgagagcaagctcctggagcacgaccctgagcgccacctcgcggtgttctggatctcctgcgaggcaggcacttatgtccggactctgtgtgtgcaccttgggctgctccttggcgtcggcgcgcatatgcaggagctgcgccgtgtccggtcggggatcctcggggagcaggacaatatggtgaccatgcacgacgtgatggacgccatgtggtcgctcgacaaccacaaggacgagtcctacttgaggcgcgtcgtcatgccgctggaggtgctgcttacaagctacaagaggcttgtcgtgaaggattctgccgtgaatgctatctgctatggcgctaagcttatgatccctggcttgctccggtttgagaatgatatcgagaccggggaggaggttgtcctgatgacaacgaagggggaggcgattgccattggtattgctgagatgaccactgctgttatggcaacctgcgaccatggcgcggtcgcaaagatcaagagggtcgtgatggacagggatacgtacccgaggaagtgggggcttggtccagtggcactcaagaagaagaagatggtcgccgagggcctccttgataagcatgggaagccaaacgagaagaccccagctgagtggctccgcaatgtggtgcttcccactggcggcgatgtatcgatcgctagcatcgcagctgctcctgagccagagaaggtgaaggtggaacaggatgcagttgccggtgaaaaggtcaaggagaagaagaagaagaggcagcaggatgagaacaatggcgatgatgcttccgttccggcgaagaagatcaaggtcgaggaagatgccgaggtagtggaaggggaaggggacaagagcgagaagaagaagaagaagaaagaaaaggtagaatcagaatcagctgatgccgctgaagcgaaggaggtggagaaggctgatgatgcagctgacgagacgggcagcgaaaagaagaagaaaaagaagagcaaggaaggaagcgccgcggccgcggatgcagagagtgctgagcatgcagatggggcgggggtggagaagagcaagaagaaaagggagatgaaaatgtagatcggggagacagagcaggcatagtaatt

SEQ ID NO: 144939 - DNA, 267 bp, Zea Mays
atgggccaacgtcagaccgactctggacgtgggagaggggagggggtgctcgggcgctggaagagggaggcgggccctagagatggaggagggggtggaggagaggacagaggagggaggtgcgtggcggtggacgatcgggagcgggcgacgctggaggagaggagggaggtgggcgacggcgtagcaggcgctggaggctggagtaggctgttcgcgatcctcgctgtgctgcacaagttaagacctagttttttgggcctttga

SEQ ID NO: 144940 - DNA, 839 bp, Zea Mays
aacaaacaagagagagctagctagctagctcgctcgatctgcttaattaagcctctctaaatcatcttgattatattaacagtgtaacaatgcagggcctcacgccaacttacaagctcagctcgatcagtgtcgtcatcatgttgcttgtgctgaccggcggcggcggcgtcgcccatggccgcaagaagaagctcgtctcgagctacgacgagccgtgccagcagatgacggtctactaccacgacatcctgtacgacggcaccaacacggcgaacgcgacgtcggcggtcgcggcgcagccgacgctgctgagccggtcggtgtccgtcaacgacacctacttcggcgaggtggtggtgttcaacgacgcggtgacggcggggcgcgcgccgagggcttctacttctacgacaggaaggagtcgctgagcgcgtggttcgccttctcgctcgtgttcaactccacggcgcaccggggcacgctcaacctcatgggccccgacaccatcgccgcgaagacgagggacatctccgtcgtcggcggcaccggcgacttcttcatggcgcgcggcatcgccaccctccgcaccgacaccttccagggctcgtactacttcaggctgcagatggatatcaagctctacgagtgctacgtctgaagtcctcacgctagctagctgcttcaagggtggcaaagagggacaagcatgcagtaccattttttttctttttatttggatttatgtgcatctgcctcgttgttgtgtacgtatatcagaagtgcatggcatttgcacaattaagtacgttcaataaaacagatgtcttttggttata

SEQ ID NO: 144941 - DNA, 528 bp, Zea Mays
atgcagggcctcacgccaacttacaagctcagctcgatcagtgtcgtcatcatgttgcttgtgctgaccggcggcggcggcgtcgcccatggccgcaagaagaagctcgtctcgagctacgacgagccgtgccagcagatgacggtctactaccacgacatcctgtacgacggcaccaacacggcgaacgcgacgtcggcggtcgcggcgcagccgacgctgctgagccggtcggtgtccgtcaacgacacctacttcggcgagggcttctacttctacgacaggaaggagtcgctgagcgcgtggttcgccttctcgctcgtgttcaactccacggcgcaccggggcacgctcaacctcatgggccccgacaccatcgccgcgaagacgagggacatctccgtcgtcggcggcaccggcgacttcttcatggcgcgcggcatcgccaccctccgcaccgacaccttccagggctcgtactacttcaggctgcagatggatatcaagctctacgagtgctacgtctga

SEQ ID NO: 144942 - DNA, 516 bp, Zea Mays
attggaaattcatgttattaaccttgtggtattatgattccaggtgtttgagattaatgaatccctttacgttgtcgagctaaaaaagtcatctggagactgctccctgtacagaaagttgtgtgagacgctctcggaggacttgggcacatgcaaaagccagcaatttttaaagcaggattctatcagacaagagataggtagacataacagtagcttttaactaagagcccccttgttaaataggctatagacacaaactaacacaaacaatatactgaatttaaaacagtatattgggcatgcacctattacagatgtgctctctcatgccttttgtcatgaaaccttaagagacttagactatgaaaaattggcaactgacaatgtatcgaactccaaagggataatatgatgatgtaaacaagtaaaatacgcatataagtgattcagagctacctggtctctatgtttctcttatatattgattgatattggaacgtaagattgtttgct

SEQ ID NO: 144943 - DNA, 1803 bp, Zea Mays
gtcccgtataaacccgcctccctgcgcttgggcagcttccctcccctcccctcccctccccacctaacgttaccggccggtcagcctctagtccacccgagcgcggccggccgcgtggacgcccgccgacgagcgagcagcgacgacgacgagcgagcaccggcggcggaggcggatggggaagtacgagatggggcggacgctcggggagggccacttcgggaaggtgaggctggcgcgggacgcgggcacgggccggtccttcgccatcaagatcctcgaccggcagcgcatcctcgccatgaagatcgacgagcagatcaagagggagatcgcgacgctgaagctgctcaagcaccccaacgtcgtccgcctgtacgaggtttcagctagcaagaccaagatatacatggtcctcgagtacgtgaacggaggagagctatttgacaaaatcgcactcaagggtaagctgacggagaaggaagggaggaaactgttccagcagctgatagacgccgtgggatactgccacgagaagggggtttgtcacagggacctcaagcctgagaatgtcctcgttgatgcaaagggaaacataaaggtttctgattttggactaagcgcccttccgcaaaaccaacgaaaagatggtttgttgcataccacatgtggcagccctaactacatagccccggaggtccttctgaacaaaggttacgatggctcggtatctgacgtgtggtcctgtggtgttattctatatgtaatgcttacagggagtcttccatttgacgaccaaaatatggttgtcctctatcagaagattctgaaagggaatgctcacattccaaagtggctctctcaaggtgcccaagatctactgcgaaagatcctggatcctaacccgatcacgcgcgtagatgtggatgggataagggcacacgattggttcaagcaaggctacgctccttctgcgccgtttaatgatgacgaagaagatatcaacgtggatgaagaagacagcctaaatatgactgagcagaatggcattcaagacaagatagcaatcaaccaaatcaatgctttccagctcattgggatgtcctcctgccttgatctatccggattttttgagaaagaggatgcttctgaaaggaaaatcagattcgcatcaaattatcccccagcttacttgtttgagaagatcgagagcattgtcagaaaaatgggtttccaggtacacaagagcaacggcaagctaaaagtgatccaagattgtaagggactagcaaatttaagagggaaagagtcattattaatttctgctgaggtgtttgagattaatgaatccctttacgttgtcgagctaaaaaagtcatctggagactgctccctgtacagaaagttgtgtgagacgctctcggaggacttgggcacatgcaaaagccagcaatttttaaagcaggattctatcagacaagagataggtagacataacagtagcttttaactaagagcccccttgttaaataggctatagacacaaactaacacaaacaatatactgaatttaaaacagtatattgggcatgcacctattacagatgtgctctctcatgccttttgtcatgaaaccttaagagacttagactatgaaaaattggcaactgacaatgtatcgaactccaaagggataatatgatgatgtaaacaagtaaaatacgcatataagtgattcagagctacctggtctctatgtttctcttatatattgattgatattggaacgtaagattgtttgct

SEQ ID NO: 144944 - DNA, 1898 bp, Zea Mays
cgccatcgacggtcccgtataaacccgcctccctgcgcttgggcagcttccctcccctcccctcccctccccacctaacgttaccggccggtcagcctctagtccacccgagcgcggccggccggtccgtccgtccgccgcagcagagcctctagcctgtagccagttggttccccgcccgcggccggcgacagatcgatgcggcgtgcgtggacgcccgccgacgagcgagcagcgacgacgacgagcgagcaccggcggcggaggcggatggggaagtacgagatggggcggacgctcggggagggccacttcgggaaggtgaggctggcgcgggacgcgggcacgggccggtccttcgccatcaagatcctcgaccggcagcgcatcctcgccatgaagatcgacgagcagatcaagagggagatcgcgacgctgaagctgctcaagcaccccaacgtcgtccgcctgtacgaggtttcagctagcaagaccaagatatacatggtcctcgagtacgtgaacggaggagagctatttgacaaaatcgcactcaagggtaagctgacggagaaggaagggaggaaactgttccagcagctgatagacgccgtgggatactgccacgagaagggggtttgtcacagggacctcaagcctgagaatgtcctcgttgatgcaaagggaaacataaaggtttctgattttggactaagcgcccttccgcaaaaccaacgaaaagatggtttgttgcataccacatgtggcagccctaactacatagccccggaggtccttctgaacaaaggttacgatggctcggtatctgacgtgtggtcctgtggtgttattctatatgtaatgcttacagggagtcttccatttgacgaccaaaatatggttgtcctctatcagaagattctgaaagggaatgctcacattccaaagtggctctctcaaggtgcccaagatctactgcgaaagatcctggatcctaacccgatcacgcgcgtagatgtggatgggataagggcacacgattggttcaagcaaggctacgctccttctgcgccgtttaatgatgacgaagaagatatcaacgtggatgaagaagacagcctaaatatgactgagcagaatggcattcaagacaagatagcaatcaaccaaatcaatgctttccagctcattgggatgtcctcctgccttgatctatccggattttttgagaaagaggatgcttctgaaaggaaaatcagattcgcatcaaattatcccccagcttacttgtttgagaagatcgagagcattgtcagaaaaatgggtttccaggtacacaagagcaacggcaagctaaaagtgatccaagattgtaagggactagcaaatttaagagggaaagagtcattattaatttctgctgaggtgtttgagattaatgaatccctttacgttgtcgagctaaaaaagtcatctggagactgctccctgtacagaaagttgtgtgagacgctctcggaggacttgggcacatgcaaaagccagcaatttttaaagcaggattctatcagacaagagataggtagacataacagtagcttttaactaagagcccccttgttaaataggctatagacacaaactaacacaaacaatatactgaatttaaaacagtatattgggcatgcacctattacagatgtgctctctcatgccttttgtcatgaaaccttaagagacttagactatgaaaaattggcaactgacaatgtatcgaactccaaagggataatatgatgatgtaaacaagtaaaatacgcatataagtgattcagagctacctggtctctatgtttctcttatatattgattgatattggaacgtaagattgtttgct

SEQ ID NO: 144945 - DNA, 1715 bp, Zea Mays
cgccatcgacggtcccgtataaacccgcctccctgcgcttgggcagcttccctcccctcccctcccctccccacctaacgttaccggccggtcagcctctagtccacccgagcgcggccggccggtccgtccgtccgccgcagcagagcctctagcctgtagccagttggttccccgcccgcggccggcgacagatcgatgcggcgtgcgtggacgcccgccgacgagcgagcagcgacgacgacgagcgagcaccggcggcggaggcggatggggaagtacgagatggggcggacgctcggggagggccacttcgggaaggtgaggctggcgcgggacgcgggcacgggccggtccttcgccatcaagatcctcgaccggcagcgcatcctcgccatgaagatcgacgagcagatcaagagggagatcgcgacgctgaagctgctcaagcaccccaacgtcgtccgcctgtacgagcctgagaatgtcctcgttgatgcaaagggaaacataaaggtttctgattttggactaagcgcccttccgcaaaaccaacgaaaagatggtttgttgcataccacatgtggcagccctaactacatagccccggaggtccttctgaacaaaggttacgatggctcggtatctgacgtgtggtcctgtggtgttattctatatgtaatgcttacagggagtcttccatttgacgaccaaaatatggttgtcctctatcagaagattctgaaagggaatgctcacattccaaagtggctctctcaaggtgcccaagatctactgcgaaagatcctggatcctaacccgatcacgcgcgtagatgtggatgggataagggcacacgattggttcaagcaaggctacgctccttctgcgccgtttaatgatgacgaagaagatatcaacgtggatgaagaagacagcctaaatatgactgagaatggcattcaagacaagatagcaatcaaccaaatcaatgctttccagctcattgggatgtcctcctgccttgatctatccggattttttgagaaagaggatgcttctgaaaggaaaatcagattcgcatcaaattatcccccagcttacttgtttgagaagatcgagagcattgtcagaaaaatgggtttccaggtacacaagagcaacggcaagctaaaagtgatccaagattgtaagggactagcaaatttaagagggaaagagtcattattaatttctgctgaggtgtttgagattaatgaatccctttacgttgtcgagctaaaaaagtcatctggagactgctccctgtacagaaagttgtgtgagacgctctcggaggacttgggcacatgcaaaagccagcaatttttaaagcaggattctatcagacaagagataggtagacataacagtagcttttaactaagagcccccttgttaaataggctatagacacaaactaacacaaacaatatactgaatttaaaacagtatattgggcatgcacctattacagatgtgctctctcatgccttttgtcatgaaaccttaagagacttagactatgaaaaattggcaactgacaatgtatcgaactccaaagggataatatgatgatgtaaacaagtaaaatacgcatataagtgattcagagctacctggtctctatgtttctcttatatattgattgatattggaacgtaagattgtttgct

SEQ ID NO: 144946 - DNA, 1643 bp, Zea Mays
cgccatcgacggtcccgtataaacccgcctccctgcgcttgggcagcttccctcccctcccctcccctccccacctaacgttaccggccggtcagcctctagtccacccgagcgcggccggccggtccgtccgtccgccgcagcagagcctctagcctgtagccagttggttccccgcccgcggccggcgacagatcgatgcggcgtgcgtggacgcccgccgacgagcgagcagcgacgacgacgagcgagcaccggcggcggaggcggatggggaagtacgagatggggcggacgctcggggagggccacttcgggaaggtgaggctggcgcgggacgcgggcacgggccggtccttcgccatcaagatcctcgaccggcagcgcatcctcgccatgaagatcgacgagcagatcaagagggagatcgcgacgctgaagctgctcaagcaccccaacgtcgtccgcctgtacgagcctgagaatgtcctcgttgatgcaaagggaaacataaaggtttctgattttggactaagcgcccttccgcaaaaccaacgaaaagatggtttgttgcataccacatgtggcagccctaactacatagccccggaggtccttctgaacaaaggttacgatggctcggtatctgacgtgtggtcctgtggtgttattctatatgtaatgcttacagggagtcttccatttgacgaccaaaatatggttgtcctctatcagaagattctgaaagggaatgctcacattccaaagtggctctctcaaggtgcccaagatctactgcgaaagatcctggatcctaacccgatcacgcgcgtagatgtggatgggataagggcacacgattggttcaagcaaggctacgctccttctgcgccgtttaatgatgacgaagaagatatcaacgtggatgaagaagacagcctaaatatgactgagaatggcattcaagacaagatagcaatcaaccaaatcaatgctttccagctcattgggatgtcctcctgccttgatctatccggattttttgagaaagaggatgcttctgaaaggaaaatcagattcgcatcaaattatcccccagcttacttgtttgagaagatcgagagcattgtcagaaaaatgggtttccaggtacacaagagcaacggcaaggtgtttgagattaatgaatccctttacgttgtcgagctaaaaaagtcatctggagactgctccctgtacagaaagttgtgtgagacgctctcggaggacttgggcacatgcaaaagccagcaatttttaaagcaggattctatcagacaagagataggtagacataacagtagcttttaactaagagcccccttgttaaataggctatagacacaaactaacacaaacaatatactgaatttaaaacagtatattgggcatgcacctattacagatgtgctctctcatgccttttgtcatgaaaccttaagagacttagactatgaaaaattggcaactgacaatgtatcgaactccaaagggataatatgatgatgtaaacaagtaaaatacgcatataagtgattcagagctacctggtctctatgtttctcttatatattgattgatattggaacgtaagattgtttgct

SEQ ID NO: 144947 - DNA, 1900 bp, Zea Mays
cgccatcgacggtcccgtataaacccgcctccctgcgcttgggcagcttccctcccctcccctcccctccccacctaacgttaccggccggtcagcctctagtccacccgagcgcggccggccggtccgtccgtccgccgcagcagagcctctagcctgtagccagttggttccccgcccgcggccggcgacagatcgatgcggcgtgcgtggacgcccgccgacgagcgagcagcgacgacgacgagcgagcaccggcggcggaggcggatggggaagtacgagatggggcggacgctcggggagggccacttcgggaaggtgaggctggcgcgggacgcgggcacgggccggtccttcgccatcaagatcctcgaccggcagcgcatcctcgccatgaagatcgacgagcagatcaagagggagatcgcgacgctgaagctgctcaagcaccccaacgtcgtccgcctgtacgaggtttcagctagcaagaccaagatatacatggtcctcgagtacgtgaacggaggagagctatttgacaaaatcgcactcaagggtaagctgacggagaaggaagggaggaaactgttccagcagctgatagacgccgtgggatactgccacgagaagggggtttgtcacagggacctcaagcctgagaatgtcctcgttgatgcaaagggaaacataaaggtttctgattttggactaagcgcccttccgcaaaaccaacgagtatgcatgacgtcctccctcatgccagatcattctgaatcattttgtctgtgatgactctcttttttttcttccagaaagatggtttgttgcataccacatgtggcagccctaactacatagccccggaggtccttctgaacaaaggttacgatggctcggtatctgacgtgtggtcctgtggtgttattctatatgtaatgcttacagggagtcttccatttgacgaccaaaatatggttgtcctctatcagaagattctgaaagggaatgctcacattccaaagtggctctctcaaggtgcccaagatctactgcgaaagatcctggatcctaacccgatcacgcgcgtagatgtggatgggataagggcacacgattggttcaagcaaggctacgctccttctgcgccgtttaatgatgacgaagaagatatcaacgtggatgaagaagacagcctaaatatgactgagaatggcattcaagacaagatagcaatcaaccaaatcaatgctttccagctcattgggatgtcctcctgccttgatctatccggattttttgagaaagaggatgcttctgaaaggaaaatcagattcgcatcaaattatcccccagcttacttgtttgagaagatcgagagcattgtcagaaaaatgggtttccaggtacacaagagcaacggcaaggtgtttgagattaatgaatccctttacgttgtcgagctaaaaaagtcatctggagactgctccctgtacagaaagttgtgtgagacgctctcggaggacttgggcacatgcaaaagccagcaatttttaaagcaggattctatcagacaagagataggtagacataacagtagcttttaactaagagcccccttgttaaataggctatagacacaaactaacacaaacaatatactgaatttaaaacagtatattgggcatgcacctattacagatgtgctctctcatgccttttgtcatgaaaccttaagagacttagactatgaaaaattggcaactgacaatgtatcgaactccaaagggataatatgatgatgtaaacaagtaaaatacgcatataagtgattcagagctacctggtctctatgtttctcttatatattgattgatattggaacgtaagattgtttgct

SEQ ID NO: 144948 - DNA, 1597 bp, Zea Mays
cgtgtcctcgtggcttggcagtgtcgatcgctgatcccaccggctgatagagttggcggccgggagagtgagtcagggatggcgtcggagccggtggcgcgggcggtggcggaggaggtgggccgctggggcagcatgaagcagacgggggtgaccctgcggtacatgatggagttcggctcccgccccacccagcgcaacctgctcctctccgcgcagttcctgcacaaggagctccccatccgcttcgcgcgccgcgcgctcgagctcgactcgctgcccttcggcctctccaacaagcccgccatcctcaaggtgcgggactggtacttggactcattccgggacatcagatacttccctgaagtgaggagccggaacgacgagctcgctttcacgcagatgatcaatatggtcaaggtgcggcataacaatgtggttccaaccatggccttgggagtgcagcagctgaagaaggagctgggccgctcaaggaaggttccattcgagttcgatgagatcgacgagttccttgaccggttctacatgtcaaggattggcatccgcatgctgatagggcagcatgtggctttgcatgaccctaaaccggagcctggtgttataggcctcatcaatacaagattatccccaatccaggtggctcaagctgcttgtgaagatgcccgttctgtctgtttaagggaatatggatcagctcctgatattaacatttatggcgatccaaattttacgtttccatacgtcacattacacctacacctgatgttatttgaattggtgaagaactctctccgcgcggtgcaagaacggtatatgaactctgataaagatgttcccccggttagaattatagttgctgatggagaagaggatgttactatcaaggttagcgatgaaggtggcgggataccaagaagcggcctcccgagaattttcacgtatctgtacagcaccgcaaagaatcctcctgagctagatagacctaatactgaaggggtaactatggctgggtatggtttcgggctcccgatcagccgactctacgctcggtattttggcggcgacctgcaaatcatctcgatggaaggatacggtaccgatgcttacctccacttgtcgcggctgggagattcagaggagcccttgccttgacgacatatttttgtggacctccagtaccactcttctcctgtaactatgtggctcgatcttcttgtaatccagtgctggcctcgacctatatatatatagctatagttggcctcgaccttatttcactgcctgctctgctgcattgtgaacacagcactgctacgtcctgcttacttccgccatgtactatgatctctctgccggccttcaacaggaaaaaagaaaggacgagggaaatcatggggagcagctaggcggatgagcgcattctcggtagctgctaatctcattttcatagctgcgtctcttgtgttgtacattacatagtctggatttgagcttttgctatggcaagtatcacatgttacctgggtaattgagaaatataagtaaaaaaaacagtacgatgtctctctttagacgt

SEQ ID NO: 144949 - DNA, 4457 bp, Zea Mays
ggcatgatttttcgttttggtaaatataataactatatagtacaacatagaactaagtattcatatattaataacaggttagccatctagaagatgtcttggttagaagcctcaggagagagaaatcagcagagaccaagattgggaaactggaagcagaaatacaacacttgaaccgtttggtcaacctgatggagtctgacgcacatcgcttgaggaagagactcgaacttcgtggtgaaaaacaaagattacactcgattggtgaaaatgctgcattgtccatggagattcagttgttgcaagaacaaatcaatgaaaatcctcaattgactcacttcgctttggaaaacaagagattgattgaggaacttacaacgcttcataacttctacaagcaaggggaaagagatatgttattgacagaaatatctcttttgcggaatcatttcctccatattcttgagcagaaatacacaacaactcgtaaagaagtagaacctcagggtgatgagctcatcaaggagcttgacagttgcaggaaggaattggatgcgtgcttagaaaacaatgttctattagctcggtacggagggaaatggcataagagaggtggaacaaggagcaaccatgttgagtgggttgtgatggatcgtgctgagcggagcaggaaagcagtgaacgcaggcgccgagggaacgccgacggggcgtggagaagctgagggtgcgccgacgatgaactcgacgtccagagatcgagagcgcaaggcgcgacagccgaaactggagggcgggcccaaagggcaaatgtatataggtgaagtaaataagctgcgctgtgaacttatacaataccagaaagcctgcacaaatcaagttgctcctgaggaaaaggagaatgttgtggccacaagcaccaatgcaatgcaacatgttggatttttactctttcattgtgatcaagccgggaagaatttttcatatttgtcaacagatgatgttaacaggcagttcatgcaagcagagatcacaactaatatttcagaatcatttcaacttgaattaccttatgaaattgacagtgaagatccggactctcctcatttgcatgatcctgaaacacatgactttagggatcctagaacagcatcagagtatgatggtgtattgtctcagtgcttaaacttagctatggcgtcttcacatgatgttcttaacaaaagtactattctaactgatctgaattttctagagaaggatgacacatatcatgtccatgaaaagcctccatttaggggtatacatttgcatgatgagactttatcgtgccaagagattgaaacagtgaactcaagtaaacatctatcacaggatgaattggaaaaccttaaaagaacaaatgaagagctcaaagagaagctgtttattatggctgaagaaagcaataagctttcagagattattgttgcaaaagatgtagaaattgcttctttatctgaagaatgggaggctgcaatttttgatctaacaagcttcttaacagatggatgtagatcactggatgatgcatatcagaacattgataatatgattagctcatttcctcacagtaacagttctgtaagtgaacatgttgagaaggctatgaaaattagcattgagaaagaaaagatgatattcaaacttcaaactgaactacaaactgcacaaaaaattggcagggaagtgaaggaaaagctgcatattttaaaaggtgcaacccttgctataactgaagctcagcagttggataatgaagaaaactctcaggaagaactacagctagtgggactattgcaccaaaaggattgtataatacaagaactaaggaacaatttgaaaccagaaaaatttgtatttgcagaaagagcaaaagggcattctcgtgatgacctactgttgcctggtagttcagttgacatgattgaggatcatgatgaaaatcaaccagcagccagtcaagctagtccagattatcagtcaaagcttgatagtgtgatgcatcttgtcgaggacaaatcaaataaggttctggccttattttcaaattttgaggcagctcatgaaaccatggaagaggctgaactcatgctttcagctttgctgaaggccaatgaaggattgaaacttgagagagataattgcaggcaagcggtggaattgttgttgtctgagaaaagttctctgatcggtgagttgaaggaacttgaagcatcaagctcttgtacatcccagaagtatgacaaattgcatcaacagataaatgagtgtgttacagagatgacaaagctcgctgctacaataaggaagtcgttccagcaaattcaaagtgtttctacagtagaactctttgctctttgctcagagattattacttttggccaagacttgaaaagatatataattgactcaaggtcatatatagcaaacatggtatcacttatagaagaaaaaagcagatctatagagcagttccatcacctaagtacacatgcttgtgggtctgctcgccaacaggtagagtcgaattcatgccagtggggtagcagaaaactttctcaatctgattatagtacagactatgcatcactcagaagagaatttaacaggaagagcaatgttgttgaaggattgtcttttgatcttaaactactgcaagagtctgcctcaaacgcgaaagatatgaaagataaagctgatgaaatatctattgcccttagcaatactcaaagagaactagatatgaaaacttccacaatggaaaccatgttgaaaaaacaaaaggtacttgaggaagaactagctgaaaatggtgccagactcattaatttaagattagagttagagcaatctcaaagtttatcatcagcattattgaaggagaacaaaggtctgagagtgatgttggaagatgaaactatgaagaatagtgaaacaaaagtgctgttggaagaaaaagttaaggtcatagagggactggagagccaaatactatttctaaatcgttgtgaagtggggcagttgatgtcagatattgaagaattaaacaatagcattaaaataatgagtagtgacagagacaatctccaggcagagatatttaagttaagggacaagcttgagatggcattggctttagctgaggaaaatgaagctgctgctattgaagttcgtcaaactgcagagattagtaaaatttatgctgaggaaaaagaagaggaggttaagattcttgaacgatctgtcgaggaacttgaaggaacagtaactgttcttgaggaagaggtatgcaaccttaaagaggaagtaaggaactatcaaatacataaacaatctgaagcccaatttcaagctattaatgacatgcttgctgaagaaaaagcatcaaaatgtgatgctgctgaggaatcgtgtcaagcgaaatgtcatctagaaaagagattgcaagctgagattcttgcacatcaaggtgtcagaaagaagattgaaggtctcaaattggaagcaaagcgtaaagatgatgagattggacaatacaaagagcatattgctgagttggtcctgcattcagaagcacagtccttgttgtttcaggagaagtacaatgaaatggaacacatggtttctagacagaggtttggtccgcatgaatcttattctgagactgtccccaagactgaaaagccttcagggcgagcaagaggatccagctcccctttccggtgcatatctagcattattcaacaaatgaactctgagagagatcaagaaatcttggtggcacgccaacgaattgaagaactagaaggtttggttagttgcaaacagaaagagatatgcttgctaacatcaagactagctgctgtggataccatgacgcatgatattataagagaactacttggtgtcaaactagacatgacaaactatgctaatttggttgaccaagaagagctgcaaaagttgctcatagcatcccagcaacagattgaacaatcaaaggcgaaggatacagagctcgaagcgctgaaggaacaacttggccatcttattctggaaagggacagcttgcttgatgacatggaccaaagaaagacggacctattggaggctcaactgctcgttgaacagctcgagcaacgggagcagatgctagaagcgcagattgaaatgttgcagctggagaaagacagccttcagcaaaagaccttggagatggacgagacaatcgagcttctagccagatcaaaccaaccagatataaatccacgaatgggcgacaaccaccatcgcggcagcagtgagttcagcaggcggctcgctcagtccgacatgctcctctcccacgcgaggcatgagcattctcgcaggcacgcggccggaagctcgaggacgcaccacggccggcaccgatga

SEQ ID NO: 144950 - DNA, 1345 bp, Zea Mays
gctttttcttcactcatcgtcgtcgtccatcgctcgctagcttacttgagtctcgcctccatctctacctgtctcgtctcggttagaccacgaagaattaagcgacgatgatgagccctagtaagctcgccgtcctcactgtgttcgccttcgccctgctcggctccgtgtcatgccaggccggaacctactactacactcctccggctccggccaccccgcaaccaccggcatgtcctcctcctgtcactccggtgcccccgcccgcgtcaccacccacttatcctccaccgaccccgacgagcccacccgcgcctacgcccacacccccacccccacccccacccagcagccctgggacgcaactcatggtcggatactacaagaacaagtgtggcgcttacgtggatgtcgaagctattgtcaagaagcacgtcagtgccactgatgctggtatgcaggccgggcttgtccgtctcttcttccacgactgcttcgtccgtggatgcgacggctccgtcctcctcgacacgttcagcaacgacaccagcctgaccccggagaagttcggcgtgcccaacttccccagcctgcggggcttcgaggtgatcgacgcggccaaagccgagatggaggcggcgtgcccgggcacggtctcgtgcgcggacatcgtcgccttcgccgcccgcgacgcatcctacttcctcagcggcggcggcatcagcttcgccatgccggcggggcgctacgacgggaccgtctccctcgccagcgagaccctccccaacctgcccccgccgttcgccggcttcgaccagctcgtcaagatgttcgacgacaaggggctcgacgccttggacatgatcacgctctccggcgcgcacagcatcggccgctcccactgctcctccttcaccagggaccgcctgccgcccagcaacaccaccgacatggacccagcgttcgccgccacgctgcaggctagctgcgcgtcggccaacggcaccgacaacacggtgatgcaggacttcgccacccctgacgtcctggacaaccagtactacaagaacgtgctggcccacaaggttctcttcacgtcggacgccgcgctcaccaccaacttcacgtccaacaacctggtgcgcgcctacgcggacttcgtgccctatctgtggcagcagaagttcgcgaaagccatggtgaagatgggcggcgtcgagatcaaaaccgccgccaatggagagatcaggaagacatgccgcaagatcaacagcaggccgtgatcgatcagatggaccgccgagcttgtccctctactttagatcaaactctgacgacgcctcac

SEQ ID NO: 144951 - DNA, 222 bp, Zea Mays
ggtcggccgcgcgatcggcgcgcgacacgtggccgagccaacggtcggaaggaagcaccggactgtccggtgtgcaccggactgtccggtgcgccagatctgcaacggtcggcaacggtcggcttcgccatttaaggaaacaaatcgggcaccggacagtgtccggtgtgcaccggactgtccggtgcgccacgagacagaaggcaaagatggctttccaga

SEQ ID NO: 144952 - DNA, 217 bp, Zea Mays
gagtttgatttgcaaaaacaaaccaagtggtggcaaaggatgatccatatatgtcaaaattgaataaaaccaatttgagtttttatttgaagtgattttgcacttgtgctatctactttatgttgtgttggcataaatcaccaaaaagggggagattgaaagggaaatgtgcctttgggccatttctacgtattttggtgattgagtgcaaacacaa

SEQ ID NO: 144953 - DNA, 1439 bp, Zea Mays
tggctggcattcacgtctcacaacgtgcgctcctgccggccggcgataacacacgatgaactggccggccagccggctataaataggcatgcaagacggcaacttttcattcagcccatcgctagctcgatctcgcctgtcgatctcctctactagcacaagaccacgagggattccgattaagcgatgacaacctctaagcttgctgtcctcactctgtttgccctgctcggctccgtgtcatgccagtccggaggctactacttctacccaaccccgcagcaaccatctccaacacccagccctcctcctagtccgcaactcatggtcggatactacaaggacaagtgtgccgcttacgtggatgttgaagccattgtcaagaagcacgtcaaggccaccgatgctggcatgcaggccgggcttgtccgtctcttattccacgactgcttcgtccgtggatgcgacggctccgtcctcctcgacacgttcagcaacgacaccagcctgaccccggagaagttcggcgtgcccaacttccccagcctgcggggcttcgaggtgatcgacgcggccaaagccgagatcgaggcggcgtgccccggcacggtctcgtgcgcggacatcgtcgcgttcgccgcccgcgacgcgtccaacttcctcagcggcggcggcatcagcttcgccatgcccgcggggcgctacgacgggaacgtctccctcgccagcgagaccctccccaacctgccctccccgttcaccggcttcgaccagctcgtcaaggtgttcgccgacaaagggctcgacgccttcgacatgatcacgctctccggcgcgcacagcatcggccgctcccactgctcctccttcaccagggaccgcctgccgcccagcaacacctccgacatagacccagcgttcgccgccacgctgcaggctagctgcgcgtcgcccaacggcaccgacaacacggtcatgcaggacttcaagacccccgacgtcctggacaaccagtactacaagaacgtgctggcccacaaggttctcttcacgtcggacgccgcgctcaccaccaacttcacgtccaacaacctggtgcgcgcctacgcggacttcgtgccctatctgtggcagcagaagttcgccaaagccatggtgaagatggccggcgtcgagatcaaaaccgccgccaacggagagatcaggaagacatgccgcaaggtcaacagcaggtcctgatcagatggcgtaccggcgggcttccaatttcctaagttttgcctttacatacattcccctgatctcccctaatatctgcctttatgctgtatacattctttgtttcgttttccagctgtatgcctgcttttatatgctgtataatttaaatttgattgaatattacatcttttgaaatccaagcaaattttcatcatcaa

SEQ ID NO: 144954 - DNA, 870 bp, Zea Mays
atgccgtacatagtgcatacatcatgcatgcagtcagacagtattaatgacgttgccatcgccatgtgtgtgtacgtggtggtttctgcagggatgcgacggctccgtcctcctcgacacgtcagcaacgacaccagcctgaccccggagaagttcggcgtgcccaacttccccagcctgcggggcttcgaggtgatcgacgcggcgaaagacgagatcgaggcggcgtgccccggcacggtctcgtgcgcggacatcgtcgccttcgccgcccgcgacgcgtcctacttcctcagcggcggcggcatcagcttcgccatgcccgcgggccgctacgacgggaccgtctccctcgccagcgagaccctccccaacctgcccccgccgttcgccggcttcgaccagctcgtcaagatgttcgacgacaaggggctcgacgccttcgacatgatcacgctctccggcgcgcacagcatcggccgctcccactgctcctccttcaccagggaccgcctgccgcccagcaacacctccgacatggacccggcgttcgccgccacgctgcaggctagctgcgcgtcggccaacggcaccgacaacacggtgatgcaggacttcgccacccctgacgtcctggacaaccagtactacaagaatgtgctggcccacaaggttctcttcacgtcggacgccgcgctcaccaccaacttcacgtccaacaacctggtgcgcgcctacgcggacttcgtgccctatctgtggcagcagaagttcgcgaaagccatggtgaagatgggcggcgtcgagatcaaaaccgccgccaatggagagatcaggaagacatgccgcaagatcaacagcaggccgtga

SEQ ID NO: 144955 - DNA, 1260 bp, Zea Mays
ctttcttgttcagcccatcgctgtcctcgagcttttacttgtacactggctagagctagctcgtacagcaatcaggtcaggaggtgttaagcgacgatggcgacctctaagctcgctgtcctcgctctgtttgccctgctcggctccgtgtcatgccaggccggaggctactacgactactactaccctaccccgcagcgacctccaacaccaagccctgcagggacgcacctcaaggtcggatactacaggaacaagtgtgccgccgcttacgtggatgtggaggccattgtcaagaagcacgtcaaggccactgatgctggcatgcaagctggccttgtccgtctcttcttccacgattgcttcgtccgtggatgcgacggctccatcctcctcgacacgttcagcaacgacacaagcctgaccccggagaagttcggcgtgcccaacttccccagcctgcggggcttcgaggtgatcgacgcggccaaagccgagatcgaggcggcgtgcccgggcaaggtctcgtgcgcggacatcgtcgccttcgccgcccgcgacgcgtcctacttcctcagcgccggcggcatcagcttcgccatgccagcgggccgctacgacgggaccgtctccctcgccagcgagaccctccccaacctgcccccgccgttcgccggcttcgaccagctcgtcaagatgttcggcgacaagggcctcgacgcctccgacatgatcacgctctccggcgcgcacagcatcggccgctcacactgctcctccttcaccagggaccgcctgccgcccagcaacacctccgacatggacccggcgttcgccgccacgctgcaggccaaatgcaggtcggcgaatgctggcaccgacaacacggtgatgcaggacttcaagtcccccgacgtcctggataaccagtactacaagaacgtgctggcccacaaggttctcttcacgtccgacgccgcgctcaccaccaacttcacgtccaacaacctggtgcgtgcctacgccgacttcgtgccctatctgtggcagcagaagttcgaaaaagctatggtgaagatgggtggcatccagctcaagaccgcagacaatggggagatcaggaagacgtgccgcaaagtcaacaacaggacgtgatcgatgatcatcagatcagatggcggcgatcagatatcttgtccacctagaccaaattaaactctgccgcttggcttagacgaaatgggaacaaataaccattct

SEQ ID NO: 144956 - DNA, 6849 bp, Zea Mays
atggccaacctcggcggtggcgccgaggcgcacgcgcgattcaagcagtacgagtatcgcgccaactccagcctcgtcctcaccacagactcccgcccgcgcgacacccacgagcccaccggagagcccgagacgctctggggcaggatcgaccccaggtccttcggcgaccgcgccgtccagaacaggccgcccgagctcgaggagaagctctccaagtcgcgcaccaaaaagtctaagcgcgacgctgctgccgcgctcgactccgccgacctcccccgtcgcgacgccaagcgcaggcgccgcgctgcttccgcccaggaggtctccgtcctctccctcaccgacgacgccgtgtacaagccccagaccaaggagacgcgtgccgcctatgaggccttgctcagcctcatccaacagcagcttggcggccagcccctcgatgtccttgctggggcagctgatgaggtgctcgctacactcaagaatgacaaggtcaagaaccctgataagaagaaggacattgagcagctgctcaaccctatctccagccagctctttgatcagcttgtctccattggcaagctcatcaccgacttccatgatgcggcagctggtgatgcttccggtgcgccttccgccgacgctgtggacaccactctggatgatgatgttggtgttgctgttgagtttgaagaagacgaagacgaggagagtgattttgatcaggtgcaagacgagctggatgaggatgaggaagatgacatggctgagttgaatggtcctggaggtatgcagatgggtggtgagttagacgacgatgacatgcagaacgccaatcaggggctgaccgtcaatgttcaggacatcgatgcttactggctccagaggaagatatcccaggcatacggggatggggacattgatgctcaacagagccagaagcttgctgaggatatcttgaagatcattgccgagggtgacgacagagacgtcgagaatcgccttgtcatgctcttggactatgagaagtttgatctcattaagttgttgctgcgcaaccgtctcaagattgtttggtgcacccgcttagccagggccgaagatcaggaacagaggaagaatatagaggaagagatggcaagtgacccaagtttggctccgatattggagcagctacatgcaaccagagcatccgcaaaggagaggcagaagaacctggagaaaagcatcagggatgaggccaagaggctcctcaacaatgatgctgctgctgctggtgctgatggtgccagggaccacagggcagccgagtgggacatggagagtggatggctgaaaggacagaggcagttgcttgatcttgaaagcctctcgttccatcagggtggtctctttatggctaacaagaaatgtgaacttccgactggatcgtttagaacccctcataagggatatgaggaggttcatgtgccagcactgaaggctaagccctatgaaacaggagagaagattgtgaagatatctgatatgccagagtgggcacggtcagcttttgatgggatgacacagctgaacagagttcagagcagggtctatgatactgctcttttcaaaccagacaatatccttctctgtgctccgactggtgctggcaaaacaaatgtggctgtgcttaccatccttcagcagattggtctgcatatgcaggatggagagtttgataataccaagtacaaaattgtctatgtggccccgatgaaagcattggttgctgaagtcgttggaaacctgtctaagcgtttggcaggttacaatgttactgttagggagctcagtggagaccagaacttgaccaagcaacagattgatgaaacacagattattgtcacaacacctgagaaatgggacattgtgaccaggaaatcaggggacagaacctatacccaaatggtgaagctgttaatcattgatgagattcatctgctacacgataacagagggcctgttctggagagcattgttgctaggacagtcaggcagattgagacgacaaaggagaatattcgtctggttgggctctctgcgactctaccaaactatgaagatgttgcattattcttgcgcgttcgcaaagaaagcctcttctattttgacaacagttaccgaccttgccctcttgcccagcaatacattgggatcactgttaggaagccactacagaggatgcagttgatgaatgagatttgttatgagaaggttatggctgccgctggtaagcatcaagtgcttatatttgtacactcaaggaaggagacggcaaagactgccaaagccatcagagatacggcgttggcaaatgacactgtcagccgctttctgaagaatgagagtgcaagccaagagatccttggcactcatgctgaacttgtcaaaaacaatgatcttaaagaccttttgccttatggatttgctattcatcatgctgggatggcaagggttgaccgtgagcttgttgaagaactttttgctgacaagcatattcaagtacttgtatccactgctacccttgcatggggtgtcaatttgcctgcacatactgttatcataaagggtacacagatttacaatccagaaaaaggtgcttggacagaactaagccctctggatgttatgcagatgcttggtcgtgcaggaaggcctcagtatgatacgcatggagaggggataatcttgactggccacagtgaattgcagttctacctgtctcttatgaaccagcagctgcctattgagagtcagttcatatccaaattggctgatcaattgaatgcagagattgttctggggactattcagaatgctcgtgaagcatgctcgtggcttggctatacttacctctatattcggatgctccgcaatccaacattgtatggtttgccagcagatatcttggagagtgataaaacacttgatgaaaggagagctgatttggtttccattaagggcgggcctggtgcagcggtagagcctaccgtctgtaaccggaagatacattccgctgcaaatctactggataggaacaatctgataaagtatgacaggaaaacaggatacttccaagttactgacctgggaaggattgccagttattattatatcagtcatggaactatttcaacatacaatgagtacttaaaacctacaatgggtgatatcgaactgtgccgactgttttctctgagtgaagaatttaagtatgtaggtgtcaggcttgatgagaaaatggaactggcaaagcttttggatcgtgtgccaatacctgtgaaagagagcttggaggaacccagtgcaaagatcaatgttctgctgcaagcatatatttctaggttgaaactggaaggcctttctcttagttctgatatggtctacatcagacagagtgctggacgtctcttacgggcactattcgagattgttttgaagaggggatgggctcaactagcggagaaagcactgaatctttgcaagatggttgataaacaaatgtggagtgtccaaactcccttgaggcagtttactggaattcctaaggagatcttgatgaaacttgagaagaaggagttggcttgggagaggtactatgatctgtcctcacaagaaattggtgagctgatccgctatcccaagatggggaggccgctgcacaagtgcatccaccagttaccaaagctgaatctttcagcccatgtccagcccattactcgtacagttttgggttttgagctgacaattacacctgatttccagtgggatgataaggtacatggatatgtggagcccttttgggttattgttgaggataatgatggcgagtacattcttcaccatgaatatttcatgcttaagaaacagtatgttgacgaagatcatacattgaacttcacagtgccgatatatgagccgctgcctcctcagtatttcatacgtgttgtgtctgacaagtggcttggttctcagacaattctccctgtctgctttaggcatttaattctaccagaaaaatatgctccaccaactgaattgcttgatctgcagcctcttcctgttagtgcattgagaaatgcaagatatgagggcctctatagtgcttttaagcatttcaatcccatccagactcaagtattcactgtcttgtataacagcgatgacagcgtgttggtcgctgcgccaacaggcagtgggaagacgatatgtgcagagtttgctatactaaggaaccaccagaaggcattgtctggcgagagcaacatgcgggttgtttatatagctcccattgaagctctcgcaaaagaaagatacagggactgggagcggaaatttggagagtttgccaaggtagttgagctcactggtgaaacggcagctgatttgaagcttctggataaaggtgaaatcataatcagtactcctgaaaagtgggatgcattgtctcgccggtggaaacagcgaaagcacatccaacaggtcagcttattcatagttgatgaacttcatctacttggatctgataagggacatgttttggaagtcattgtatctaggatgaggcgtatttccagtcatattggcagtaacatacggatcgtagcactttcagcatcacttgctaatgctaaagatcttggtgaatggattggtgccacctctcatggccttttcaacttccctccagcagtgagacctgtgccactggaaattcacatccagggtgtggatatagcgaactttgaggcaaggatgcaagcaatgacaaagcctacctacactgccatcacacagcatgcaaagaacaataaacctgccctggtgtatgtaccgacaaggaagcatgcaaggttgactgcattggacttgtgtgcgtactctagtgttgagggtgctggaactccatttcttcttgggtcaggagatgagatggatactttcaccagaggtgttgaagaagagactcttaagaatacacttaaatgtggtgttggctatttgcatgagggtctaagtgagcttgatcaggaacttgtaacccagctgttccttggtgggaggatccaagtgtgtgttgcaagcagcacaatgtgttggggaagaccattgcctgctcatttggtcgttgtcatggggactcagtattatgatgggcgggagaatgctcacaccgactatccaattacagatctgcttcaaatgatgggtcatgccagtagaccacttcaagataactcagggaaatgtgttatattgtgtcatgcacctcgcaaagagtactacaagaagtttctttttgaggccttccctgtcgaaagcaatcttcaccatttcttgcatgatcacatgaatgctgaggtggtggttggtgttgtagagaataagcaagatgctgtggattatcttacttggacgttcatgtatcggcggctagctaagaatcctaacttctacaatcttcagggtgtaagtcacaggcatctttcagaccatctttctgagctagttgagactattctgaatgatcttgaatcgagcaagtgtgtggctatagaggaggacatgtacctgaagcccctcaaccttggccttattgcttcatactactatattagctacacaactattgagcgttttagttctatgctgacccagaagactaaggtgaaaggactcctagagattctagcatctgcctcagaatatgcagagcttccgggtcgtcctggtgaggaagaattcattgagaggcttgttcgtcaccagaggttctctatcgagaaacccaagtatggggatccacatgtgaaggccaatgctctgctgcaagcccatttttcaaggcacacagtggtcggaaatctggcagctgatcagcgcgagattctcctttctgctcataggttgctccaggcaatggttgatgttatatccagcaatggttggcttagtcttgctcttagtacaatggagctgagtcaaatggtgacacaaggcatgtgggatcgggattctgtgctgcttcaagttccacacttcacaaaagacttggctcggaggtgccaggaaaatgaagggaagcccatcgagagtatctttgatctagctgagatggctgtcgatgagatgcgggatctcttacaactatcgaactctcagctgcaagacatcattgaattcatcaagcggttccccaatgttgatatgacctatgaggtccgtgagggtgatgatataagcgctggtgacaatgtaaccgtgcaggtaactctggagcgtgacatgactaacgtttcatctgaggttggtccagtccatgcgccaaggtttcccaagcctaaggaagaaggctggtggctggtgattggggacagctccacaaaccagttactggcaatcaaaagagtggcactccagaagagggcgagagtgaaacttgagttctctgctccggcagaggctgggagaaaggactacatgatttacttgatgtcagactcttacttgggctgcgatcaggagtatgaattcaccgttgatgtcaaggatgctggaggggattgatgatgaagactgtgacactatgtcgcatagaagtagaattgagtgtgtactgtaacgcgatattggaacattctgtgttgtaacctcgaacatgtggaagctgtaacttattttgcatgttgaccggtgcactttgggcgttgctgtgttatcctattctagtattgttgtaaggattgcgctcggttacacttgagccacagtattttggatcaacttgttgcttctataagcttg

SEQ ID NO: 144957 - DNA, 1449 bp, Zea Mays
aaaggattgtatagcttgagtcgtcgagcgaaacagctagcaaggaattccgcaagcaaggatgagtaagccggctgcggccctagtgatgttgctggcgctcgtcgccgccgggccggcggcgggcgacggggggagcaccagactcggctgcttcgtgggttggtccccgctcaaaaccgtgtcctccctgctctgcctgctccagggctccagcacttttccgagcccgaagcctgcgcccacggggcagggcctgagcgtcggttactacaacaaaagcggcagctgccctaaagcggagcagctcgtgagggaagccgtgacgagtgccaccaacggcgcaaaccgtggccttaacgcgggcctcatccgtctccacttccacgacgccttcgttcggggctgcgatgcttccgttctcctggacaagaccgcgtcgaacaacaccgacacggagaagacaggcccacccaacaaggacagcctgcgcggcttcgaagtgatcgacgcggccaaggcggcggtggagaaagagtgccccggcatcgtctcgtgcgccgacatcctggccttcgccgcgcgcgacgcgtcctacatcctcagcaacgagaagatctactacgaggtgccggccggccgctacgacgggcgcgagtccttcgccgacgagaccgaccagctgcccgggccgggctccagcgtccaggacctcaagaagagcttcgccgcccaggggctcagcctagcggacgccgtcacgctgtcgggcgcgcacagcatcggcctcgcccgctgcctcttcttcaaagaccgcctgtcggccatggaccccggatacgctgccacgctgaatgccacctgcaacgctggcggggacagctacaaggtgaaccaggactacaagagccccgacgtcctggacaaccagtactacaagaacatcgacaagttcgtgctcttcgcgtcggacgctgcgctcaagtccagcgagacgattgaccaggtgaatgccaacgccggcggttatggcaagtgggagaaagacttcggggacgccatggtgaagatgggcaagatcggggtcatcaccagccccggctacggtgccgagatcaggaaggtgtgctcgcagatcaactactagctctagactcctcccgcggtaattattggctgcgtctacctactataatcgaccttaatgtggctttaatttattgagttcctctcataatgtaaccgcgtgtgttcattattttattgttctactatttatcatatactacatatataactctttttacgctaaatctatattaatataagtacgtatgcgaccaaaatttgtggatgatttattcatggttactgaacctgtctcacacaccctgtgtgccaaccatcgaagcgagcgtgcatggtcgtttgccgcaccatgcatggccg

SEQ ID NO: 144958 - DNA, 1871 bp, Zea Mays
atggcgccgccgccggagcttgccgttgtcgttccaacaatgaccctgctagtgctagcgctgctgggggcggccgtggcgggcaagatcagttatgctccgagcacaagcccacccgctactactcctactagcccaaaccaaagtccaccaacatatcatgccccaagccagatcccgtcgtcgacctcaataactccacctagcccaagccctaaactaagcctattattacccactaattctcaacctatcccaagtccaatctcctatccaccaagccaaagtccatcaatctcaaatccaccagctaattctcaacctattccaaacactagccctagctcaatttcaccaacttatcctccaagtggtcgaagctcaaacccattaatctcaggtccaccaatttatcctccaagtggaagttcgaatccatcaatctcgagtccaccaacatatcctcaaggtgtaagcacaaatcccttggtctcgaattcgcctacttatcctcaaagtgcaagtccaagcccctccatctcgactccaccaacttatgctccgagtgcaagtccaagctcttccatctcgactccaccaatttatgctccgagtacaagtccatctagttcaatctctacaccacccatttatcctcctagcccaagtccaagtctatcgatcaatagcccaccaggtagccccaccccaagtccatctagttcgatctcaatcccacccacttatcctcccagcctaagcccaagcccaagtagtgctccttcgtcagggcttagtgtcggctactacaagcatacatgctctggagcggagactattgtgagggaggttgtgacgaatgccatagacagcaatcgtggcacgggcgcggggctcattcgtttgttcttccatgactgcttcgttcaggggtgcgacgcttctgttctcctgaacacgaccggctccagcgagccgacggagagagccagcgcacccaacctgagcctgcgcggcttcgatgtgatcgacgcggccaaggcggcgctcgaggctgcctgccccggcgtcgtctcgtgcgcggacatcgtcgccttcgccggccgcgacgccacctgcatcctcagcggcagcgcggtcagcttcgacatgccggccggccgccacgacggccgcgtgtccctcgacagcgaggccgtcgccaacctgccgccgccgttcgccagcctcgagaggctcgaggagatgttcgccgccaaggggctcgacgtcgaggacatggtgacgctctccggcgcccacaccgtcggccgctcccactgctcctccttctccgaccgcctcccgccccacgtctcggacatgaacgacacgctctccggcacgctggccacgcagtgcaacagcggcggcggcggcgacaccacggtgccgcaggactcggtgacccccggcggcctggacagccagtactacaggaacgtgctcaaccacgaggtgctcttcgcgtcggacgccgcgctgctggcgtcggaccagacggcggacatggtgtccgccaacgcgttcacgccggggctgtgggagaccaagtttaaggcggcgatggtgaagatgggccgcgtcggaatcaagaccagcaccgacggtgagatcagagacaagtgctggatggtcaactaactatctaatcagatggttgctgatccggccttaagccatggtcaatagcatgagctgcacatgcgtgcatgccacgttcgttaaatcatgttacttgcatgcatatatacgattggacaacatgctgtatacaattttcccctactacgttaaatcatgctatatacaacccaaccgacttgtatctc

SEQ ID NO: 144959 - DNA, 149 bp, Zea Mays
ttgttttttattttttgttttattttatttatttgtcagactgttttcacgtttgataaacgttagtaacttgggtgccgtttggttcacatatttgtaacataatgggtaactgataacgttaaatcatgtttgttttagtccaaccg

SEQ ID NO: 144960 - DNA, 416 bp, Zea Mays
ttcacaggcacgctgtccttcctggggttccggccccgggacgtcgagacaagagagacggcaatcgcaggcagccgtgtcgacttccccggcaagcactgcggctcctgcgcgggcctcgggcaccaggagtctagcctccgctgcgccctcgaggaggcgatcttcctcgacaggtgcttgtcatgccctgcaaagatgtgcctcagttcagtgcacaataccaaaggggtccttcaatcaagcaatgcaacttcacaacaaagttgagaaacaggtccttgtgcaatggaatctttatatgacatagacctcatatcaagaaatatgtacctgttattttggataatccacgatcttggtaccagataatatcaagaagtacaaaactcggtgaggatggcttggtggtgcat

SEQ ID NO: 144961 - DNA, 108 bp, Zea Mays
ttgttttttcatgtagagcactaaagctacaatgtttttattgggccctgatcatacctatgctctgtttagccagtgattttgtgagacctgtaaggaaaatggacc

SEQ ID NO: 144962 - DNA, 564 bp, Zea Mays
atggcggagctcggcagtagacctcaccgtggactcaggagaccggcatccccaatcgtagcgagagggacgaccagcgggacacagtccaagcggcaaggcttccccatgcgtgatcctgcccgaggagatttcaaaggtcttggaaatccagccatcgccgtcgggtatcccacccccgagcctgcgcccccaccaaccccgcccccgagttcacccgccaccaagctcgtcgccggctttattggcaactacaatcaggtttacatcaggtttcgtagatataatgtccagcgaatgttcgttgatgttcgattgatgatcgaggcgtgggtgctagctttcaggaggtggttggtggagttggaggggtcgattggggaagagggggagaggatgaagacaactgcactggtgcactggagctcgacaacctcgagagggtcaggcaagtctgatgttgaaaggatcttcaagaaagtcttcgaggacctgtcagacaagaacacggggctcctggacatcaactcccgccacgtcgctaccctcatggtttacaagtga

SEQ ID NO: 144963 - DNA, 1259 bp, Zea Mays
caaatgcaaaccacacaaattaaatgctgcatgctacatacatatctgcctgtcacagagaggggagcatgaatgcatgcaaccaaccgattggctagctagtcgttggcaggtcacaccaatgcctgtgcctgccgtatattcatccacacacacagtagtccaacaaccaataaataaaatccgacgagaaaaaaaaagagagaactttttgcttgtgatatcttgtcacattgtagagctagcaggaaacaaacaagatcgagcaagggaactgaaaccatgcatgcagtacaatgcaatgcaatgcaatgcattatgtgtatgtaatgtaatactactacgtacgtacataggtgttgagctgcctgacgaagctggagaagttgttgtgcttgaagtagtttgggaggaggtcgcgggcgaactcgggcgggcgccacacgacgaaggtggtgtcgtcgtcgccccacgacacgatgtggtcggtgcaggggtcgtccaccagctggtacgtcttggtcaggaacggcgccggcaccggcttcgcgtgcgggctctccatcgacaccaccatctcgccgcaccgctccaccaggaaagccatggagatgggtggtatgctggtaccttagcagcttgttgcccgcccggccgcgcccacaaactgtatatggtcgagctagctagcactagcagcctcccccgactccccgagagtccccgacccgctctgtgtttctctttgacgatggcctcgcggtcggcacaggaataggagatcgatggaatggaggacaagcaaaagatgagaggaagaagaacacgagctagcgaggacggaggagggggaggagatatgcaatataagctagctagtaactatgggggagctcagcctgcgggcagggggagaaagagagggccggccgggtatgtgatgtgttgtgtgcgagactgcgagctagagaggaattaaaggctgccgctctttagccctatctccagtctcactgtctcgcactcgcacacatatgaccgcacacacacgtactacactatgcacccacaccacacccccaccccacgagctcagtcaggctcagctccttccacctcctcccttcaaatattctctctcgtgtgtgtgggtcagccggccactgtctgtgcctggacgacctggaccgctgctgcctctcttcttccccacccacccacaggcctctctctctctctctcactgccctagcatcagc

SEQ ID NO: 144964 - DNA, 1446 bp, Zea Mays
ggtacgtgtcgccacacagcttcctctatccatgcagcagcacacaggctcagctcccctccctcttccttcctgatgatacggaggcgtccacatccattatcgcgctcaggctcgtgccgctcgtggtcgtacgctgcagcaggcgatcggagcaaactaagaagcgaacaggccgcccgtcgacgccatggcgccggatctggtgaacggcgtgctcaactgggtggggacgccggccatggtggccagcctgctgctcttctacccgccctactatctcttcaagacatgctactccttcctttcctggctcttccccgaggacctcgccggcaaggtcgtcctcatcactggcgcttcctccggcatcggcgagcaactggcctaccagtacgcgctgaatcgggcgtccctcgccctcgtcgcgagaagggagtcgagcctccggcacgtcgccgaccgagcactcgagctcggcgcgcgcgacgtcgtcgtcctcccaggcgacgtctccacccccgacgactgcgacaggttcgttcggaccgcgatcagtcactacgaccgattggaccatctcgtgtgcaatgctggcgtcgcgagcgtcggcgcgttcgaggagatcccggacgtcaccagctacagctcccagcttgacgtcaatttctggggttccgttcaaacaaccttcgctgccctgcctcacctgaagaggagccgaggaagaatcgtggtgacggcatctgcgaccggatggaacccagttcctagaatgagcatctacaacgctgccaacgctgcgctcatcaacttcttcgagacgctgcggaccgagctagggaaccaggtcgggatcacggtggtgacgcccgggtgggtggagtccgagatgtccagagggaagttcctcaaggagcacggccaagtggaggtcgatcaagagatgcgcgacgctcagatcggcctgttcccggtggagtacgccaagaactgcgccaaggccatggtgcaggcggcgcggcaaggcgagcggtacctcaccgtgccggcgtggttcggggcgatgtacctgtggcggctgttcgcgccggaggtggtggaggcctgctaccgcctcctgtacatgcacggccatggcgccaggcaggccgacgcgcccagcaggaccatggccgaggcgggtggcaagcagctgctgtacccgacctcgctgcgctctgacgagattaaggagtgaccaaactgccaactggtgtgtgtgtgtgtgtgtttgtgtgtgcagcagagctctcagaacacctggggtcatgtttaatatgtgctagctgtgtgccttgacaatgaataagctgctgctctctcttttgcatagtttaaatctacagttctgtagtcgatataattgttttgtttgaagctgttgaagtctacaattctgcagtt

SEQ ID NO: 144965 - DNA, 1579 bp, Zea Mays
tcatcccgctctcacagtcacgctctgttccgttcactctgcaactaaacaaaaaacagagccactccgttccagattaccaaacacagaacagagcggcttcgttcctagaatcagggatggaacggctccgttctactaatgaagcggtatcattcatcgagattgctgggagcggagcagacgcgtggatgatgacatgcacccagtaggtgatcggagacggtcagacggcgtccaccgctgtgtccgctcgctctcgtctcgggcgcgtcgttgccttccacgtctcggcaggcagcagcaggcgatcggagcaaactaagaagcgaacaggccgcccgtcgacgccatggcgccggatctggtgaacggcgtgctcaactgggtggggacgccggccatggtggccagcctgctgctcttctacccgccctactatctcttcaagacatgctactccttcctttcctggctcttccccgaggacctcgccggcaaggtcgtcctcatcactggcgcttcctccggcatcggcgagcaactggcctaccagtacgcgctgaatcgggcgtccctcgccctcgtcgcgagaagggagtcgagcctccggcacgtcgccgaccgagcactcgagctcggcgcgcgcgacgtcgtcgtcctcccaggcgacgtctccacccccgacgactgcgacaggttcgttcggaccgcgatcagtcactacgaccgattggaccatctcgtgtgcaatgctggcgtcgcgagcgtcggcgcgttcgaggagatcccggacgtcaccagctacagctcccagcttgacgtcaatttctggggttccgttcaaacaaccttcgctgccctgcctcacctgaagaggagccgaggaagaatcgtggtgacggcatctgcgaccggatggaacccagttcctagaatgagcatctacaacgctgccaacgctgcgctcatcaacttcttcgagacgctgcggaccgagctagggaaccaggtcgggatcacggtggtgacgcccgggtgggtggagtccgagatgtccagagggaagttcctcaaggagcacggccaagtggaggtcgatcaagagatgcgcgacgctcagatcggcctgttcccggtggagtacgccaagaactgcgccaaggccatggtgcaggcggcgcggcaaggcgagcggtacctcaccgtgccggcgtggttcggggcgatgtacctgtggcggctgttcgcgccggaggtggtggaggcctgctaccgcctcctgtacatgcacggccatggcgccaggcaggccgacgcgcccagcaggaccatggccgaggcgggtggcaagcagctgctgtacccgacctcgctgcgctctgacgagattaaggagtgaccaaactgccaactggtgtgtgtgtgtgtgtgtttgtgtgtgcagcagagctctcagaacacctggggtcatgtttaatatgtgctagctgtgtgccttgacaatgaataagctgctgctctctcttttgcatagtttaaatctacagttctgtagtcgatataattgttttgtttg

SEQ ID NO: 144966 - DNA, 1288 bp, Zea Mays
gatgacatgcacccagtaggtgatcggagacggtcagacggcgtccaccgctgtgtccgctcgctctcgtctcgggcgcgtcgttgccttccacgtctcggcaggcagcagcaggcgatcggagcaaactaagaagcgaacaggccgcccgtcgacgccatggcgccggatctggtgaacggcgtgctcaactgggtggggacgccggccatggtggccagcctgctgctcttctacccgccctactatctcttcaagacatgctactccttcctttcctggctcttccccgaggacctcgccggcaaggtcgtcctcatcactggcgcttcctccggcatcggcgagcaactggcctaccagtacgcgctgaatcgggcgtccctcgccctcgtcgcgagaagggagtcgagcctccggcacgtcgccgaccgagcactcgagctcggcgcgcgcgacgtcgtcgtcctcccaggcgacgtctccacccccgacgactgcgacaggttcgttcggaccgcgatcagtcactacgaccgattggaccatctcgtgtgcaatgctggcgtcgcgagcgtcggcgcgttcgaggagatcccggacgtcaccagctacagctcccagcttaggagccgaggaagaatcgtggtgacggcatctgcgaccggatggaacccagttcctagaatgagcatctacaacgctgccaacgctgcgctcatcaacttcttcgagacgctgcggaccgagctagggaaccaggtcgggatcacggtggtgacgcccgggtgggtggagtccgagatgtccagagggaagttcctcaaggagcacggccaagtggaggtcgatcaagagatgcgcgacgctcagatcggcctgttcccggtggagtacgccaagaactgcgccaaggccatggtgcaggcggcgcggcaaggcgagcggtacctcaccgtgccggcgtggttcggggcgatgtacctgtggcggctgttcgcgccggaggtggtggaggcctgctaccgcctcctgtacatgcacggccatggcgccaggcaggccgacgcgcccagcaggaccatggccgaggcgggtggcaagcagctgctgtacccgacctcgctgcgctctgacgagattaaggagtgaccaaactgccaactggtgtgtgtgtgtgtgtgtttgtgtgtgcagcagagctctcagaacacctggggtcatgtttaatatgtgctagctgtgtgccttgacaatgaataagctgctgctctctcttttgcatagt

SEQ ID NO: 144967 - DNA, 3273 bp, Zea Mays
aaaaagaaaagagctcaaaagctagtcgaggcctcctccgccccttttttttctccccctcccaatcgacacaggattcactcgcccgcccagttgtttcttttagtgccgcccccattccgctctgatccgagcctttcgctcaaagcctccagcttttccaattgtttggtcacttcgggaaccaaggaataagttcttgcgctgtgcgcgatagagagcctgatccatccttccccatatcctattcctgtggcatttcgctgcgcttgcgccctgtgcgtggccactgcaggggaaggattttggcctggtttctctcttcttggggttccaagttttcgggcgagatcttcgcctcaaggcggttccttgcttttctggtattggcgcggctcttgttgctcccctacaagtccaaggaaagaatttggaggccgtgggggggtcccttgcgaccggttctggtcgatttctcgggcagctccagctgaattcaagatgccgctgtgacccaccgctgcctggtttcttggaggaaggaaattttgcttcaattgggccgttgggcgtcgttgagctagacccctcctccagctcttgatccggtccatggggctctgccatggcaagccgacgcaaatcccggaggccgaggctgaggaggatccccacgtagcctccggcgcgggcgacggcggggacggggcgacctcgccgtcggcggcggcgcccgcggcgaagccaggcacgccgaaacagcccaagttcccgttctacctgccgagcccgctcccgccgtccagctacaagggctcgccggcaaactcgagcgtctcgtccaccccggcgcgcggcgggctcaagcgcccgttcccgccgccgtcgcctgccaagcacatccgcgctctcctcgcgcggcggcacggctcggtcaagcccaacgaggtgtccattcccgagggcggcgagccggagctcggcctggacaagagcttcggcttctccaagcacttcttcgctaagtacgacctcggcgaggagatcggccgcggccacttcggctacacgtgctccgccaaggccaagaagggcgagcacaagggccaggacgtcgccgtcaaagtcatccccaaggccaagatgacaacagctatcgccattgaagatgtgagaagagaagtgagaatactgagttctctgacaggtcacagtaacctagtgcagttctacgatgcttttgaggatgaagataacgtgtatatagttatggaattatgtaaaggaggtgaactgctggacaggatattggctaggggtggaaagtactctgaagaggatgcaaaggttgttatggtacaaattttgggtgtcgtatcattttgccatcttcaaggtgttgttcatcgtgatctgaagccggagaatttccttttctcttcaaaggacgaaaactctcccttgaaggtcatagattttggcctgtctgactttgtgaagccagacgaaagactaaatgatattgttggaagtgcatactacgttgctccagaggtgctccaccgatcttacggcactgaggcagatatgtggagcatcggagtaatcgcctacatcttgctatgcgggagccgacctttctgggcgcgcacggagtcaggaatcttccgggctgtcttgaaggcggaaccgagtttcgatgaggccccatggcccactctcacagctgaagctaaagatttcgtaaaaaggcttcttaacaaggattaccgcaagaggatgacagccgcgcaagctctgagccatccgtggatccgtaatgctcaacaagtgaaagttcctttggatatgatcatctataagctaatgagagcttacatcagctcgtcttcgctgcggaagtccgctttgagggccctagccaagacgctgacgacgaaccaactcttttatgtaagggagcagtttgaactgctgggcccaaacaagaacggctatatctcattgcaaaatctgaaatcggctttagtgaagaactccactgacgcgatgaaggactctagggttgttgactttgttaacacggtgtgcactcttcagtacaggaagctggacttcgaagagttcgccgcttccgccatcagcgtttaccagatggaagccttggagacgtgggagcagcacgcgcggcgtgcgtacgagctgttcgacaaggaaggaaaccggcccatcgtgatcgaagagcttgcatcggaactcgggcttggcccgtcggtgcctctccacgttgtcctccaggactggatccggcacgccgacgggaagctgagcttcctggggttcataaagctcttgcacggggtgtcgtcgcgctcgatccccaaggcctagccatgcgccatccattactcatccctgcgcatccatatccatcaagaaccaaggagatgatgaccggtggctaagccagtctctggctggtgcgtgcgtgcgtgcgtgccgtgtgtattgtgttctgttcgagagtggctggagggtggtggacggcctgaaaccgttgcatgatgaggagagatgcttggtagtcctgtgaggtaaaagaggcagtaacaaggctggtgcctgtgccttgtaccacttgtaccccatcccttgccacgtggattgatggctgtcgtcgtcgttgtactgaagtaaggtgctgtgtagacgagtgtacagatgatggaggataggagaaaatgagtactacgatggaagggccgtaagatttgcggctgctgtgctgtttgtcaatcgccaatgggcaatggctgcttgcagtgcagctgtggcctgtgtcgagctctctcctctttgcctgcgccgtcagagaacaggaacgtcgcagcgcgtcactgcaggtctctctgttcatggcggcgggcgacgacgacgcaggcgctgtacgtgagcttgctgctggtgtgtaggttgccgtgcatgcagcggtgtcgccacacggcgctggtcctggacgtacgtacggcggagcaggtccggtcgagcccggccgccggggtgcggggccattgacagctagagcggcaggaggaggaccacacggccggggacccaaattaaaacctctttcccgtgagtcagtcagacagactaccaaatgcgaaaataaaataaaaaactcagattatacgtatatagctagaatatggtttaaagctatagtaccacaagacaaagttaataagtaactaaacatgctcttctttagtc

SEQ ID NO: 144968 - DNA, 251 bp, Zea Mays
tttttatttttgcaggtgaggttggcatgaagaaaatccatctggccccggccggcatagcgacaggaaggctaccggccggctcgccggcgcccgcggccggccggttgggcaaaaaggttagcaaacctggtctttgctcatgtaccagagtcctctggacggaaaagttggggacatcgacataaattatgtggaaaagatgattgggggaactgaaaattttgtatgattcggacgtgagcttttgg

SEQ ID NO: 144969 - DNA, 2853 bp, Zea Mays
aattgataagtaaaatccttatttgaattctgaaagacaagaaataccgtcaaacaggaaatcaatgggatcccacagacaatagcaagtcatgtatcttactgaggtacattttcaggtaaaaacttgaaaatagcaagtaatgtatcttactgagatcccacagacaatgcggtcaaaacaatgggacagaacagtttggaactgcaggtagccataaacatgctagtatttcacaagtactctagtatataaatctacccttaataaaaaaacataacatgactgcttgaacgataaaattgttatagctaaagttaagaatggcagcctaaaccaagcaatctgaataacatagagctaatcacaacccaaacatacataaattcaccagagggaggaagcatggtgagaaatttttagctgcttacaactattggtaacctacaaaagcgatccaaatcgcccaactgctgcagccgttttcagttcggcaagcgacggcgcggaacaccttgcccgacaccatgatctaaacgtcccgccggaaactgaatcccctaaactactaaaaaacaacgtagcggacgatggtgctacctgcttggatgtttccgggaggaggatgccgccggcggtcttcttgggctgcaccagcttctcaaccagcacccggttcagagatgggagcagcctcttcgccatcgccgccgtcctcttgttacccttcttcttgcgcagtaagccaaaaggaagaaaaaaaaaactcgaagcttccactcgcctcaacaccaaccgatcagccggaggttttagggttttatggacagacgccggcgcagcggaaaaattacgagcctgcccctttgagatcgttcgccgcgccaacgcaacgtgcgccggcctctcgggtgccctctagaacgttcctcgttaactgatctgggccgagcctcatgtatccaggtggcccactgtcaagcgttttggagcccgctaagcatgagcttctgcttattgatgtgtcgttgaaagcccacggaccatttatccagcggcccaatccagcaggtgggttaagcttgggagttgggagtgacaccgcggcacctccactgcagtagtcttgttgccggcggcggcggcggcggcggcgcggagaaattcggcgaacgatggcggactccggaagcctgaggaagcgggaggagaaggaagaggaggacgacattgtctgcctggatccttccttcttcgtggaccgcagctacgagatgacgaccttcaccttcggatcccacgagttgcgcctcctctgcctccgcgccgcttccactgattttgatcttactggacagttagtgtggccaggggcagtccttatgaacaactacctatctcaacaccctgaaattgtgaagggatgttcagtagttgagctaggatctgggattggcattactggcatattgtgtagccgtttctgcaaggaggttgtcttgactgatcacaatgatgaagttctggagattataaagaaaaatatagagttgcagtcatgttctgagaatgcacatgcagtgttgacagccgagaaactagagtggggaaactcagatcatttaagcggtattattgaaaaacatcctggtggatttgatcttgttcttggagctgatatttatatccttgaaattttcctacttaactgtttttattttaaggctctggcctttgtcttccattcatttgatatgtagcaacccttgcagtttgtggaccttgacttgcagaaagcttccagcaatctagcatttcctgcctctttgatactgtagagaggattgttcgtattcaagctggtaaatgcagattcatattggcttatgtatcccgaactaaagtcatggatgcactagtactcaaggaagctgaaaagcatggaatgcgtgttgaagaagtgaacggaacaagaacaaccatctcgaatcttgaaggagtcatatttgacattaccctgaaatgacagtccgtccttcgactctcctttgtcgaagtgcttgagtggttattcgtcatgaagtcctgtgtaacttccttttagcgggaaaatcgaagttccgcatcatgatgagctggagttgtgtcagttgtatctctgtagaggaggaggcaccacagtaagaacattagccgatgatggtctttgattcatgcgcccatttggtgtggctttctactgttcaactgctccatcctttaagctaatatataagatgtaagatgcgtgctacaactttctcggactatctatctatctatcggtgagatgaccagactgtgaaagttcctgtgacaaggagttgctgaaagcagtgccatcatgtatgggttgcagatgcttggtctgaactctgtaaaaggctctggattaccatgagtttttcgtgcttggtgcagtagcatgtaagtaagcaccaactgaacagaagaaaccttcagcacccccttcaacacatgtcccatgtagcatggttccaattttttgccttgttctctagcctgctgctgttggctccttgctatatttgtaagcttgctgcgacagcttgtcaaggcctccctgagacaaccttgtcacataggcgcagtgccacagttttttcggcttttcttggacgcagcctgaaatgggagctcctgccgtatgtggccatgttccgtatgaaccaggactgtcagtgatgcatgagctgcaggctgaacgggtctgatcctgagtgacctcgtgctgaacaatgccaaaaaaatttttatgaagagtgatgatagatatgcatatcgttttcattg

SEQ ID NO: 144970 - DNA, 2125 bp, Zea Mays
atggcggactccggaagcctgaggaagcgggaggagaaggaagaggaggacgacattgtctgcctggatccttccttcttcgtggaccgcagctacgagatgacgaccttcaccttcggatcccacgagttgcgcctcctctgcctccgcgccgcttccatgcttgtacagtggatgcagttatcggtgataaattctgcgcttgctgtttcatttgctgaatcggctgttactggagcctgtagtatgcatatgctatgccctgttgccttgtttcgatgtcgtggtgctcgagatattgttgtgacaggtgtttttgttcattttcttattttggctttcatagcagcaacgtcggatgttcattacacaatcatgaatcatgtgacgaaggaccacttttaccttaccttgtatgagaacccctcctgtcattccagtactctatatggggacaccaaaagcctcacattcctcgtgtttaaacaaataataggatttcttgtcactagatgactgttatgtcttgttcaatcccttcatgctgtcttttatagccaattgtcaacataaagataaattttggcttctaaagtcccgttccactggttctgtgatgatatggatgattttatttaagcctcaacatcacagcattaattctgttggtagattcctcgcagtatatgatgcctgttctcattgattccttgtcatggcagcgccactgacaggcaatttaatgattgatgcagctgattttgatcttactggacagttagtgtggccaggggcagtccttatgaacaactacctatctcaacaccctgaaattgtgaagggatgttcagtagttgagctaggatctgggattggcattactggcatattgtgtagccgtttctgcaaggaggttgtcttgactgatcacaatgatgaagttctggagattataaagaaaaatatagagttgcagtcatgttctgagaatgcacatgcagtgttgacagccgagaaactagagtggggaaactcagatcatttaagcggtattattgaaaaacatcctggtggatttgatcttgttcttggagctgatatttatatccttgaaattttcctacttaactgtttttattttaaggctctggcctttgtcttccattcatttgatatgtagcaacccttgcagtttgtggaccttgacttgcagaaagcttccagcaatctagcatttcctgcctctttgatactgtagagaggattgttcgtattcaagctggtaaatgcagattcatattggcttatgtatcccgaactaaagtcatggatgcactagtactcaaggaagctgaaaagcatggaatgcgtgttgaagaagtgaacggaacaagaacaaccatctcgaatcttgaaggagtcatatttgacattaccctgaaatgacagtccgtccttcgactctcctttgtcgaagtgcttgagtggttattcgtcatgaagtcctgtgtaacttccttttagcgggaaaatcgaagttccgcatcatgatgagctggagttgtgtcagttgtatctctgtagaggaggaggcaccacagtaagaacattagccgatgatggtctttgattcatgcgcccatttggtgtggctttctactgttcaactgctccatcctttaagctaatatataagatgtaagatgcgtgctacaactttctcggactatctatctatctatcggtgagatgaccagactgtgaaagttcctgtgacaaggagttgctgaaagcagtgccatcatgtatgggttgcagatgcttggtctgaactctgtaaaaggctctggattaccatgagtttttcgtgcttggtgcagtagcatgtaagtaagcaccaactgaacagaagaaaccttcagcacccccttcaacacatgtcccatgtagcatggttccaattttttgccttgttctctagcctgctgctgttggctccttgctatatttgtaagcttgctgcgacagcttgtcaaggcctccctgagacaaccttgtcacataggcgcagtgccacagttttttcggcttttcttggacgcagcctgaaatgggagctcctgcc

SEQ ID NO: 144971 - DNA, 1490 bp, Zea Mays
ttgtgaggaagaggaaaaataaattggggcacaaaaaactggcccggttaaatacccaccagaaaacccaaacgtaccgctcatatttccatgaaggacatgctttatcacagcgctaattgttagtagcctactctgtaccagtaccactcccttctctgttcagtgttcaccactgaaggttgggaaaaattatttgcatactggatgcaaacttacttctttgcagtctctcacatccactacatagaggcccacatgaatagaagaaaaaaaaatcaaacggttaagttgcagattttgatctgtttgtgtgggccttcaggtggtggatgtgagatgtgaggggctgcaaaggagtggatttgtatctggtatgtagagaattattttctgaaggttgtgacctaggtcttttgtggttatgctcgtggagctcctgttggtctgagtagctgagggttgagagaaatacttttggaggattggctaggagctgacaatattttggtataggtcgtcaaagtatatgctgttgttttccatgttttttttgttcgtgtcccattctattttcttttttcctcattctagtggttttacccattctattttcttttttcctcattctagtggttttacggaagtgaaaccagtgtcaccataaattgatctcgatgtacacccgaaaagctgttgtaaaagctttacaacatgtggttgttcattggaacttcattttagaagttaggcaacattgattggtcgtcttggcttccttgcttgttagatgggtctaccatttgatgtctatggcagtagcatcactactggctactgccacaactacctttgtttgactatatatttggttagtattgtatggttgttgcacgctgccactactctcatggttgccatatttctgtttgtcacaattgccatctttgttggaatacatctttggccaacattaactatctggcaaagttcaggcacaatttttcatggtggtttaataaattattttgtctcacactatggcagattggagcgacaaaggcagagttcttctgcaagacattcgaagaagttcatgagaaacttgttcacagagagctgaatttggatgctgctaagaagttcctgagcgcatatgagagctgatgatgaacaataggtagatgctgcttaagggtcggtagttgccaatgatctggaaagttgttgatgctgttgagattttgatcacaggcaaacttttaacaacaggtagatgctgttgagcgcatactgataccgcctgattggttcaccgatcgcccgtagccagctcgtatgcagccaggctgtccagagactgttatttgggccgtagaagtggatgcactcaaaataaatgttgcgtttactcgtgcagcctcacgtcttttacgtgcatgcaattaaacatatgctcaataaaatcaatgcatgtgatggtttagaat

SEQ ID NO: 144972 - DNA, 1687 bp, Zea Mays
gacggcccgctggccttagatgtattgggcccactggcctcacaggtcatatccggcccatgtggtaagactcgaaagctcgaagcgaagcctccctgactacagagaaccggaggactgaggaggaggaggagacgtcacgcctgcgcggctgcgcccaccatggacgaggaggagttccggcgcatgctcgacctcttcccggtcgtccgctcccgagactactgctgcgtaaacctcctcctcctcctcctcctccagccctcgtacccctctcctttttccgtctgcctgtgccgctaagtcccgggctctgatttggggacctcccgaagttccatggagccgcgatctgtggcttggaagcgtagaactcgattgggaattcggggtagcatagaacaatctgcctttctaccggttccagtgatcggatctcctgttgccacacacatttgctggtatagtgcagctccgggtttcgaaatcaacttgatgtttgtttgcagaagtggttgcggtagaggcccatgtagcctttgggggatatataaaaagatgatggcacattagcatcctttgacggaatttacgttactccttttgaaggatgcagtactacaaacaacgaagaaagaaaaacatatccatgttccctgaacagactagtttttctccccttcttttgggtaaaggggactgcccattttctccctttattaacgaagaaaggccctgtagaatgggaaggatacatatcctaatagaccttcccgacaattgctgggaatgcttctaaaacggggttccaggtttagtctattgctcccagcccctcaaaataagcaggctaatattagtcttatactgagcaggctgctgttggcctcttaaagtggggcaaatattagtgacaaactttcaggtagagcgtgacaaagtcgtcgtcatctctgtattgacctacacatagtcctgcaatgtcatgaatgtctgtttctatttgagtccaaggtttgtggttgcgagagtattaaatgggggcatggccgaaggggacagtggctgcgcatttatctaaatagaaaagcgggttgaaccagaacaaagagcaatgtgtttgatatggaatcataaggaatcgtattagatgtccctttgcagaagtaaccgaataaacatgtccgatcttggaacatccagcagaggaaccagacagcgatcacgagttcaggaggcaactaagggcgataataaggactcgtccggtggacgagatatgtttatgcagaaattgaagatggctgcggagaataagattggagcgacaaaggcagagttcttctgcaagacattcgaagaagttcatgagaaacttgttcacagagagctgaatttggatgctgctaagaagttcctgagcgcatatgagagctgatgatgaacaataggcaaacttttaacaacaggtagatgctgttgagcgcatactgataccgcctgattggttcaccgatcgcccgtagccagctcgtatgcagccaggctgtccagagactgttatttgggccgtagaagtggatgcactcaaaataaatgttgcgtttactcgtgcagcctcacgtcttttacgtgcatgcaattaaacatatgctcaataaaatcaatgcatgtgatggtttagaat

SEQ ID NO: 144973 - DNA, 717 bp, Zea Mays
gacggcccgctggccttagatgtattgggcccactggcctcacaggtcatatccggcccatgtggtaagactcgaaagctcgaagcgaagcctccctgactacagagaaccggaggactgaggaggaggaggagacgtcacgcctgcgcggctgcgcccaccatggacgaggaggagttccggcgcatgctcgacctcttcccggtcgtccgctcccgagactactgctgctccgatcttggaacatccagcagaggaaccagacagcgatcacgagttcaggaggcaactaagggcgataataaggactcgtccggtggacgagatatgtttatgcagaaattgaagatggctgcggagaataagattggagcgacaaaggcagagttcttctgcaagacattcgaagaagttcatgagaaacttgttcacagagagctgaatttggatgctgctaagaagttcctgagcgcatatgagagctgatgatgaacaataggtagatgctgttgagcgcatactgataccgcctgattggttcaccgatcgcccgtagccagctcgtatgcagccaggctgtccagagactgttatttgggccgtagaagtggatgcactcaaaataaatgttgcgtttactcgtgcagcctcacgtcttttacgtgcatgcaattaaacatatgctcaataaaatcaatgcatgtgatggtttagaat

SEQ ID NO: 144974 - DNA, 735 bp, Zea Mays
gacggcccgctggccttagatgtattgggcccactggcctcacaggtcatatccggcccatgtggtaagactcgaaagctcgaagcgaagcctccctgactacagagaaccggaggactgaggaggaggaggagacgtcacgcctgcgcggctgcgcccaccatggacgaggaggagttccggcgcatgctcgacctcttcccggtcgtccgctcccgagactactgctgctccgatcttggaacatccagcagaggaaccagacagcgatcacgagttcaggaggcaactaagggcgataataaggactcgtccggtggacgagatatgtttatgcagaaattgaagatggctgcggagaataagattggagcgacaaaggcagagttcttctgcaagacattcgaagaagttcatgagaaacttgttcacagagagctgaatttggatgctgctaagaagttcctgagcgcatatgagagctgatgatgaacaataggcaaacttttaacaacaggtagatgctgttgagcgcatactgataccgcctgattggttcaccgatcgcccgtagccagctcgtatgcagccaggctgtccagagactgttatttgggccgtagaagtggatgcactcaaaataaatgttgcgtttactcgtgcagcctcacgtcttttacgtgcatgcaattaaacatatgctcaataaaatcaatgcatgtgatggtttagaat

SEQ ID NO: 144975 - DNA, 809 bp, Zea Mays
gacggcccgctggccttagatgtattgggcccactggcctcacaggtcatatccggcccatgtggtaagactcgaaagctcgaagcgaagcctccctgactacagagaaccggaggactgaggaggaggaggagacgtcacgcctgcgcggctgcgcccaccatggacgaggaggagttccggcgcatgctcgacctcttcccggtcgtccgctcccgagactactgctgctccgatcttggaacatccagcagaggaaccagacagcgatcacgagttcaggaggcaactaagggcgataataaggactcgtccggtggacgagatatgtttatgcagaaattgaagatggctgcggagaataagattggagcgacaaaggcagagttcttctgcaagacattcgaagaagttcatgagaaacttgttcacagagagctgaatttggatgctgctaagaagttcctgagcgcatatgagagctgatgatgaacaataggtagatgctgcttaagggtcggtagttgccaatgatctggaaagttgttgatgctgttgagattttgatcacaggcaaacttttaacaacaggtagatgctgttgagcgcatactgataccgcctgattggttcaccgatcgcccgtagccagctcgtatgcagccaggctgtccagagactgttatttgggccgtagaagtggatgcactcaaaataaatgttgcgtttactcgtgcagcctcacgtcttttacgtgcatgcaattaaacatatgctcaataaaatcaatgcatgtgatggtttagaat

SEQ ID NO: 144976 - DNA, 703 bp, Zea Mays
actaaatcagcatgtagtgtggctattcctttttgcatcgtccggacatgatgggaggatgggcaaacgggccgtcgagcaccccgcgcgccatgatccggtacacggcctccgtcatgtgcagcccgtcccaggacacgtacctggacgggtcggcgcactgcacggcgcccggctcggagcagtgcacggtgaagttggcgttgtggaagccgccgccgccgcagcacgcgtcgagcgccgtggcgggggcgaagccgttgcgcgccggggcgccgacgatcccggtgacctcggcgtagtagtcgacgtagacgatggagacgtcccggtacgcgcggcggaggccggcgagcttggcccggagcagcgcgttgtggcgggacgtgaggtcgttcagccaccgcaggcagccggcggcgccgctgtcgcggaagaggaagatgtacctcgggaggcagcccagagggaagatgcccggcacgtacaccgtcttggcgcccagctggatgagcgactccagcgagcgcccgatggacctgatgacgaggggcaccagggagtcgacgaagtccagcgtccggttctggaagaaggggtggttgtagtcgttggcgccgatctcgcccaccaggaacagcgagctcgccatgatctcccgacgctctgcgtgcagtgcgtgcgtgcaggcacagtaattccg

SEQ ID NO: 144977 - DNA, 1014 bp, Zea Mays
atgtcggcctccggtggcggctccgcaggtaatcgcacggtggcagatgtgctgatggggaacgcacgggctgctgccagcaagacgaagaaggcatcaccatctctggagaatccgcaagcaaagaccgaccgtgcaaaggtcgaactggaggtccaagcggtgccgtccccagcgaagtcccccaaattaccagttgtgatcactcaatttgatgacgcgaaggagaattccctatcgccaaagagcactctacatcgttcgacagtgccgcggcagagccaagaatcagaagtaccctcccatggtgggcaccgtgttctaactgttccacttctcccggatagttctgacatcattaccgtagtgctggtaatgcatggcactccctgcttccgtggttatggcaggcgtaatgttgagcgcaggaggaattctgtccgtggttgcatcgtgagccaagacctatctgttatcaacttggtgattgtgaagaagggtgagaatgatctgcctggtctgactgacactgagaagccaaggatgagggttcccaagagggcctcagaaagttgttcaaccttaacaagaatgatgatgaaattactaatttccgagaggctactggggcctctcggaagttacattaacttccgacggctggcacagcgcctctcggaagttaggttaacttccgagggcctcttggaagagttcaagggttatgtcttcaagatcatgggtggatgtgacaagcaagggttcccaatgaagcaaggagttttgacttctggtcgtgttcgccttctgctccatatgagcgagattggggctgttggatttaccgcatggcaagttggagaaagctgctacaacccaaaccgccttatcttttctgtgacttgtacaatgaaggaatatcaatggtcttctacaaaggaagttgggtcactggccacatctattaatgttccaattgtgaaactggaaaagagaaaagtgaagaatatgtga

SEQ ID NO: 144978 - DNA, 231 bp, Zea Mays
ttcatacttgctttgtaggaatgttagatgccgacaacatcttgctctaccagaaggtaccagctccaaatcagaaaccaaaatttagggaaaaaatacgaactgcaaccttatccgtcatctttagtaattcatgtgtttatcttatttgcaccaagaactatgctggaggctataaaactgtgaatgctatttgtgacatgtaaataatactagcttgtacatgcatct

SEQ ID NO: 144979 - DNA, 355 bp, Zea Mays
attccttttatttacacccacagcacccatgtcctccgcctcgtgcctcgtccatcccgctccaaggttccgggttcggctcctgcctctcccctcctccgtcgccgcgaggccgttgcttggcttcaggcctcggtgtggggctccagcgaagggatgggcattgtggcacgtctcatgcttcaaaaatggtcaggatgggccaacaacatctgacgaaggtgatgacttcaagtatgttgcccaatcacagagctctggtggtgcagaggtgaaaaaggaagaggtgagtagcttaaacggggagcaggagcagaatttgaaggacggcgatgggttcctgcaactgcagaag

SEQ ID NO: 144980 - DNA, 1815 bp, Zea Mays
actggtagacaggacaagcatcagaattactagtcaccagcagagggacgacgggagaaggaaacccttcgccctcgctgccgccttctccttccccggtcgcgtcttgttggggctctctcgtggtctcgacccgccggccgagttctcgcgtccaagcgtggcaatccacatatctctgtctccctctctcgctcacccctgtatccccgtctaaccgaagagcccaatcaatcgaatcggatcgaaacagaccgtgtattcaatctgctactagggaagggggaagcgcgagcgtgcttgcgtgcgtgcgttccttcgttcgtgacaaggcggcccggccggccggccgatcgatcggcgatggcgccgccgtcgagggactactggctgggcttcttccgcggcgcaggggacaacgtgttcgacgccatcgacgcggccatcacggtcgccgcgtccgaccacccggccgccctccgggagcgccgcgacggcatcgccgagcgcctcttcaccgcgctcctggtgaccggcgccgcgggggcgggggcggcggcgggccagggagggtccgcggggagaacccccgtgcccagcctctgcagctccgaccgcgccgaggccgtcaccgacgacggcgcgccgcgcggagacgatcccgtcctcgccgagacggagcgcatcaaggccgtcctcctcggcggccatgacaagtcggagtccgagttgctggagctactccggcggctgcaggagctggacctcgcgttcgacaccttggatgtcactgcgatcggcaaagcggtgtccaacttccggaagcacagctcgaagcagatccggacactcgtgagatcgctcatcgaaggctggaaacgcacggttgacatgtggatcgctcggcgcagagaggccgtcgtagatcaaacgccccagtccatgggtccgtccagcctggaggatcaggaggatcgaggggcagctttcacccacatggatgaaggcgacctcttcgcaacgccaagcactacgattcggctgtccgaggaaaacccaggttccaagttctccgacgcaacggagggggatggaggcatggtgaacaacaccagcagggattgcggcgagcggtacccatcgaaccaaggggggccagctagaaggcctccgccgatgggccagcagcggtacgatccagggccgtgctggaggcaagaaccgagcagcgggcagacgaaggagcagttcgtcgcggagatgctcgctaggccctcgagtgcggcggggtcgggccccgggagaccgcagcaggcgaggcccaggcagcagcgtcaggaggacgcctcctccccagctcaaggcagcaggccgcagtctgtcggctgcttctgataaaccggtggcgcaggagcaacctgacgcgaactctgtgcgagcgaagctcgagctcgccaagaacgccaagctcgaggcggccaagaggaagctccaggaaggctaccaagagtttgataacgcaaagaagcagagaagcatacagatggttgatccccagaacctgcccaagcaagcaaacggcacccggaatttccaacctagcggcaagccaaggaatggcagcagcaggaattggtagcagttccaattccttttgagcgccaccagggatcatagacttcaaatcccctcctccctctttcttcctttggttcttgatcggctactaaagattttttttagaccatgcgagtacagaaaacagcaataaggctagtttcgaaagtctattgaaagttctggtcaattttgacg

SEQ ID NO: 144981 - DNA, 470 bp, Zea Mays
atcgaccgcctggcctcctctccctacccctacgggtcctgtggccactgcctcttgccgcaggcagccctcttctctctcttccgccgtctcgcctcctcacgccattaaaccccacccgcgcgcgcggcggccggcggcgagccctcacccatccgagcaagccgtggaggaagcgagcgcgcgaaagtatcaggaggaggcatgggtaccctggggcgcgcgatcttcacggtgggcaagtggatccggggcacggggcaggccatggaccgcctcggatccaccatccagggcggcctccgcgtcgaggaacagggtaaacatgcgccttctcccgctccattcttctcccctgctcctccgcctcctcgcccccaccttgtggctgcttcttactcgcaaaagggtggaatcgggtcctcgtgtaatcatttttatgcgtcgtggaggtacatgtatgccatcta

SEQ ID NO: 144982 - DNA, 1111 bp, Zea Mays
atatctatatctgtagagtgtagactagacggcacgcttggtgttggtggacttgtgctcttggacgaacagcttcatctcctccacgaacttgccggagtcggtgagctccgggaacacgtggaagccatggacggcgtcagggtactcgaccacccacaccggcttccccttcccgcgcagcgcctccacatacctggcctgccagtccttgagcaggtcgaagccgccgacgaccaccatcgcgggcgggaacgcgtcggcgagcttgacgccctcgccgcacacgcgcgcggcctcgtggtcccgtgtggcgccctccggtaggaactccttccagaagtggtccgtcgccgccaccgacagcgcggacgccccgtccagcgccacctcggccgccgtccgctcctccccgccgaagaacggctggatcaagacggcgccggcgacgcggaggttcgtgggcgacaccgcggccaccgcccatcgctgtgccacgtggtgcgtgatgttgccgcccgcgctgtctccggcgaggaagcagctggagaggtcgaccgggacgtgcgccggcagggagtcggcgttggcgtcgaggtagcggagcgccgcgacgccgtcgtcgtacgccgcggggaaccggtgcccgggggccaggcggtagttgacggacacgacaacggcgcggaggccgcggcagagccgccggcagaaggcgtcgtaggggcgggacgccgcggagaagagcacgaacccgccgccgtggaagtagacgacgacgggaacgggggccgccgcggcgtccgcgtccgcgccggacgagggggagaagacgcgcgcccacaggccgcgggaggcgtcgatggtgacgtccgcggagcgcacccccgaggcacccgggcgagacgtggtgccagacttgaggtcgccgagggagaagaggaggcgccggacgctgccgtcccggcggtgcaccagggcgagcgcggccagctggacgcgcaccgtccatggcagggacggcttcctgcgggcgtggtcgtcggagcctcccatttctggagtccagcacagtagtggagctgggatgttaactaagcgaggatggatg

SEQ ID NO: 144983 - DNA, 1133 bp, Zea Mays
ttgaatgctgttttcagtttcaaggcatcgtacaatcatgaatatttttgagaaagagccaaggatccatagagatgtgtttgttgctcccagtgcagcagtcattggggatgttgagattggtcatggatcgtcaatctggtacggatccatattgagaggtgatgtcaacagcattcatattggatctggtactaatatacaagacaattcccttgtacatgtttcaaaagctaacattagcgggaaggtcctcccaaccataattggaagcaacgtgacagtgggtcacagtgctgtattacatgcatgtaccattgaggatgaagcttttgttggtatgggtgccactctgcttgatggagtggtggttgaaaagcacagcatggttggtgcaggatctcttgttaagcagaatacaaggattccttctggagaggtctgggtcggtaatcctgccaagttcctaaggaagcttacagaagaggagattgcgttcatcgctcaatcagcaaccaactatatcaacctagcccaggtccatgcagccgagaacgccaagagcttcgacgagattgagctcgagaagatgctgaggaagaagtacgcgcacaaagacgaggagtacgactcgatgcttggggtggtccgcgagatcccgccccagctcatccttcccgataacatcctcccacacaatgctcagaaggcggttgcccgctgaaccttttctcaacccatgcttggcgttgttgcctgttgtcttggagcattttgacacgcgttcgttctctgtttttttatgaagcccaataagattgggtcgagcactgttttaggatcgaccgcacacaacaccacctctattttaaactgcaatggacaagaagctcagggtctcatttactcatctttgacttctctctgtggagcacttgtaatcgaagatcgtgccctgttttctgtactatttcaaactgcatgcagactcctgggttccgttgcttttgctttgcttcatagatattcctttggtccttcatacaatgctcgttttatgttcaaggcactattataatttaaggatagttttggaaccttatttttttaagagatttctatctcatttttct

SEQ ID NO: 144984 - DNA, 1852 bp, Zea Mays
cggtcacctccagccctagcgccatctgctctgtacccccaccgctaacctcctcagctctggcctgcccgcgctcctcctcgttgcctggatccggcagcccctccatgctcatccgcccctttcccgctctctcctcgaccggctcgctcccgcttgcaaccacccacaccctgttctgctccagagacagtcctggcggcgctgaaggaggagacgcagcagcggatggatgacgcatcgattggaggtcattggtggccactcacgcctcctcagacctcaccctcacttcgtcgtcagcgcaggtttggccaacggcccccgaccggatcgcaggtcctcctcacggtgaggcacagcccacagagtcgagccggacatcacaaccatgaccatgaggcatcgtcgcagcagtcggagtcatttttgctgccccctcccgacacctgtaaattttgtatgccttcacgccgtgaagccacatttgcggccattggcaatggctgtatccactgtttcgatccatatatttggtgatgtcccttcttcacctcttgttgggctgcttcaggacaaaatcaataactggagggagacatctcttatattgacatccatccttttcgctgcagttgtgttctggttcattggtgtgtctgaggctgcacaagatgctcttgatcatcttttcaaccaaggccacaatctcgtaacagaaaatgagatttctgatacctttactaggctggttgaaaggctaccacaagtggtacttggaagcgaggagacaaccacactttcacatgctaggatgttgttggctctgaccttttatgctggtccctagtttctgataaatcatcttcactgttctcctgtgagctcactctctcttggatgtcctcgacatttcttacatagatatatggttcccctgttgacttttaatttgattccttgtgtggatctgccatttttctgttgactttgaaattgattaccctggcaggtattgctgctcgtttctttgattgtttgggtttatgcataggtcatagctcacagttttctggttccatggacaagctaattgtatcaaagccactatctatcgggtatctttattcagttgctgagttgaagagtggcgcctattctaaagatacaactaacatatctctgcatgccacgtcaacatttgcagcctccaaaatatctgttatccatgataatgctttgccaaattcattacttggtacagttgaatatgagttgccccatgtgcctccatggtttattcatgctggtatccagaagctttatggggttcttgctggaataattagacttgttggcctatcaacagtgtcaggaaccgggccatgttgatgttcaaaagagttgtcagaagttcatgacatctggtatttattatatcttcttttgtagtgggctggtgtggtctgcttagcagcaggtagcactacaaccagcaatgtatggatgaattgaaggtagtaaagaacgcatgcaatcttatagaaactctacatcttgaaactggcatgattgacaaagaagctggatgcatcctttggattggtgtcttcttatcatcaagcagtaatgtgaagcaagttcatttgttgactaagaacagatgagcacaaatcagtgaagagttcattgcactagagatggaggatggataggtggtagatttcaatatggctttgatactattgtttctctttacaatctttgtacataacaagaaaaatgacgttgtatgtggatactattgtaattcaagaatttatttctgaataataaatatatttgtttataa

SEQ ID NO: 144985 - DNA, 1720 bp, Zea Mays
cggtcacctccagccctagcgccatctgctctgtacccccaccgctaacctcctcagctctggcctgcccgcgctcctcctcgttgcctggatccggcagcccctccatgctcatccgcccctttcccgctctctcctcgaccggctcgctcccgcttgcaaccacccacaccctgttctgctccagagacagtcctggcggcgctgaaggaggagacgcagcagcggatggatgacgcatcgattggaggtcattggtggccactcacgcctcctcagacctcaccctcacttcgtcgtcagcgcaggtttggccaacggcccccgaccggatcgcaggtcctcctcacggtgaggcacagcccacagagtcgagccggacatcacaaccatgaccatgaggcatcgtcgcagcagtcggagtcatttttgctgccccctcccgacacctgtaaattttgtatgccttcacgccgtgaagccacatttgcggccattggcaatggctgtatccactgtttcgatccatatatttggtgatgtcccttcttcacctcttgttgggctgcttcaggacaaaatcaataactggagggagacatctcttatattgacatccatccttttcgctgcagttgtgttctggttcattggtgtgtctgaggctgcacaagatgctcttgatcatcttttcaaccaaggccacaatctcgtaacagaaaatgagatttctgatacctttactaggctggttgaaaggctaccacaagtggtacttggaagcgaggagacaaccacactttcacatgctaggatgttgttggctctgaccttttatgctggtccctagtttctgataaatcatcttcactgttctcctgtattgctgctcgtttctttgattgtttgggtttatgcataggtcatagctcacagttttctggttccatggacaagctaattgtatcaaagccactatctatcgggtatctttattcagttgctgagttgaagagtggcgcctattctaaagatacaactaacatatctctgcatgccacgtcaacatttgcagcctccaaaatatctgttatccatgataatgctttgccaaattcattacttggtacagttgaatatgagttgccccatgtgcctccatggtttattcatgctggtatccagaagctttatggggttcttgctggaataattagacttgttggcctatcaacagtgtcaggaaccgggccatgttgatgttcaaaagagttgtcagaagttcatgacatctggtatttattatatcttcttttgtagtgggctggtgtggtctgcttagcagcaggtagcactacaaccagcaatgtatggatgaattgaaggtagtaaagaacgcatgcaatcttatagaaactctacatcttgaaactggcatgattgacaaagaagctggatgcatcctttggattggtgtcttcttatcatcaagcagtaatgtgaagcaagttcatttgttgactaagaacagatgagcacaaatcagtgaagagttcattgcactagagatggaggatggataggtggtagatttcaatatggctttgatactattgtttctctttacaatctttgtacataacaagaaaaatgacgttgtatgtggatactattgtaattcaagaatttatttctgaataataaatatatttgtttataa

SEQ ID NO: 144986 - DNA, 1977 bp, Zea Mays
aaaccctaaactaacatagttcatcacttattaattcatccaatacaagtataggctttgttttacagataaattctagctcattcgagttaacgagctggctcgagctcgtgtcgagctggctcgttaacgaaccgagctgagatgttagctcagctcatgataaaattgaaacgagccgagtcgagccgagccgagctggccacgagtcgagcgagctcacgagccacgagtattttgtccagccctagagaccgtgcactggactcagcctcatgctgctgctgcatcagaaatcgtcgacgaccaaggcaccgacgccccgcgtatccgggctccgccgagatccgcacgcaaaagcggtgggccctggcacagtcgccgacacttacgcggtttgtagagccaacgcggacgccccaaggcaccagtcgccgatgagcttcgcggcggcagtgcacgcgatcgcgacgcgtctgtgcctctgttgaccgacttcaatttgccgcgacgatccagatcagacagggtctctccgttgccgtttgtggaaggccaggcgacacgtcgccacgcccgtcttgacaaatacagacagggcacgcacgcgccgccataccgacagttccgtctcaaactctctacctgctccgctgcccacacggcacacgagctgtcagctatatactccatcgcacgtccaaccccagggaaacacccatccaagataccgacgagcaggccagagcgaaggaatggactccatggccagcgacgacagcaaccaaggagcagcagccaagccgaagccgaagccaccaccgctaccgctgtccgtgcgcctccagctggccgggctgacagcggccatcgacgccgtggagcgccgcgacgggacggtgaaccgctgcctgtacggcgtgatcgaccggctcctgagcgcgcgcgccagcccgcgcccggacgcctccggggtgcgctcctacgacgtgaccatggacgcgtcccgcggcatctgggcgcgcgtcttcgcgccggccgcggcggaccgcccgctccccgtggtggtgtacttccacggcggcggcttcgcgctcttctccccggccatcgggcccttcaacggcgtgtgccgccgcctctgcgccgcgctcggcgccgtcgtggtgtccgtcaactaccgcctggccccggagcaccgctggcccgccgcctacgacgacggcgtcgacgcgctgcgcttcctcgacgcccgcggcggcgtcccgggcctggacgacggcgtgcccgtcgacctcggcacctgcttcctggccggggagagcgcgggcggaaacatcgtgcaccacgtcgccaaccgctgggcggcggcgtggcagccgtccgcgcgggccctccgcgtcgcgggcgtcttccccgtgcagccctacttcggcggcgtggagcgcacgccgtcggagctggagctagagggcgtggcgcccgtggtcaacctcaggcgctccgacttctcgtggaccgcgttcctgcccgacggcgccacccgcgaccacccggccgcgcacgtcaccgacgacaacgccgacctcgccgacgacttcccgcccgccatggtcattatcggcggcttcgacccgctcatggactggcagcgacgctacgccgacgtgctgcgccggaaggggaaggaggtgctggtggccgagtacccaggcatgttccacggcttctacggcttcccggagctccccgaggctaccaaggtgctgcaggatatgaaggccttcgtcgacagccacatacccacgcccaagctcgccgacgcgtgatgcacgaacaccatcccattccattctagtgtcatgagtcatgactgcttggttcatctatctgctgtcaaaatatatacttcctatatattaaagcagggcgcaaagcttccatctggtgcgcccacgtcatttgtgttttctcttc

SEQ ID NO: 144987 - DNA, 1433 bp, Zea Mays
agggtactagtaagcgacagactgggaggaagaagcccaggtgaaaccggcatggcgacggtcgcagcccgccgcctcctccagccgcgatgggtggccggtgggcggtgccggctgctgggcaccgcagcggaggcttctccgggcggagagggcgcgcgaggagggggaggtggatccggcgacgcgatctttgtgaagaagccggcggccgccgcggccgtgatgacgagggacgagacgtcggtggcgatgccgacgtcgttcatgaccgggtctgtggtcggtaagcgcttctaccgcgacgccaccgtacggcgcgccgacgatggcaatgggtggaccgtgatgctggactaccgcacgctcaagtcgccggccaagcgggtcctcaagctgccctcgcgcgccctcgccatggccatcgccgccgagtgggagtaccaggaatcagatggaattcgacctttcacaatgcctcttatgaagcttgcttgcactgcattggagagagttcctttgacacgcagaaaagtgattgacaatttgatgaagaaatttcatcaagatttggtattttgccgctcacctgctgatagtgaactgaccattggagttcatcaaaagcagaaggagaaaatcgatccgattctggagtgggtagacactgaatttgggttcaaacccgttgtctacacaagcttctttggggggaagcaagacgagggccttgctaaagctgtagaaactgttctgaagaaagcaactgactgtgagttggcatccattgatgctatggctgcagcagcccattccttggtgatccctcttgcaatatttagagaaaggttgggtattgaggaggccattgagttgatcaggcttgaagaagaccaccaggttgatcgatggggcttggtggaaggaggtcatgacgttgatatcgcggatcttaaagtgcagatgtcctcggctgttgtatttcttggactttcacggggactgtgaatgtttcttacctatatggctagttgtttatttccaagcttgtatgaatctgagaccaagagttgtagagaataattgccgcggaaggtcgatagcaaaccaagtatctgtactgtattcagcaatcagcagttctgatgttcgattttggattgagtccagaaaatgctgttgaggtttgaactagggagcccagcattcctctggctttgtactgttgtgagagtaagaacatatctaggaactagtattgcagtggcagtcactgagtcgatatatctacttctgcacctttcagctccagcagcacaagttgcatgatcgtattgaccggtcatttttagccatgctcaatttgctgtaacaaatagtgctgctaggtaccagtccatattggtcctaaaattaaattaaaaaaacacaaa

SEQ ID NO: 144988 - DNA, 1531 bp, Zea Mays
cgcggccgccgccgttcccgctcggtcccggggttccgtaggggcaggcgtcctatcttgccctagtggttaccttccaggggcaccgcgtgctggtggaggtctccaacggtagtgtccgtggaagacagttactcggcgccgtcatggcggcggccggtggcggaagggaagccaccacatccggctgtggtctcaagcgccgctacgcaccacacgaccaggaggaggagacgatgaatcaagatcagccttctaaggaagatcggtgtgggcgaatttggagtgggatcgacttgctcaaggacgtcactgaaaacaagcatgtcctacctactggacttgaaggcattgacagacttcttgggggcgggctgcgccaaggtcagctcacagaggttactggaccatcatcttctggtaaaacacaggtttgtctacattctgcttcacatgctccagtgaagcatacgggtgtggttatgtacttggatactagtaattctttctctcctagtcgtattgccaccataattgatggaactaacgacctatctgatcaaaaaggttttgacttgctgtctaaggagaggctcaagactgtgatgcaaagcatcatctgcgagtctgtgtttgatatatttggtatgtttgaagtactacatcaacttgaagtttctctactgaatgaaaaggtaataggtgatggcaggagaatttgcttacttataattgactcaatatcatccttacttgctcccattattggaggcaagtatccacaagggcgatcgatgatgatatcactggcgatgatcctaaagaagttagcctatgagcataatctagctgttctggtgaccaatcatatggtttcagctggcaatggtgctgtcaagcctgctcttggtgagagctggaaatctgttccacatgtccgcctgatgatatctcgtgaacatagtagtaatatctgcacgggaactgtgctgaagcacacactactggcttctggccgtactgcaaaattcgtgctgccctgataacctttcagacgaggtgatgataagttgccgttaagaactgatagacgattgatggttcatactctaagaacccacggcgaatgtcttctctgttcttcttggttgtacatatacggtgtatgtagtgtatactaagttgttggagtagcccttgcattttattttccttttgcaacaaatggtcaaatgtatcttatcacatgataaagtacatcttatgttgttttgtgcatgcttggttggttactagagattgcaacggagaaatccccgtcggtgaatagctctccatccctatccccgtaaagaagtttatatgatcgcaaaacttatccaatgatcaaaccataatgcatatgcgtactttctgtcctaaaatatttgatctccacgaatattttagggtctgattgggaacatagtttctcaaaatcacagtttataataccatagtttaatgtatgtcataacataattataatata

SEQ ID NO: 144989 - DNA, 3063 bp, Zea Mays
cggtctccccctcgcgccctacccgcctccatcgcctgctagcgcgccaggccggactcttaaaccctagcgaggctcggccaatccccgcgtcaggatgccgtcagcgtcgggtccggtggccgtggcgtcggcgccggcgccggtgaagtccgcaccgtccctggccgtcgggatctcgccggacttgtacccaacggaggacgacctgccgtacgaggaggagatcctgcgggagcccttcaagctcaaggggtggtggcgctacctcgtggcccgcgcgaccgcgccgtttgccaagcgcgccgtcatctacgagcgcgcgctcaaggcgctcccgggaagctacaagctctggcacgcctacctccgcgaccgcctcgaccacgcgcgcccgcaccccatcgaccacccggcctactcctccctcaacaacacattcgagcgggcgctggccaccatgcacaagatgccgcgcgtctgggtcctctacctcacctcgctgctcgaccagcgcctgctcacgcgcgcgcgccgcgccttcgaccgcgcgctccgggcgctccccgtcacgcagcatgaccgcatctggccgctgtaccttcgcctcgcttcgcttccggcctgccccgtcgagacgtcgctccgagtcttccgccgatacctccaatttgacccctcccacgctgaggacttcatcaatttcctcatatcagccaaccactggcaggaggccgccaaccgtctagcttctgtgctcaacgacgacgggttccgctcagttaaggggaaaacgaggcaccagctctggcttgagctctgtgagatcctcaccaagcacgctgatgaggttgctggcctcaaggtggacgccatcttgcgtggtgggatacgcaagttcactgatgaggtcggcaagctgtggacctcactggctgattactatgtcaggagaggcctttttgaaaaagctagggatgtgtttgaggagggtgtttcttcagtggttaccgtcaaggagttcagtgtggtgtttgaggcatatacacagtttgagcagagtatgcttgcggcaaagcttgaggctgctgaggaagaaggggctgaggatgagaacgagggagggggcaggaagagtgggatggataagttatcgaagaaattcctcaatgaattctggttgaacgatgaggatgatactgatttgaggatggcaaggtttgagcggctgttggatcgcagaccagagcttcttagcagtgtgctgctgcgacagaatccacacaatgtggaggaatggcacaggagggtgaaactctttgaaaaggatcctgcaaggcaagtagcgacatatgttgaggccgtgaaaactgtagacccaatgaaggcagttgggaaaccacatactctgtgggtggcatttgcaaagatgtatgagaaacacagtcgtctagatagtgctgaagatatcttcaaacgggctactcaagttaattataaggcagttgaccatttagctagtatctggtgtgagtgggcagagatggagttgcgccacaacaattttgacaaggctattgaactgatgaggcaagcaacatcagaaccctctgttgaggttaagaggcgggctgctgctgagggggatgagcctgtccaaatgaaagtgcacaaatctttgaaactgtggagcttttatgttgatctggaggagagcctcggaaccttagactctacccgtgcggtttatgagagaatattggatttacgaattgccactccacagataattctcaattatgcatatctcctcgaggagcacaagtatttcgaagatgcatttaaagtgtatgaaaggggcgtgaaaatattcaagtatccccacgttaaggccatctgggtgacctaccttacaaagtttgtacatagatacaagcgaagcaagttagagcgagcaagagagcttttccatgaagctgtccaacaggctcctgcagaggaaaagaagcccctatatttacaatgggcaaaactggaggaagactatggtcttgcaaaacgtgctatgaatgtatatgatgaggctgtaagagctgttcctaactctgaaaaaatggccatgtacgaaatctatatagcacgcgctgccgaactctttggtgttccaaggacaagacaaatatatgagcaagcaattgaatctggcctcccagacagagatgtgctgacaatgtgcatgaaattcgctgagctagagagaagtcttggggaaatcgatcgttcgcgtgccatctatgtgcatgcatccaactatgctgatccaaacaatcctgacttttggaagaagtggaatgattttgagattcagcacggtaacgaagatacattcagggagatgcttcgtatcaaacgcacagtggctgctagccgcagtcagacacatttcatactgccagagtacttgatgcagagggatcagaagttaaacctggacgaagcagttgacactctgaagcgtgctggcgtccctgaggacgagatggcagctttggaaaggcaactggctaccggaccatctactgccccaccagcagcaccaagcactgccccagcctctgctaacaggatgatgaactttgtcagtgctggagtagaggcccaggtcgagagcagcaggcaacaggctgctaacaatgaggacattgagctgcccgatgagagtgacgatgaggaacccgatgtccaaattgcggagaagagcgttcctgctgcggtatttggtgagctcggcaagagagctgccgagaacaatgaggaaagctcaggtgcccaagggaatgagcagctgggcgccctcgagaggataaagagacgacgccaatagtctgcctctgctaagatgagagcccatgtgtgcaccatgacatccgtacgatctttagcgatgttgtacttgtaaacattttttcgagtggaattttactcctgtgcaaagcatttacgtaagttgttcgggggtatacccgctgctaatatgatgccgaaacgttattatctttggtc

SEQ ID NO: 144990 - DNA, 1607 bp, Zea Mays
ctgcgagacgcccacctagcagcgacgccactggggccgcccgctccatcgcgtcgacgtcgaggacgccgcgccgccaatcaccgccccgctccctcctctccaccgcttacaatccccagaaggcggtcgccggtctccccctcgcgccctacccgcctccatcgcctgctagcgcgccaggccggactcttaaaccctagcgaggctcggccaatccccgcgtcaggatgccgtcagcgtcgggtccggtggccgtggcgtcggcgccggcgccggtgaagtccgcaccgtccctggccgtcgggatctcgccggacttgtacccaacggaggacgacctgccgtacgaggaggagatcctgcgggagcccttcaagctcaaggggtggtggcgctacctcgtggcccgcgcgaccgcgccgtttgccaagcgcgccgtcatctacgagcgcgcgctcaaggcgctcccgggaagctacaagctctggcacgcctacctccgcgaccgcctcgaccacgcgcgcccgcaccccatcgaccacccggcctactcctccctcaacaacacattcgagcgggcgctggccaccatgcacaagatgccgcgcgtctgggtcctctacctcacctcgctgctcgaccagcgcctgctcacgcgcgcgcgccgcgccttcgaccgcgcgctccgggcgctccccgtcacgcagcatgaccgcatctggccgctgtaccttcgcctcgcttcgcttccggcctgccccgtcgagacgtcgctccgagtcttccgccgatacctccaatttgacccctcccacgctgaggacttcatcaatttcctcatatcagccaaccactggcaggaggccgccaaccgtctagcttctgtgctcaacgacgacgggttccgctcagttaaggggaaaacgaggcaccagctctggcttgagctctgtgagatcctcaccaagcacgctgatgaggttgctggcctcaaggtggacgccatcttgcgtggtgggatacgcaagttcactgatgaggtcggcaagctgtggacctcactggctgattactatgtcaggagaggcctttttgaaaaagctagggatgtgtttgaggagggtgtttcttcagtggttaccgtcaaggagttcagtgtggtgtttgaggcatatacacagtttgagcagagtatgcttgcggcaaagcttgaggctgctgaggaagaaggggctgaggatgagaacgagggagggggcaggaagagtgggatggataagttatcgaagaaattcctcaatgaattctggttgaacgatgaggatgatactgatttgaggatggcaaggtttgagcggctgttggatcgcagaccagagcttcttagcagtgtgctgctgcgacagaatccacacaatgtggaggaatggcacaggtgtgatctgctataacacctgaactttattggttgtgctgtctaggcagatttatcacctggatgtgtgcagattgagctagcaattgtgtatcacagtcaactgttaatgtttctgagggattgttcagtttctggcaccctttgaatgcatgcccccaccccccac

SEQ ID NO: 144991 - DNA, 586 bp, Zea Mays
ttagatgttttgccaatgataaccctgaggtgcatatcgttttatgttttatatatgccccatctgatatctgtttgacgattcatgtcttgttgtatcaggaggagaatgcaaccgagccacctcagtcggtacaaagaggcgttaccgagctggtggaagcggcattgtcgtccaggaacctgtgcatgatggatccgacgtggcacccatggttctgaaggcatccagcacctctgtagcctgaccaaactgacggcgtgtacagattttcatgtccggcaacgctggttgagactagaaaactcgttgcgttatgtagataaagccagggtgtcatcatgtgttcgctggtgtaatggagcagattagcttggtaattaatgagacattgcatttcttaacttacttttaggcagacggtttcggttccaatatactctcgacggtagttcgtcgacgtccttgccgaactaacctagcaccttggcagaaccataaaagtggcctacaaaatcactgcttggaagtatcgtttatttatttaacttgggtctatttattgcctgttgtgcaaaagaaaaag

SEQ ID NO: 144992 - DNA, 1342 bp, Zea Mays
ggcgcctatccacgccagacacaacgtccgcagtgatgggcgacctctaaggcctgaacggtgccaccataggcttctcggcggccggcggcccggaggaggcgactgaagaggaggacatgcggggctgcgagggatgcgctcgccggtggccgaagttggggctaagctggggctgtgcacagtcgagaagacgaaggcaaggcgagtcactccatcacgctatgcatgtcaccaaggcgcggcctcccaatctcgagcctatacttttcaatgagggttatggatttagcagcaggggaactcccggagattgtgcctcttggaaaaggcttctttcttgccaactatcctatttcaattttggattgaccattatcgttcgcgttcctttgttctccatcttcagatttattggaacttgagctagcacctgtatgagtcaagagcctagacttttcaacgagggttatggatttggcagcaggggaactcccagagattgtgcctcttggaaaaggcttctttcttgccaactatcctatttcaattttggattgaccattatcgttcgcgttcctttgttctccatcttttacctcttgtagttacacaagaacaacttgattgtgctaaacatgcaatcaaatctgcagttctgatgaacttggaatcaagggctcaagtaacctgtctctttttggtcattgtgctccaacgtgacatcacaacaatcattgaggagtgtaaccggcaacctcagctctgaaagaaccctagagtaaacactcacatcaagacactccactgttcactcttgtgctgctcctaccaatggagcaagagcatctccacctggcaatggtccactcgttgtattcatcactaagtcagctcgattccaccaatgggtgttcatgctgttggatggaaaatgacaacccctctttgcatcatgcactgttttgtctttctaaaatatttctgtttgctcctagcggcttgaacccctacaagtgcacctggcattggttaccaatctgcagattcataacatctcatgaaaaggatacgtgttggacaaccagataaggtattacagagaatatgaataatctggaggttctactgatgcatgtaaattatggaattatggtttcaattctagattatttgataatggcacctctatatgctcattgggcaatgatcagaaagttggaggtcatagaaatactgagaatggtgaattttgtttacatttatgggcacttttgaaaagaaattattttgtatggtagtattgttgaaaagatcaataattttagagactttgatgatc

SEQ ID NO: 144993 - DNA, 459 bp, Zea Mays
catgaaccaaacctctttgttgaatgtgattttgagactgaaagttactgtcgtatgatggtatatgtgggatttgcttgtcagtttttcctttcgaggttgcgggggctgctacctcagcgtattttgtggtgctcgagctcgagtggagtgcctttctaacctggggtttctttgctttcctatcagtcgtttaaggagatcacacaacttttgacattggagaactttaggaaaaatgagtagctttctaagtatggtgtgcaagagcaataatgcttgttgggccgaagaagctgattgaagctaaccccttgttgcatgacaagctacaattttccagcccgaagaattctaggtgggtttggattgtggaaataaactactataaggatattgatatgaaacaaatagcaagtgaccgatgcaagatattgacgtactctcaattgacgtact

SEQ ID NO: 144994 - DNA, 115 bp, Zea Mays
gttctctattttccattcccaaatcaattcaaatgcagttttaaattacaaatttatttagaatgcacagttcaagaactccagcatgaatataatttgtttaattaatttattt

SEQ ID NO: 144995 - DNA, 467 bp, Zea Mays
cattgaagacacatgcaggtagacatacacatccacaataatattatgtagcatacacggtacaaccctcgagtttgtttctactttggaaagtttatctagtccatcaaaattcaccagctgcttgagtgcatcaaataaatgatggtttaaagaaaccaggaaggctacatttccttacacagaaaggagctccatcagtttgtattatttcggtaggaagaaatcaggaaactagtacaggggcaacatggctgacacattatgcagaagccgccaacagctccctttcagctcgctcgcggatcctccgctccaactctggcctgaagtgcctgataagcccctgcacaggccatgccgcagcatccccaagcgcacagatagtatgcccttcgatttgcttcgtgacctcatgaagcatgtcaatttcctccagcttcgcgtttgccctgcttcccttcaag

SEQ ID NO: 144996 - DNA, 1695 bp, Zea Mays
cacgctgctgtacgcacgcgagggagcatatagcaagcacggacgcgacgcgagctcgacgggcggcctacgctcgggaactgctgccgctgcacctgcacctgcccgtcggtgggtcgatcgccgcgtcgccggcctgtctccaacttcgacatgcccgaggacggcgcgccgatgcacgtgctgcggcgcgtcctcgacggcctgcagtgcctgcacccgcggcggcggcggcggcacggcggcggcgcggggccgcccaagcaggcgcgcgtggccgtgcggcggctcggcaccggcaaggccacgccgtgcggcggcggtggtggcggagggcgggaggtgacgacgatccgcgtggcgacgttcaacgcggccatgttctccatggcgcccgcggtgtccggcgaggggacgtcgggggcgggggcggagcgcgggggagggctccccggcagcccgggcggcggcgcgcggcggccgcccaagggcatcctgaaggcgcaggcggcgtcgagcctggcgcggtcgccgagcaggccgcgcgtgtccatcaacgtccaggacaacgagatctccctggagcggacccggctgtggcgcggcgtcggcggcaacggcaagaggcagcagcagcagcagcagcagcaggcggggccgcggaggcggagcgtggaggaggtgctgcgcgaggccggcgccgacatcatcgggctgcagaacgtgcgcgccgaggaggagcgcgggatgcggccgctgtcggagctggccgagggcctgggcatgcgctacgtgttcgccgagagctgggcgccccagtacggcaacgccgtgctctcccgctggcccatcaagcgctggaaggcgcaccgcgtcgccgaccagtcggacttccggaacgtgctgcgcgtgacgatcgaggtgccggacgccggcgaggtgaacttccactgcacgcacctggaccacctggacgaggggtggaggatgaagcaggtggacgccatcatgcgctccggcggcgacggcccgcacatcctcgccggcggcctcaacgcgctcgacggcaccgactactccgccgaccgatgggccgacatcgtcaagtactacgaggagatcggcaagccgacgcccaaggtggaggtgatgcagtacctcaaggcgaagcagtacgtcgacgccaaggacttcgcgggagaatgcgaggcggtggtggtcgtggccaaagggcaagacgtgcaggggacgtgcaagtacggcacgagggtggactacatcatggcgtcgcccaactgcccctacaagttcgtgcccggatcctacacggtcgtctcctccaaagggacgtcggaccatcacgtcgtccgggtcgacgtcgccgtacctcacgccagagagcccgatgacgccgaggccaccgcgaacgggcagcgcagcagagtggtcaagatgaccaagaagagctcgagaaaggggatatggggagctaaatgaatgaacagggtagttttgtgtgtgtgtgtgtttttttctctcaaagtttcttttggccgcgttctttctttttttatctgggggtgatgtggagggtgggttgcttggaattgtgtatatgcctgtggtggttgctttgaggccgaaggtgcctggtttgcagtggctgctgcgatagatgtggccaacgagtggaaa

SEQ ID NO: 144997 - DNA, 492 bp, Zea Mays
gaataaagttctgccaaagtggaggtaactttatggagtagtagaacaatagactagcatttgagctgttatggaaaattggctaatccgaagtgtgaagaaaagtgtgaggacaagctaggcaaatggctgtaaggacaaagtaaactttcctaaagtactgctgataaagtgataaaaaggaatgctggctatcttgttggtcccaaaactgacatatcatttcagattgaactgatgattgctgaattactagggtcgtacctgcattttgtcgattttattttgatttggtccaaaggtgactatagtttggatggtcccctttatcataacctcctagttttccaccccaacatttcctccagttttgaaacaatatatacttatacaacaaaaccaggctgctaatagctgtttcccgttctcatgcttttttatgtactccggccgttcacaaatatatgataccgttgacttttttttaaaatt

SEQ ID NO: 144998 - DNA, 2561 bp, Zea Mays
gaaaaattgagcgattctatcctatcttttgttgagtggacagaggaggaggaattggtcatgagccactaaattcggtcgatttgacatataataatatctatgaaatattggaacggtttcctttcaagaatccaaccaaaccccgactctgtcctagaatatgtcccagtcagatgagtgtcttgcggttgctttaagcctttaactccccgagcctgcaaaatcacacacccacagagcagagagggggagaggctccaaaccctagccacacacgacgcaacgcaacgccgatggggtgcgcgcagggcaagtgctgcctacggcggcacccgaggaggggctccgccgctgccgccgttggcggcggcgccacgctcggccgcgccgcggtgcccggggccgggctggtactggagtacgccgcgctggctgtggcggggctgtacccggactccacagcccgggagtcccaggacgcgcaccttgtcgccacgcgcttcgcgggggacccggacctccacctcttcgctgtcttcgacggtcatggcactgccggcaccgcctgcgctgggttcgcgcgggacgcgctcccgcgcctcctcgcgtcgctctccctcgccagcgccgccgaccccaccgcggcgttccgcgaggccatgctgggcgccaacgccgagatgcacgcggctcccgaggtcgacgactccatgagcgggaccaccgccgtggccgccctcgtctccggcggcgctctccacgtcgccaacgtcggcgactcgcgcgccgtcgccggggtctggcgcgccggccgcgtcgtcgccgaggacctctcctgggaccagactccgttccgcgccgacgagcgcgagcgcgtcagggcctgcggtgcccgggtcatgtccgtcgaacaggtggagggcatgcgcgatccggaggccgagcgctgggcgcccgacgagggggacccgccccgcgtctgggcgcgcgacggcctctaccccggcacagccttcacgcgcagcctcggtgacctcgccgccgaggccatcggggtcatcgccgagccggaggtcaagagcgtcgagatcactccatcgcacctcttcttcgttgtcgccagcgatggcgtgttcgagttcctctccagccaggaagttgttgacagggttgccacgtatcaagatcctcgagatgcctgctcagcaatcgctgcagagtcatacaaactatggctggagcacgaaaataggacagatgatataacgataatcattgtgcatatccgagacatggaaagtgccctgcagggagtgacaaagcggactacggtagcgtgggagcgtcaatagctgtgcacgcaatacagtcagagatgcttccaagcccgtgcaaagcgagcagcgagctgcatcacaaccggtgcaaacttggcatcaaatggacgggggtactggattggtctatgcagcaaagcatcccacctccaacctcctgatgaaagtggagaatggaagttgaatgacaaaaggaggcctcgcaataacccaccgccatcctccagagctactaaccgtacaatggatgtgatgtctgccagcagcaaatctcgtgttgctgctcttgttttggtagagcatctgctgctgccgacgatgcaaggtttctgatcctgtgtgggatctagccatgagcaaggtttccgtggaatggagtgtagttaggtgggtgtcaatgtatgtttggagctaaacccatatctgcgatcattttagtttatttttgtaatttaaatgtcttgggtctgcctggcacgattatactgacagaacgtgtttagatcttgctcgtggcctaccgtgctggtctgacccaaatcgtgctttaggtactttactgacaatgacatgattcgagaagaaaaatgacgcttctatatttcattcctgccaaacaagaacgctttaacttggcagtgttagttttcacttccacaaaatctagctttacaagttacaacaaatgtggaaggatggtgtaacaaaacccttccagccttactacggggctcaaaagtatatggaaagtgtctcatcgatcctgtcctgcagcttggtgcactgctccagtagccgggaaagcttgtcgtccgtctcgatgggcatcacctcgcccaactctactcttagctgggaaagcttgtcgtctgtctcgatgggcatcacctctcccaactctactcttcttggtatgtacatttcatcaactccatgcacgccgttgttgtcagcaagtgcctgaggttcttcatgaacatgcacaggcagtcgtggtgccagagttacgggctgcgcatcaacagcatcgaggtcacaactgatctcaatgatttcgtctagtgtgatgccggttgaaacagcaggcatcatgatgtgatccacagcatcgctgctggcggtgttagcagtaagcccttgtgtggtaccatttgagccagctgctgcaggagcctgatacaggtgctgagtcagagcataagcttcggagaactttccggt

SEQ ID NO: 144999 - DNA, 1350 bp, Zea Mays
atcacacacccacagagcagagagggggagaggctccaaaccctagccacacacgacgcaacgcaacgccgatggggtgcgcgcagggcaagtgctgcctacggcggcacccgaggaggggctccgccgctgccgccgttggcggcggcgccacgctcggccgcgccgcggtgcccggggccgggctggtactggagtacgccgcgctggctgtggcggggctgtacccggactccacagcccgggagtcccaggacgcgcaccttgtcgccacgcgcttcgcgggggacccggacctccacctcttcgctgtcttcgacggtcatggcactgccggcaccgcctgcgctgggttcgcgcgggacgcgctcccgcgcctcctcgcgtcgctctccctcgccagcgccgccgaccccaccgcggcgttccgcgaggccatgctgggcgccaacgccgagatgcacgcggctcccgaggtcgacgactccatgagcgggaccaccgccgtggccgccctcgtctccggcggcgctctccacgtcgccaacgtcggcgactcgcgcgccgtcgccggggtctggcgcgccggccgcgtcgtcgccgaggacctctcctgggaccagactccgttccgcgccgacgagcgcgagcgcgtcagggcctgcggtgcccgggtcatgtccgtcgaacaggtggagggcatgcgcgatccggaggccgagcgctgggcgcccgacgagggggacccgccccgcgtctgggcgcgcgacggcctctaccccggcacagccttcacgcgcagcctcggtgacctcgccgccgaggccatcggggtcatcgccgagccggaggtcaagagcgtcgagatcactccatcgcacctcttcttcgttgtcgccagcgatggcgtgttcgagttcctctccagccaggaagttgttgacagggttgccacgtatcaagatcctcgagatgcctgctcagcaatcgctgcagagtcatacaaactatggctggagcacgaaaataggacagatgatataacgataatcattgtgcatatccgagacatggaaagtgccctgcagggagtgacaaagcggactacggtagcgtgggagcgtcaatagctgtgcacgcaatacagtcagaggtacctgtatttgtagaatcagaagcaagtcacatgaacagatctttctcctatacaccctttgctgatgcatggcagaatatcagatgcttccaagcccgtgcaaagcgagcagcgagctgcatcacaaccggtgcaaacttggcatcaaatggacgggggtactggattggtctatgcagcaaagcatcccacct

SEQ ID NO: 145000 - DNA, 1844 bp, Zea Mays
atgacgacggcgtggtgttggccgtggccgtggcaagcgaccttgctcgcggccgcggcgtggctgtgcctgcacgcggccgtggcgcggctcatggaggcgctgtggtggcggccgcgccggctggagcgccacttcgcgcgccacggcgtgcgtgggccgggctaccgcttgtacctgggcagctccatcgagctcagccgcctcatggaggacgcctcctcccgccccgcgccgcgcgatgagccgcaccgagttctgccccgggtgctcgccttccaccaccattgggacaaactctacggtccaatgcatctgatctggttcgggacgacgccgcggctggtcgtgagctcgccggagctgatccgggaggtgctgctgtcgcggtcgcagcattttgaccggtacgaggcacacccgctgatccgccagttcgagggcctcggcctcagcaacatccacggcgacgagtgggcgcgccgccgcaagatcctggcgcccgccttccacgccgagaacctcaagctgctcgcgcccttcgtcgccggcaccgtgcagcggatgctggaggagcgcgtgctgctgccgggcgggcccggcgaggtggagctggacgtcgcggactggtaccggcggctgccgcaggaggtcatcaccgtcgccacgttcggccgcaacaacagcgacgagggcagcgccgtgttccggctgcaggccgagcacgccagctacgccaccgaggcgcacagcaaggtcttcttcccgggctacaggttcctgcccaccaggaggaacaggcgcgtgtggcagctggacagggagatcaggagactgctggccaagctcgtcgccggactgcagagcggcggcagcggtgatcaccgacaccagggccgggaccacgggcgcgccggcggcggcatgagggacttcatgagcttcatggccccggccatggcggcggacgagatcatcgaggaatccaagaacttcttcttcgccgggcaggagacgctcaccagtttgctcacctgggccaccgtcgcgctagccatgcaccaggaatggcaagaccgcgctcgcgaggaggtcatggaagtctgcggcagccgggccgtccccaccaaggaccacatacccaggctcaagacgctcgggatggtcatcaacgagacgctcaggctctacccgccggcggtggccatgatccggaaggcgaagcgggacgtggagctcggcggctgcgtggtgccggcgggcacggagatcatgatccccatcatggcggtacaccacgacgccggcgtgtggggcgacgacgccacggagttcgaccccgcgcgcttcgcggacgatggtgaccgccggccgcggcagcagatggcgttcttcccgttcggcggcggcgcgcgggtgtgcatcggccagtacctggcgctcatggaggccaagatcgccttggctacggtgctgcagcgctgcaagttccgcctgtcgccggcgtacgtgcacgcgccgagggtgcttatgattctcaacccacagcacggcgcgccggtcatcttccggccattgtgaagccagccatctcgcagcttcgatcgaattcaattgcttcttgtaaataagttatcatctctcattgccaattgcaaatatataaagtatatcatacttacgtgacaggtgtcagatgtacaaagaaggatagaaacatttctagcgacatttgttcactcgtaccaattcgtatatacgtatttggccttgagaaattgaaccgaagtgtacgtgtcctttggaaagaagaggaagaaagaagaaggggaagggaaaggaag

SEQ ID NO: 145001 - DNA, 702 bp, Zea Mays
aagccgtggcctccctgactcaattatattccttcgcttccgtcaggtcgggtccgcagcctccccctctcgcagatccccacctgctccgccgccggccaccgcgttgctcccctcggcagccaggatgacagaagcaccatttctgccgcgtgagaggctcttcaagcagcaacattacttccagaacttgaccaagcacacctacctgaaagggcgctacgacgtgatcacatctgtcgccatcccccttgcactcgctgcctccagcatgttcatgattgggcgtggagtttataacatgtctcatggggttgggaagaaagagtgatcttccactggttaactattgtttctgcttgtcatggaagtcataccgtcgagactgcgaagtcctcttcgcttgcaaaataatacggccaaataacaattcgactacattttcgcatcaattttctgtttgtatttgtgggtgtgaagtggcagtaacttgaaaatcagcactgtcactgttttggttagttactccattcctttcgtcttttgtgtcccctttcaatagaagcaagctggccttgtacttcctccattcttttttttagttgtcacggtttagttcaaaaaaatgaactagcgggcgacaattatttagttcaaaaatgctctgttcatcaacatgcacgtaacgtaaggggtctgtgg

SEQ ID NO: 145002 - DNA, 1868 bp, Zea Mays
gagacggcagtcacgaacccgtccgtgcacgccaagcgaaagccgaaagaaagcgaagcgagagcaaacagccctccccggccggctgttcggcctgttcccctcccgagtcccgtccctgcggccaaacccacgaccaacgtctccgatccgatccaagccgccatggatttcttcaagtccatcctcgccgagcccgatccggacccggcctctccgccgccggagcaggagccggagccggagccggagcccgccggatccgcctcatcctccagcggcggcgggtgggggttcggtggcctgctcaagacgctcacctcgcagtccgagaccgtcctggaggcctaccgccgcgacctcgccgagtttggcaccggcctgcgccgcgagaccgaggtgcttcgcgaggccgccgcccgggccgcgcgggacctgccgtcctccgcgcacgcgctagacggactcgccgacatcgtcgcgcagggcaaggaggcgctctcccaggccgccgccgccgccggtggcggcccccaggcctctgacggcggcgactccgaccccagctccgcctccgggacccacgtccggtacagccgcttcgaggcgcagctgcgcgcgctccaggcggatccggccacgttcacgtccgatcccgaggacgccgaggacttcgccgcgtggagcaaggggtttatcctggacgagagggaggaggagatcgaggccctgtgctacgacagcgacgcgctggaagccatggcggacaggctcgtcccggacgccgtgccccgcgaggtgttctggccgaggtacttttaccgcgtccataagctgaagcagcaggaggacgccagggcgaagctcgtgcagcgtgtgattgcgcaggaggaggacgaggacttgagctgggaggtcgatgacgacgaagaggaagaggaagagcagcagaaagacagcacggaggagctagcagaacagaggcaagagccgatcaaagaagaagtcaggcaggatatggctgagaaagaaaatgtggagagaattgtagaagaaagtggagttgagacggtggaagaggcgcctggtttggtgaaggaagagaagaatgccgcagagccgcagccaattgttctcggtagctctttggtggtagtggacaaggaggaggaacgggaaaaagcagttctcggtagctctttcggtgtggtgggtgagggtgagaatgcagagccctccaagtcgaatgtcgaagaatcaggtgccaagaaggaaggagcgaagcatgagacgagtgattcgagcaaggacagcgattactccatagtgtctagacagcgaactgcggaggaagaggatcttgagtgggatgagattgaggatctaggagagcatgaagaaaagaaaggcggcatccagacctcaagccctgctctgaaggaggagctgcgcaagaggctgagcattgccgaagatgatgaggatttaagctgggatatcgaggatgatgatgacaatgcctgaatgccattggtggtatggaagtgtcagttgtatttctacattttgtaccttccattactcgcgcaagttactgtgatttggccaataatgattggctatccttatgctatggacacgtgtgtatactgtaaactctccagtttgatgatatcaagtggcaattggctaagcgtcaatctattaggttgtctttgtggtatttaccgtaaacatgccatgtttatttgacttgtgtcacatgttataatgttgtttgtttattaatgtacatttgctgcaccagaatttgggatagcgtttgaacaatttatattagaaccaccattgccacaggacaccttttt

SEQ ID NO: 145003 - DNA, 1838 bp, Zea Mays
tcctggtatccagttcctttctttgcccctcctccgctttcttcggttcttcctctcccccactccccacgctgcctgagaggctgagactaggaaggggaaggaaaataatagtttggcgcgcaaatatccgcctccattcgtacgccgctattctcgtctgcgatccgcagcgcgatgatgatcccgtggggcggcgtggggtgctgtctcagcgccgctgcgctgtatctcctcgggaggagcagcggaagtgatgcggaggtgctgaggtcggtggcgagggcgggcagcatgaaggatttagctgctatcttggacactgcaagtaaggtcctaccacttgtagttgccatctctgggagagttggttcagacacaccacttatatgccaacaaagcggcatgagaggtgtaattgttgaagaaacggcagagcaacacttcctgaagcacaatgatgccggatcctggattcaagattcggcagtgatgctttctgttagcaaagaggttccatggtatctgtttacaactgggatgcttctctaacctttaaacaatcactaggatgatggaactggacgtgtttatgtggtcggtgctcgttctgcagctggtttaattttaactgttgccagtgaggtttttgaggaatcagggaggacacttgtacgtggaactctagattatttacaagggttgaagatgctgggagtaaagcgaactgaaagggttcttccaactggaacctcattgacagttgttggtgaggtattatttctattatccattggtatgtgctgtgttgcattagtttttcttggcatgtctatatttgtctcttccttttgttctatattattattatatcacatgaacaggccattaaagatgatgttggaactattcgaattcagcgaccgcacaaaggacccttttatgcatcatcaaagagcattgatcaacttattgtgaatcttgggaaatgggccaagtaggaaaatttgttagaacatatttttggttgttacttcttagttagggcatcttatgctagtatcatgtttgtggcaggttataccgaattgcttccatgggttttgcaacatttggtgtcttccttcttgcaaagcgtgcactacagcattttctagaaagaagacggcggcatgaactgcaaaaaagggttcttaatgcagcagcacaaaggcaagctagagaagctgaagggagcaaaggtacatcagacgcagagcctaacagtaaaaaagatcaattagtgttggacatatgtgtcatatgccttgagcaagagtacaatgctgtttttgtgccgtgtggtcacatgtgttgctgtgtggcatgctcttcacatttgacgaactgcccactttgccggagaagaattgaccaagctgtcagaaccttccgccattgatggtgatatatgatgcaaaaaactggcatggtaccaccacatgtactgcttctgaaaccaatttattcttggaacttggaagtgctggctgctatcaaccaacgacatgaactgcaatactggggcgaagcagcttcaatgagtttgctttttgaactgaacagtgagtgatgcaagttgcaagctcataattgacagttgagatactctcactccctacatagtgccaatgggtgctcttgcctgtaatgtactacaactctgtacaggacgctcttgtgtaagtgcacatagattagcagcttgcttattgacaacatcgatgccggtaatatgtactgttgcccatcgggcatttgtgcaaaggaataacaaaatcagctcgtttagttgtgat

SEQ ID NO: 145004 - DNA, 1648 bp, Zea Mays
tcctggtatccagttcctttctttgcccctcctccgctttcttcggttcttcctctcccccactccccacgctgcctgagaggctgagactaggaaggggaaggaaaataatagtttggcgcgcaaatatccgcctccattcgtacgccgctattctcgtctgcgatccgcagcgcgatgatgatcccgtggggcggcgtggggtgctgtctcagcgccgctgcgctgtatctcctcgggaggagcagcggaagtgatgcggaggtgctgaggtcggtggcgagggcgggcagcatgaaggatttagctgctatcttggacactgcaagtaaggtcctaccacttgtagttgccatctctgggagagttggttcagacacaccacttatatgccaacaaagcggcatgagaggtgtaattgttgaagaaacggcagagcaacacttcctgaagcacaatgatgccggatcctggattcaagattcggcagtgatgctttctgttagcaaagaggttccatggtatctgtttacaactgggatgcttctctaacctttaaacaatcactaggatgatggaactggacgtgtttatgtggtcggtgctcgttctgcagctggtttaattttaactgttgccagtgaggtttttgaggaatcagggaggacacttgtacgtggaactctagattatttacaagggttgaagatgctgggagtaaagcgaactgaaagggttcttccaactggaacctcattgacagttgttggtgaggccattaaagatgatgttggaactattcgaattcagcgaccgcacaaaggacccttttatgcatcatcaaagagcattgatcaacttattgtgaatcttgggaaatgggccaagttataccgaattgcttccatgggttttgcaacatttggtgtcttccttcttgcaaagcgtgcactacagcattttctagaaagaagacggcggcatgaactgcaaaaaagggttcttaatgcagcagcacaaaggcaagctagagaagctgaagggagcaaaggtacatcagacgcagagcctaacagtaaaaaagatcaattagtgttggacatatgtgtcatatgccttgagcaagagtacaatgctgtttttgtgccgtgtggtcacatgtgttgctgtgtggcatgctcttcacatttgacgaactgcccactttgccggagaagaattgaccaagctgtcagaaccttccgccattgatggtgatatatgatgcaaaaaactggcatggtaccaccacatgtactgcttctgaaaccaatttattcttggaacttggaagtgctggctgctatcaaccaacgacatgaactgcaatactggggcgaagcagcttcaatgagtttgctttttgaactgaacagtgagtgatgcaagttgcaagctcataattgacagttgagatactctcactccctacatagtgccaatgggtgctcttgcctgtaatgtactacaactctgtacaggacgctcttgtgtaagtgcacatagattagcagcttgcttattgacaacatcgatgccggtaatatgtactgttgcccatcgggcatttgtgcaaaggaataacaaaatcagctcgtttagttgtgat

SEQ ID NO: 145005 - DNA, 1796 bp, Zea Mays
tcctggtatccagttcctttctttgcccctcctccgctttcttcggttcttcctctcccccactccccacgctgcctgagaggctgagactaggaaggggaaggaaaataatagtttggcgcgcaaatatccgcctccattcgtacgccgctattctcgtctgcgatccgcagcgcgatgatgatcccgtggggcggcgtggggtgctgtctcagcgccgctgcgctgtatctcctcgggaggagcagcggaagtgatgcggaggtgctgaggtcggtggcgagggcgggcagcatgaaggatttagctgctatcttggacactgcaagtaaggtcctaccacttgtagttgccatctctgggagagttggttcagacacaccacttatatgccaacaaagcggcatgagaggtgtaattgttgaagaaacggcagagcaacacttcctgaagcacaatgatgccggatcctggattcaagattcggcagtgatgctttctgttagcaaagaggttccatggtatctggatgatggaactggacgtgtttatgtggtcggtgctcgttctgcagctggtttaattttaactgttgccagtgaggtttttgaggaatcagggaggacacttgtacgtggaactctagattatttacaagggttgaagatgctgggagtaaagcgaactgaaagggttcttccaactggaacctcattgacagttgttggtgaggtattatttctattatccattggtatgtgctgtgttgcattagtttttcttggcatgtctatatttgtctcttccttttgttctatattattattatatcacatgaacaggccattaaagatgatgttggaactattcgaattcagcgaccgcacaaaggacccttttatgcatcatcaaagagcattgatcaacttattgtgaatcttgggaaatgggccaagtaggaaaatttgttagaacatatttttggttgttacttcttagttagggcatcttatgctagtatcatgtttgtggcaggttataccgaattgcttccatgggttttgcaacatttggtgtcttccttcttgcaaagcgtgcactacagcattttctagaaagaagacggcggcatgaactgcaaaaaagggttcttaatgcagcagcacaaaggcaagctagagaagctgaagggagcaaaggtacatcagacgcagagcctaacagtaaaaaagatcaattagtgttggacatatgtgtcatatgccttgagcaagagtacaatgctgtttttgtgccgtgtggtcacatgtgttgctgtgtggcatgctcttcacatttgacgaactgcccactttgccggagaagaattgaccaagctgtcagaaccttccgccattgatggtgatatatgatgcaaaaaactggcatggtaccaccacatgtactgcttctgaaaccaatttattcttggaacttggaagtgctggctgctatcaaccaacgacatgaactgcaatactggggcgaagcagcttcaatgagtttgctttttgaactgaacagtgagtgatgcaagttgcaagctcataattgacagttgagatactctcactccctacatagtgccaatgggtgctcttgcctgtaatgtactacaactctgtacaggacgctcttgtgtaagtgcacatagattagcagcttgcttattgacaacatcgatgccggtaatatgtactgttgcccatcgggcatttgtgcaaaggaataacaaaatcagctcgtttagttgtgat

SEQ ID NO: 145006 - DNA, 1570 bp, Zea Mays
tcctggtatccagttcctttctttgcccctcctccgctttcttcggttcttcctctcccccactccccacgctgcctgagaggctgagactaggaaggggaaggaaaataatagtttggcgcgcaaatatccgcctccattcgtacgccgctattctcgtctgcgatccgcagcgcgatgatgatcccgtggggcggcgtggggtgctgtctcagcgccgctgcgctgtatctcctcgggaggagcagcggaagtgatgcggaggtgctgaggtcggtggcgagggcgggcagcatgaaggatttagctgctatcttggacactgcaagtaaggtcctaccacttgtagttgccatctctgggagagttggttcagacacaccacttatatgccaacaaagcggcatgagaggtgtaattgttgaagaaacggcagagcaacacttcctgaagcacaatgatgccggatcctggattcaagattcggcagtgatgctttctgttagcaaagaggttccatggtatctggatgatggaactggacgtgtttatgtggtcggtgctcgttctgcagctggtttaattttaactgttgccagtgaggtttttgaggaatcagggaggacacttgtacgtggaactctagattatttacaagggttgaagatgctgggagtaaagcgaactgaaagggttcttccaactggaacctcattgacagttgttggtgagcgaccgcacaaaggacccttttatgcatcatcaaagagcattgatcaacttattgtgaatcttgggaaatgggccaagttataccgaattgcttccatgggttttgcaacatttggtgtcttccttcttgcaaagcgtgcactacagcattttctagaaagaagacggcggcatgaactgcaaaaaagggttcttaatgcagcagcacaaaggcaagctagagaagctgaagggagcaaaggtacatcagacgcagagcctaacagtaaaaaagatcaattagtgttggacatatgtgtcatatgccttgagcaagagtacaatgctgtttttgtgccgtgtggtcacatgtgttgctgtgtggcatgctcttcacatttgacgaactgcccactttgccggagaagaattgaccaagctgtcagaaccttccgccattgatggtgatatatgatgcaaaaaactggcatggtaccaccacatgtactgcttctgaaaccaatttattcttggaacttggaagtgctggctgctatcaaccaacgacatgaactgcaatactggggcgaagcagcttcaatgagtttgctttttgaactgaacagtgagtgatgcaagttgcaagctcataattgacagttgagatactctcactccctacatagtgccaatgggtgctcttgcctgtaatgtactacaactctgtacaggacgctcttgtgtaagtgcacatagattagcagcttgcttattgacaacatcgatgccggtaatatgtactgttgcccatcgggcatttgtgcaaaggaataacaaaatcagctcgtttagttgtgat

SEQ ID NO: 145007 - DNA, 1606 bp, Zea Mays
tcctggtatccagttcctttctttgcccctcctccgctttcttcggttcttcctctcccccactccccacgctgcctgagaggctgagactaggaaggggaaggaaaataatagtttggcgcgcaaatatccgcctccattcgtacgccgctattctcgtctgcgatccgcagcgcgatgatgatcccgtggggcggcgtggggtgctgtctcagcgccgctgcgctgtatctcctcgggaggagcagcggaagtgatgcggaggtgctgaggtcggtggcgagggcgggcagcatgaaggatttagctgctatcttggacactgcaagtaaggtcctaccacttgtagttgccatctctgggagagttggttcagacacaccacttatatgccaacaaagcggcatgagaggtgtaattgttgaagaaacggcagagcaacacttcctgaagcacaatgatgccggatcctggattcaagattcggcagtgatgctttctgttagcaaagaggttccatggtatctggatgatggaactggacgtgtttatgtggtcggtgctcgttctgcagctggtttaattttaactgttgccagtgaggtttttgaggaatcagggaggacacttgtacgtggaactctagattatttacaagggttgaagatgctgggagtaaagcgaactgaaagggttcttccaactggaacctcattgacagttgttggtgaggccattaaagatgatgttggaactattcgaattcagcgaccgcacaaaggacccttttatgcatcatcaaagagcattgatcaacttattgtgaatcttgggaaatgggccaagttataccgaattgcttccatgggttttgcaacatttggtgtcttccttcttgcaaagcgtgcactacagcattttctagaaagaagacggcggcatgaactgcaaaaaagggttcttaatgcagcagcacaaaggcaagctagagaagctgaagggagcaaaggtacatcagacgcagagcctaacagtaaaaaagatcaattagtgttggacatatgtgtcatatgccttgagcaagagtacaatgctgtttttgtgccgtgtggtcacatgtgttgctgtgtggcatgctcttcacatttgacgaactgcccactttgccggagaagaattgaccaagctgtcagaaccttccgccattgatggtgatatatgatgcaaaaaactggcatggtaccaccacatgtactgcttctgaaaccaatttattcttggaacttggaagtgctggctgctatcaaccaacgacatgaactgcaatactggggcgaagcagcttcaatgagtttgctttttgaactgaacagtgagtgatgcaagttgcaagctcataattgacagttgagatactctcactccctacatagtgccaatgggtgctcttgcctgtaatgtactacaactctgtacaggacgctcttgtgtaagtgcacatagattagcagcttgcttattgacaacatcgatgccggtaatatgtactgttgcccatcgggcatttgtgcaaaggaataacaaaatcagctcgtttagttgtgat

SEQ ID NO: 145008 - DNA, 1320 bp, Zea Mays
tcctggtatccagttcctttctttgcccctcctccgctttcttcggttcttcctctcccccactccccacgctgcctgagaggctgagactaggaaggggaaggaaaataatagtttggcgcgcaaatatccgcctccattcgtacgccgctattctcgtctgcgatccgcagcgcgatgatgatcccgtggggcggcgtggggtgctgtctcagcgccgctgcgctgtatctcctcgggaggagcagcggaagtgatgcggaggtgctgaggtcggtggcgagggcgggcagcatgaaggatttagctgctatcttggacactgcaagtaaggtcctaccacttgtagttgccatctctgggagagttggttcagacacaccacttatatgccaacaaagcggcatgagaggtgtaattgttgaagaaacggcagagcaacacttcctgaagcacaatgatgccggatcctggattcaagattcggcagtgatgctttctgttagcaaagaggttccatggtatctgtttacaactgggatgcttctctaacctttaaacaatcactaggatgatggaactggacgtgtttatgtggtcggtgctcgttctgcagctggtttaattttaactgttgccagtgaggtttttgaggaatcagggaggacacttgtacgtggaactctagattatttacaagggttgaagatgctgggagtaaagcgaactgaaagggttcttccaactggaacctcattgacagttgttggtgaggtattatttctattatccattggttataccgaattgcttccatgggttttgcaacatttggtgtcttccttcttgcaaagcgtgcactacagcattttctagaaagaagacggcggcatgaactgcaaaaaagggttcttaatgcagcagcacaaaggcaagctagagaagctgaagggagcaaaggtacatcagacgcagagcctaacagtaaaaaagatcaattagtgttggacatatgtgtcatatgccttgagcaagagtacaatgctgtttttgtgccgtaagtattgtatcttttccagaacttgaatgctctttgttgagaatgaagcaacttgattttctctatttttctatttcctttttcccataattccaaatatactaggcaacattatggttttcatatttcctgttcactagtagtttcttgatttttctcttaatggcttgcctcataacttgatagaacttgaatactgctaaggccttctttggatgttcagtactaaggaactataattctagaacccattgatctgc

SEQ ID NO: 145009 - DNA, 1396 bp, Zea Mays
tcctggtatccagttcctttctttgcccctcctccgctttcttcggttcttcctctcccccactccccacgctgcctgagaggctgagactaggaaggggaaggaaaataatagtttggcgcgcaaatatccgcctccattcgtacgccgctattctcgtctgcgatccgcagcgcgatgatgatcccgtggggcggcgtggggtgctgtctcagcgccgctgcgctgtatctcctcgggaggagcagcggaagctgctatcttggacactgcaagtaaggtcctaccacttgtagttgccatctctgggagagttggttcagacacaccacttatatgccaacaaagcggcatgagaggtgtaattgttgaagaaacggcagagcaacacttcctgaagcacaatgatgccggatcctggattcaagattcggcagtgatgctttctgttagcaaagaggttccatggtatctggatgatggaactggacgtgtttatgtggtcggtgctcgttctgcagctggtttaattttaactgttgccagtgaggtttttgaggaatcagggaggacacttgtacgtggaactctagattatttacaagggttgaagatgctgggagtaaagcgaactgaaagggttcttccaactggaacctcattgacagttgttggtgaggccattaaagatgatgttggaactattcgaattcagcgaccgcacaaaggacccttttatgcatcatcaaagagcattgatcaacttattgtgaatcttgggaaatgggccaagtaggaaaatttgttagaacatatttttggttgttacttcttagttagggcatcttatgctagtatcatgtttgtggcaggttataccgaattgcttccatgggttttgcaacatttggtgtcttccttcttgcaaagcgtgcactacagcattttctagaaagaagacggcggcatgaactgcaaaaaagggttcttaatgcagcagcacaaaggcaagctagagaagctgaagggagcaaaggtacatcagacgcagagcctaacagtaaaaaagatcaattagtgttggacatatgtgtcatatgccttgagcaagagtacaatgctgtttttgtgccgtaagtattgtatcttttccagaacttgaatgctctttgttgagaatgaagcaacttgattttctctatttttctatttcctttttcccataattccaaatatactaggcaacattatggttttcatatttcctgttcactagtagtttcttgatttttctcttaatggcttgcctcataacttgatagaacttgaatactgctaaggccttctttggatgttcagtactaaggaactataattctagaacccattgatctgc

SEQ ID NO: 145010 - DNA, 2060 bp, Zea Mays
tacgtccacgatggagcttgaacccacaacctcaaagttaaaagtcttgcactctaccgactgagctagacatactttgctgttacatatccgagctcggcgccatagatcttggcgccgagctcgataccacgttggcgccacgtcgttcaggttgggccagcgtagcacgcacctcggcgccatagcctatggcgccgagctgtgttacctcggcgccattggctatggcgccgagtaaagggtccaaaaatgacattaaaattttctaaggtccaaacgtgaatttttttctgaggaagggctaaaatataaaaaattcggtgtgtttgtcgctcggtagccagagccggcctgggcctggcctccgctctttctcttccgcattggccaacaaggcaaagagggaacaaaacaaccgcccttgcaagtgggtccattactccattccatcacaatagaacggcagcaacaaggccgccacagagacgcagacgcgatcgccgccggccgtccccgcccagtgcgctctcgcgctacacgtgccatgccgcacgcagcaatgagtagccgccgccgccgccgccgcggcgcttagcaagcgacgatggagatggcgagcgcgcggaggagggcgaagccgccgcaggcggtcggcggaggcggagaccagctcgcgctgtgggccgcctgcgtgctgctctcctcgctctcgctgctcgtcgccgccgccttctccacgggcttcggcggggccgcgaggctcacgctcgaggccggcccggaccgggaccgggaggccgcgggtgcgctcgtgacgagggcaactggcgccggcagcgggaggtactgcgacgaggacgacgacctgatcgacagcatgtccgtggacggggagtgggtgctgctgcgcggcgccgccgagcggctctacgggcccgggcagtgcccgttcgtcgacgaggggttccggtgcagggagaacggcaggccggacggcgactacgccgagtgggcatggcggccgaggcgctgcgcgctgccgagattcgacgcgaggaggctgctggagatgctccggaaccggcggctggtgttcgtgggcgactccatcgggcggaaccagtgggagtccatgctgtgcatgctggcctcggccgtcgccgacgacagggacaagcaggcgagcccgggcggcgccagcatatacgaggagaacgggagccccatcaccaagcgcaagggcttcctctccttccggttccgcgactacaactgcaccgtggagcactaccggtcgccgtacctggtccgccgcggccgcccgccgcgccactcgccgaagcgcgtcgccacggcgctccggctgggctccatggacgccatggcgccccggtggaaggacgcggacgtcctggtgttcaacacgggacactggtggaaccacgagaggctgcagcagttaggatgctacttccaggacggcaagacgttgcggctcaacatgagcgtggaggacgcctacgagagggcgctgaacacgctgcagaaatgggtccaaaaggaagtgaacacaacaaaaacgctggtcgtcctacgaacatactcgccggcacatgtaagggcgtcaaacggtggtggaggtgggtgtgtcagggagacggcgccggagctgaacacgtcgaggatcgcgctgcaccggtggccgggcctgctcaacccgagcccggctttaattgaagcggcgaagaagcggcagctggcgacgatgcacgtcctgaacgtgaccctgatgacggcgcagcggcgggacggccacccgtcggtgtacaacgtccgcctcccgtcgccggcggcggcgcaggagcaggtgacgacgagggcggccgactgcagccactggtgcctgccaggcgtgccggacgcgtggaacgagctcctctacgctttgattctacataggactaggactacgtcattaggaggttcagactgaggtgttttttattggttataatttatttatagaggaactatatatatcttctaataataatgct

SEQ ID NO: 145011 - DNA, 2077 bp, Zea Mays
tacgtccacgatggagcttgaacccacaacctcaaagttaaaagtcttgcactctaccgactgagctagacatactttgctgttacatatccgagctcggcgccatagatcttggcgccgagctcgataccacgttggcgccacgtcgttcaggttgggccagcgtagcacgcacctcggcgccatagcctatggcgccgagctgtgttacctcggcgccattggctatggcgccgagtaaagggtccaaaaatgacattaaaattttctaaggtccaaacgtgaatttttttctgaggaagggctaaaatataaaaaattcggtgtgtttgtcgctcggtagccagagccggcctgggcctggcctccgctctttctcttccgcattggccaacaaggcaaagagggaacaaaacaaccgcccttgcaagtgggtccattactccattccatcacaatagaacggcagcaacaaggccgccacagagacgcagacgcgatcgccgccggccgtccccgcccagtgcgctctcgcgctacacgtgccatgccgcacgcagcaatgagtagccgccgccgccgccgccgcggcgcttagcaagcgacgatggagatggcgagcgcgcggaggagggcgaagccgccgcaggcggtcggcggaggcggagaccagctcgcgctgtgggccgcctgcgtgctgctctcctcgctctcgctgctcgtcgccgccgccttctccacgggcttcggcggggccgcgaggctcacgctcgaggccggcccggaccgggaccgggaggccgcgggtgcgctcgtgacgagggcaactggcgccggcagcgggaggtactgcgacgaggacgacgacctgatcgacagcatgtccgtggacggggagtgggtgctgctgcgcggcgccgccgagcggctctacgggcccgggcagtgcccgttcgtcgacgaggggttccggtgcagggagaacggcaggccggacggcgactacgccgagtgggcatggcggccgaggcgctgcgcgctgccgaggttcctaactgccaagtggtcgtggtcaagtcccaagcatatgcatgcatcatatatatttgatgtgtgtatgcgtatcagattcgacgcgaggaggctgctggagatgctccggaaccggcggctggtgttcgtgggcgactccatcgggcggaaccagtgggagtccatgctgtgcatgctggcctcggccgtcgccgacgacagggacaagcaggcgagcccgggcggcgccagcatatacgaggagaacgggagccccatcaccaagcgcaagggcttcctctccttccggttccgcgactacaactgcaccgtggagcactaccggtcgccgtacctggtccgccgcggccgcccgccgcgccactcgccgaagcgcgtcgccacggcgctccggctgggctccatggacgccatggcgccccggtggaaggacgcggacgtcctggtgttcaacacgggacactggtggaaccacgagaggctgcagcagttaggatgctacttccaggacggcaagacgttgcggctcaacatgagcgtggaggacgcctacgagagggcgctgaacacgctgcagaaatgggtccaaaaggaagtgaacacaacaaaaacgctggtcgtcctacgaacatactcgccggcacatgtaagggcgtcaaacggtggtggaggtgggtgtgtcagggagacggcgccggagctgaacacgtcgaggatcgcgctgcaccggtggccgggcctgctcaacccgagcccggctttaattgaagcggcgaagaagcggcagctggcgacgatgcacgtcctgaacgtgaccctgatgacggcgcagcggcgggacggccacccgtcggtgtacaacgtccgcctcccgtcgccggcggcggcgcaggagcaggtgacgacgagggcggccgactgcagccactggtgcctgccaggcgtgccggacgcgtggaacgagctcctctacgctttgattctacataggactaggactacgtcattaggaggttcagactga

SEQ ID NO: 145012 - DNA, 1701 bp, Zea Mays
tcgcaacaaaccggttcggttaaccctttctccaccgcccgcagtcagactcagagcagaggcgaccggatcatgcgcgtccacatctgtcggtgctgggcgctccccgccgaggacggacacggacggtaggtgggactggaactggaactggaagcaaggcgaggcgaggcgaggcgaggcgtgcgagcaaggtgaagcgaaccctccccctgctgtttcctcccgtgctcggtgctccccaccgggaaaaggggcaacgagagtagagaaatcgaacccacacgcaacgcgtcgcgacgggacagctccacctccacccactcgcctgcctccagatccagcgcccgcatctctctctctgtcgctcgcgcgagataagccgccgcgccgggcgggcgtgctagcggtagcagcgagcggtgcgcgagggcggcggaggcgggagggcggatccggtgggcggcaaatctggcaggcgccgcggtggggctgcgggcgcgggggagggcggggggctgggcggacggcgcggagggcggggagggaggggaggactgcggcaggctcaggccctggcgcaggaggctgctcgcgtccatggcgctctcgtggccctcggccgtccgcctcgccgtcgccgccgtcctgctcgccgccgtcgtcgtcgcgctcttcacgctccccgtcgagaagattttaaaggattttctgctttggatcaaggagaacttgggtgcatggggtcctttggtgctggccctagcttacattcctctgacagtcttagctgttccagcatcaattcttacacttggagggggctatttatttggactgccagtagggttcgttgctgattccattggagcaacaattggtgcaactgctgcatttctgcttggcaggacgattgggaggccttatgttctttcgaaatgcaaagattaccctaagtttcaagcagtagctattgccatccaaagatctggcttcaagatcgtgttgctactaaggcttgtacctttacttccgttcaacatgttgaactacctgttatctgtcactcctgttggtgttggagaatacatgctggcttcttggtttggaatgatgccaatcactcttgctttggtgtacgttggaacaacactgaaagatctatcagatgtgacacatgggtggagtgagatctcgactactcgatggattctgataatatctggctttgtattatctgtggtcttgatcatctgcgtcacaaaaattgcaaaatcatctctggagaaagcattggccgagaatggagagctggatgtaggaacatcgcagcttcctgtggtagcctctccctccgatctgcaacaacctcttgtaatcaagattgacacgtcaaatgaagatcacgagaagtaaaagtgttgtgttcacaatctcggatgtacattctttgtctgttgagtctgtagactatatatacccatagctcttgtgaggccggtaaaagggtaaaaaagcgcaaaaagagagaaaaatgacggtgaagtttgactgataggtaatatctttggtgaaaatgcaattgtagtatttcagttgggcctagccgctagggatgaaacgagcggaaaaataactcctgtttgtgttttttttttgtgaaaatggcgccagattcggaaaaaatgggaatcgccgaat

SEQ ID NO: 145013 - DNA, 2101 bp, Zea Mays
ctgcctggcaaacagcaacgcgagttcaggtcatcaggtttcaggtgtccatccaaccttctgtcgtctccgggtgctccgggccagtcgtcgacggcgagccgtacgtatattattacccccaggcgaaacccaaagagaacccgtaccaacccaaacaaaaccacacaccacctcctcgccggctcgtcatcgccatcgccatcgtcatcgccatcgccatcgtttcattgcgagtctccgtttcatctcgccccctcacccccacacacactggaatccccgcgtctgaatccggcgcccccgccccgatccgcgccgaatcgccgccgctcggggtggaaccctagcccgatctcgatccgtttctccgcgatgggcgccggccgtgtctgtcgcggcggcccctcctccgcctcccccgccgcagggcggccgttctcgacgctcgccgcgtcgtcctccgcctccccttcctcggctccttcagagacggcgtccacgtcggtcaccaagacggtgaacggctcccaccacttcaaaatcgcgggctactctctctccaagggaatcggggtggggaagttcatcgcttccgagtccttcaacgtggggggattcgactgggcgatctacttctaccccgacgggaagagcgccgaggacggcgctgcctacgtctcgctcttcatagccctcgccagcgagggcaccgatgtgcgcgcgctgttcgagctcacgctcgtcgaccagagcggcaagggtcaggataaggtgcatacccacttcgggaggtcgctcgagagcggcccatacaccctcaagtaccgcggcagcatgtggggctacaagcgtttcttcaaacgaactgccctagaaacatcagactatcttaaagatgattgccttttagtgaactgcactgttggcgttgttcaatcacatactgaaggaccaaagatatacacaattccagtaccgcggtccaacatggctctacatattggtcagctattgacaagtggaaagaggacagacattgcattcgaagttgatggagagatgtttcctgcccacaaggtgattctttcagcccggtctcctgtttttagggcacaactttttggcccaatgaaggataaggacatgaagtgtataaagattgaagacatggaggctccagtattcaaggccttgctccatttcatgtattgggatgagttgccggatattgaagagcttactggtgtaaatacaacttgggtatccaccttgatggctcaacatttactagctgctgcagaccgttatgcattggagagattgaaattgctctgtgaacttaagctgtgtgaagatgttgcaataaatacagtggcaaatactttggcactggctgaacagcaccactgttatcagctaaaaactgtttgcttgaaatttgtagctctgcctgaaaatttgaaagctgtcatgcaaaccgatgggtttgattatttgcaacaaagctgcccatccctcctgaccgagcttctcgagtatgtggccaaggcaggagagcactccgtgagcccctgcttgtattcaactgaagtccttgacggtggtgatgccaatgggcgacgcgtgaaaccaaggatctaacggttggaagaggagttcctcgtgcccattttaagttgtaaagtgtttcgaatgacgggtgcttatgtggccgtgccatatcatgcatgttgtagcgtgtgggtttgtgtgtgtgttgtgacttccatccctctccccagccgtattgatggtactgtagagggtgttatcgctaatatataccctactgacttatgtattgcatcgctgtttcaaagcagtctgtcatcataagtgcacacaggtggaatagggcgaggatggtctggtgcaaaggtgaaataatggcacagactgtgtatgtgtgtgtcctgtttttcagaagttttaccttgcggtaggccagatttgtcgattcttagtcgtctgtatttggctgtattcaattgaaattgtgaaatgtatcagttgaagttatgcgtagacattcacttccatacctctcgaatacccgttt

SEQ ID NO: 145014 - DNA, 1349 bp, Zea Mays
cccgaaacttttcgaaaatcccccacagaatcccatccccccgggccccggcaaccgctggcgctgcctccagccctccaacaccacgaccgccgggcggctcctcctcctctgccggagagctcggcgggcggcatgggaacagagtatcccaccttcgccgacgtatccggggcccgcgcgctcctcttcctcgccgactccacaccccggctggccccgccttcgcgtcctcccgctctcagcgaggagttctactgctactcgggctcctcgtcctcctactccggcgcgtcgacgaggtcatgcgtctccgactcggcacagcgcggtcgccccgtcgatcccctacgcgtgctctccgtcgtcgcctccctccgccgcatcgaccctaaggtgctagccgaggccacaagcgcgctgttccataccgacgcagagaagaagcggaagggcgtgtggatcgagatcgacagcggtggtgacgacggccagagcgagaggagcagcgccgtggccagcgaggggagcaccgtcacggccgccgcgtccgcgggctccacggccacgtcggggagatgccgcggggctccgcgggtgggttgtgctgctggtggtaaggggccgaggagggcggaggtgatcatgcagtggttttcgcagacgcaagctgggccagcgacggagaacgacatccgcgccgccgtcggcgacaactccggcacgagcaaagcgatacgatggctgttgaagcaggagggcggcttgcggcgtgcaggcaatggtggtgccctggatccgtatgtttatatggcgtttaccagcctaggtggaagtccctggctcgctgtgctgcagcctggtccgcattgctgtcgctgaaagctgcatgagaaaggatgagatggtgtgcgacaaggtacggctccgtggtggagttgcctccggcggggcacccggaacaccttcccggtgcgtgcaagccattgtcgtagcccagagcagcgacgcacctcggctcgttgaaggtaaaccagttcttcaccctgtctccgaacgcgtggaagcagaactcggcgtagtctgcaaacgcctcccttcgattgggcacggcgtgcagctgggtcagactgactgacacatggttgaatcaatttgaaatttggtttctagatgtcgtctagtttgcaattcttacacaatctttgggctaagccagcccaggtactgttcatggagtgccaatgggaggtcataatggtagagatttgcatacggcgcgatacctgacttgtatgtatacatatatataaaggttaaccaggaatctgaatgtttcctgaaagaat

SEQ ID NO: 145015 - DNA, 672 bp, Zea Mays
gatccaaacggggcgtaataaaaataaatctcttcctcgaatgtaccaaacaattccgttgtgcttcccaagatgatacagaaaagaaagaaagaaaaaggacagctcttgcgcaaagcattgactcccggattcttgcaacttttacaagatcagttagatatgcaatggcacgcttctacatttggatggccacaacaatggtggaaacgtatctgatcttgtatataaatcataacaatccactaatcttgtgggaggtgaaatcagcctatttgtttattcttccccttgcctctctatgtggtttacagttggggaacctgtgcctgttaatccctgcatcttcttgcagacatagacataatgggagtcaggatcctctgggacaaatccatcagggagtctacccctctcggtcagtggaacaggatccagtacacgcctcgttatctttccagtgaacacaggtcttgctgcaatacattaaaacagcactgatgaagccagcataaaaaatattcacttttttttactcagcaggcttttacacagctatctgtttccatcttatcgtaccatcatttatcctcatttttgtatcgctctgtggggtactatggaccactaattctactaacagatgacattcttttgaagtaaatttcttgc

SEQ ID NO: 145016 - DNA, 2134 bp, Zea Mays
atgaaacccaccaccagcagcacgctgctgctggcagcggcggtgctctgcctcgcgctgccgctgctccccggcgccacggccaaggcggcgcgggcgcggcagggcgactacctggcgcgcctgcgcgggtcgtcgccgtggccggccgagtcggcgtcgctggcggtcgcggcgacggacagagcgtcccggcacgcggcgtcgccgggcgtggggcgcaaagaggacgaccgcgtggacaggctgcccggccagccgtcgggcgtggacttcgagcagtacgccgggtacgtgacggtggacgccgcggccgggcgcgcgctcttctactacctcgccgaggccgtgggcggcgggtcggcgtcggcggccaagccactcctgctctggctcaacggaggtatggcttgctccctactccctagagtaggtagctggttagttgacttattaactgcggtcacgctctggttgcttcgatctcttctcatctcacgcgttggacgtggaccccttgattcccggcgtttatgccatgggctgatgggcgtggacggacggacaggccccgggtgctcgtcgctggggtacggcgccatggaggagctgggcccgttccgggtgaagagcgacggcaagacgctgtaccgcaacccgtacgcgtggaacaacgcggcaaacgtgctgttcctggagagccccgccggcgtgggcttctcttactccaacacgacggctgactacagccggagcggcgacaacaagacggccgaggacgcgctccggttcctgctcaactggatggagaagttccccgagtacaagggccgcgacctgtacctggccggagagagctacgccggccactacgtcccgcagctcgcccacgccatcctcgggcacgccgccgccggcaagccgtcgtcgtcgtcgcccctcaacctcaggggcatcatgatcgggaacgcggtgatcaacgactggacggacaccaagggcatgtacgacttcttctggacgcacgcgctcatctccgacgcgacggccgacgcgatcggcaggcactgcaacttcagcgccgccgccgacgccgacgccgcggcctccaacgacaagtgcaacgaagcgacgtcggaggccgacgaggccctgcaggacatcgacatctacaacatctacgcgcccaactgccagtcccccggcctcgtctcgccgcccatcaccccctcgatggacaggtttgacccgtgctcggattattacgtgaacgcgtacctcaacgacccggacgtgcagagggcgctccacgccaacgtcacccgcctcgaccacccctggtccgcctgcagcgatgtcttgagacgctggactgacagcgccacgaccgtcctgcctattctcacggagctcctcaacaacgacatcagggtctgggtgtacagtggagacaccgatgggagagtgccggtcacttccagcaggtactccgtgaaccagctccagctcccagttgccgcaaaatggagggcatggttcagcagcactcagggcgccggagaggtgggcggctacaccgtgcagtacaagggcaaggagaagggcagcctcagcctggtcaccgtcagaggagccggccacgaggtgcccagctaccagccaaggcgagcgctcgtgcttgtccagggtttccttgcaggcaaaacgcttcctggctgcaaaacgtgcgagtcggcttagcggttggcagcactacagcaacatgtatctgagagcgagggagagaaagcgaaagggaatcaagccattggaaacacacgcaccttgcggatcatgtaactgcaggtctgcaaaaaaaaaaggcaattatacagtcatagtcacaggcagagaaatctgtacacgaaataagtaagtaggttatgttccatggtgtatttagtgtgctaatttgatgccataaatctcagtcgtgcaggtgcatcagtgctagcgaatcattagaaacaaagaattttcacttccccgccaattcctttctttcttcgaacaataacggggcgtttggatcccttcattttaaaggaattggaattcactcaataaaatgatacagaaaagaaagaaagaaaaa

SEQ ID NO: 145017 - DNA, 1971 bp, Zea Mays
cccatccatatccatgccagcctatatataccggacgccctcgggcccgacgtgctcgtgctcgtcctcgcccagcaccgtaaccaccggacagagcacgcaccatgaaacccaccaccagcagcacgctgctgctggcagcggcggtgctctgcctcgcgctgccgctgctccccggcgccacggccaaggcggcgcgggcgcggcagggcgactacctggcgcgcctgcgcgggtcgtcgccgtggccggccgagtcggcgtcgctggcggtcgcggcgacggacagagcgtcccggcacgcggcgtcgccgggcgtggggcgcaaagaggacgaccgcgtggacaggctgcccggccagccgtcgggcgtggacttcgagcagtacgccgggtacgtgacggtggacgccgcggccgggcgcgcgctcttctactacctcgccgaggccgtgggcggcgggtcggcgtcggcggccaagccactcctgctctggctcaacggaggccccgggtgctcgtcgctggggtacggcgccatggaggagctgggcccgttccgggtgaagagcgacggcaagacgctgtaccgcaacccgtacgcgtggaacaacgcggcaaacgtgctgttcctggagagccccgccggcgtgggcttctcttactccaacacgacggctgactacagccggagcggcgacaacaagacggccgaggacgcgctccggttcctgctcaactggatggagaagttccccgagtacaagggccgcgacctgtacctggccggagagagctacgccggccactacgtcccgcagctcgcccacgccatcctcgggcacgccgccgccggcaagccgtcgtcgtcgtcgcccctcaacctcaggggcatcatgatcgggaacgcggtgatcaacgactggacggacaccaagggcatgtacgacttcttctggacgcacgcgctcatctccgacgcgacggccgacgcgatcggcaggcactgcaacttcagcgccgccgccgacgccgacgccgcggcctccaacgacaagtgcaacgaagcgacgtcggaggccgacgaggccctgcaggacatcgacatctacaacatctacgcgcccaactgccagtcccccggcctcgtctcgccgcccatcaccccctcgatggacaggtttgacccgtgctcggattattacgtgaacgcgtacctcaacgacccggacgtgcagagggcgctccacgccaacgtcacccgcctcgaccacccctggtccgcctgcagcgatgtcttgagacgctggactgacagcgccacgaccgtcctgcctattctcacggagctcctcaacaacgacatcagggtctgggtgtacagtggagacaccgatgggagagtgccggtcacttccagcaggtactccgtgaaccagctccagctcccagttgccgcaaaatggagggcatggttcagcagcactcagggcgccggagaggtgggcggctacaccgtgcagtacaagggcaaggagaagggcagcctcagcctggtcaccgtcagaggagccggccacgaggtgcccagctaccagccaaggcgagcgctcgtgcttgtccagggtttccttgcaggcaaaacgcttcctggctgcaaaacgtgcgagtcggcttagcggttggcagcactacagcaacatgtatctgagagcgagggagagaaagcgaaagggaatcaagccattggaaacacacgcaccttgcggatcatgtaactgcaggtctgcaaaaaaaaaaggcaattatacagtcatagtcacaggcagagaaatctgtacacgaaataagtaagtaggttatgttccatggtgtatttagtgtgctaatttgatgccataaatctcagtcgtgcaggtgcatcagtgctagcgaatcattagaaacaaagaattttcacttccccgccaa

SEQ ID NO: 145018 - DNA, 944 bp, Zea Mays
taggtagcgccgcgcgggtggcgtcgcttctggtctgtggcggatcggatcgacacccagccagcgcgtggagagtagaacacccccaagaggccaggactgagactgaccatgggagaagcgtgcagggacgcggcggctgcgggccggcagctgctgcaggacgaagcgggcggaggaggagggcgtcacgcggagaaggagctcgtcggtgacccgacccacgactcggccgtctcggcgaagctgtacgaggacgtgccggcgacgccgatgatggcgctcaaccacatctcccgcctgtgcgaatccgtcgacgcctccgtccggttctacgtcaaggcgctcggcttcgtgctcatccagcgcccgccggcgctcgacttctccggcgcatggctcttcaactacggcgtgggtatccacctcgtgcagcgcgacgacgcgcggcgggcccccgacgtgaggccggaggaggcggagctggaccccatggacaaccacgtgtcgttccagtgcgaggacatgggcgccatggagcggcggctgcgggagatgcgcgtgcggtacatgaagcggaccatcaacgaggaggaagggtcgcccatcgaccagctcttcttcagggacccggacggcttcatgatcgagatctgcaactgcgagaacctggagctcgtccccgccggcgccttcggccgcctcaggctgccccgcgaccgccacaacccgcccgtgcgcatggtcgccggcagcgacgagtagagggggagggggctttcgcgtccgcgtgaccctctgccctccaaggccagcagcccagcaccacagggggagaaatagtttgtggctcatataatcgccgagggctcttaattatgctggattctgggtcgtgtttcctgccgagtttcagttttgaattcgaatttgttctagttttg

SEQ ID NO: 145019 - DNA, 246 bp, Zea Mays
atgccaccaaggatgcgctgccaccgcgtctcccgccccatgttgacgtacggtagcagagtacctcagcaaggcattactccgactccaccagcgaacctcgtgtcttcgcatggtgatgcatcacagggttctaggacatatctgcacaaccaaatgatgcagacaacgatgtcgtgggtatatgctctgcggatgccaatgctgatgccgcttcatgtgccaaagccgatgctgccgacatag

SEQ ID NO: 145020 - DNA, 1956 bp, Zea Mays
gcatgtacatgcacagcaaggtctgggtgttttctttttaccatggatggatcacaggtacaggacgacgacgacacagaaactaatgcaaagaattgtcagttcaagtcagtgtataatagccgaaggaaaaaaaatgagagaatgggtaggaatgaaaactatagcacagcacaggttcagagcagagagcagaggaggagatgagtccattgagatggtggcggttggttaatcgagactcgagaccgactaaacctagctgtccgacggcatcactcggccgctctcggccgccgccgccggccgccggccgcggccaggtaccggtgcgccgcgacgagctcctcccggaagcgggcaaggtccagccgcacgttctgccggtccaggtacaccttcttggtcacgtcccagccgcgctgcgcgacgccggcggggtccgtcagcacggggtcgcccgtggggtactcgcgggacagcgagctctcctcggggaggatcttgtagccgacgtagcgcagccccatccgcgccgcggggtcgccgtagtaggcgccggcggcccagtccgtgcccagcggcaccacctggatgaacaccttcccgggccgcatgaacaggaagtgcgtcatggcggcgccgtgcaccccgaccatcgcgtcgctggcgttcagctcccggtatatcttgcacagctccgtggtgcggtcggggcggatcacgcgcacgtcgaacccgacgtccgccgccagcgccgccacgtccgcctcgttctcgatcacgcgggaccccgtccgcgacacgatcaccagcctgggccgccgctcggcctcggcctcgcggggacctgcaggaggcgcgcgggggaccaaggcgccgccgcggtggtggcggtgcgggcgcctgcgcgccgcgcgccgctccaggcgctccaggaactcgatgcggccgcggtacgcgtcgtccaggaacctgcggaagtcgccgatgccccggcgctcgggcgtccgcgccgggtccacggtcagctcgccgtggatgcgcagcccggcgatcacctcggggaagcagtgcacgcggcggtcggcgctgaagtcgatcggcgggaactccgacagctgggacaccacgtcgccgtacttggtcatccaccagtcgtggtactcgaggatcaccagcgccacgcgccgccggaggtggcgcgccgtcacgaagagcggcaggatgccgtcgttgaactcgtggtacacgttccccgtgtacccgccggtggagaacaccacggccggtacgtcgtggcgcacgtcgcaccgcgcggcgtcgccgggggccacgcggcgcagccgcacctcgtcgatcgtcgccatcacgttcgcctcccacttgcgcgtgtacggccgtatccgctcccccggcgtcgagttgccggtggacacgagctggaacgacgcgctggccgagtgcatgcgcaagtcccccctcgcgaagcagatgtccgcgcgctccgacgtgcggtcgcagcagaggctgttgttccccacggccgagcacggcccggacaccccgccgcgcgcggccgtggccgccgccgccgcgccgccttcatcgctatgcacgaaggagaggaaggacacgggcgccacgaacagcgtccccacgcagaggaaggagagcaggagcatggccaagaagcgccgcacgccgagcgccctgggttgcaccgtcttgccgctcttgccaccgccgccgctgccgtagtcctggtagtagtacatgacccgccgcccgacgcccttgggctgcgacactttgcatgccacctcctgctccgtctcgcccttcctgaactgcaagatgtagattctgtgttgctgttgctgcaccatggccgtcgccagagagagagagagagagagagaaggcctcccggtctcggatgactatgagcagaag

SEQ ID NO: 145021 - DNA, 1160 bp, Zea Mays
attatccttaggtcgaccaaatccttagaatgctcctgttcttatccagttgaggtctagaagcttactcatcacgccggagcagcagtagcagtcgagctcggcatcagctcccttgctgctcactttgcagcacctcgccagctccctggtaacactctgcacctgccgtcgaactctctcagaatgagcagtttggtcgtccccatctcgccgtggttcgtcctcaccatgttttcagatgtgtttgggctgagatgccattcaaaatcgatgatctgttcgtcgccaccggccgcaagcaccagttttgttgaacatacgtgattgaagatcctttgtggtgatgaaggtgaaatcagcatagcactcgccaagcattctacagaagagctcccaaaataaagagtgaagatttaagatgaagtggttgttgaagaggagtttactccagtgcctgttcatcaagtggatggagccatctaactgatcatcgtgttagaagtatctagaacctcttctctgcaacaaagctgttcacgatactgtggatccagtaaagattgtacagtcatcctccattataatagtgtccaaggcaaaatgaagttggtatgtgcaccagatgtcataatgaaatagctactgtggggaaaaaggactacctggtgaaattcgacaagaagatcattggcaactaagtatctttcaactgacaaagcagctatgcatccagatccagctgcagtaatagcttgtctccattcatgatcctgcagtttccttcttaagacatcaagaaatgatatgtgataacaaaaacatgacatgatggtgccaatggagcttcggaatataagatatattgcaaaccatgaacaagttccatacagaaggtgaatgatggagttacctgaacatcaccagcagcgaatacaccatcaactgaagttttggctgagccctctttaactaaaatatagccagcactatcaagttcgatttggccctgcaacagctgactgtttggagtatgtcctatgccataaaataaacctttcacagtaagaactgattcttctcctgtatctcttctcttcagatgaacgccagacatctgccctttgtcattgctaacaacatccatggcttctgtattg

SEQ ID NO: 145022 - DNA, 107 bp, Zea Mays
ggaacagaaggttaagtctgaattgcagtgtttgtgctgtttttggagctcatttgtggaaaatctaaggagctttgggctgagacgtctatagaggagttaaagac

SEQ ID NO: 145023 - DNA, 108 bp, Zea Mays
gaacaagtgggtggaatgaggagttatgagggaccagctataaagtactacctccattctcaaatacttgacgcagactagttcattctcaaactaaaaaacgtcaaa

SEQ ID NO: 145024 - DNA, 1352 bp, Zea Mays
gtcgcattgaattgcttctcgcggtaccggtcaccggtggaaccaactccccaccacccgcccccgcgcccgcgggctccaggccgagccgaagctaggcgcgatgtcgctgtcaccggcggacggcgcagcgtactggctgcggtggcaggtcctcgtctgcggcgcgctcatcgcgctgcccacggtggccgcggcggcgctgctgccgcggctgcggagctcagcgccgcccctgcgcgcggccgacctctgggttccttgctgggcgcgcctccacccgggctggctccttgcctaccgcgccgtcgcgctcgccgccgctgtagcgcttctcgcgcgcctcgtcgtcgcgcgcggcatcaccgtcttctacttctacacccagtggacgtttctattagtcaccatatattttgcgtttgccacagctatatcagcccatggatgtttggtttactcaaggaaaagtttgaggaaagccgacgaatcccgtggacttcttaatgctgatgtcgaaaatcgtgatgtttccaattctgtttctggagagaggaaaacagatgagacaaatatgatgatgagctattatgaacaaatagtgaatgagagaagagctgggttctggggccggtgcatggaaatcatataccagactagcgcaggtgcaacaatgttgactgatgtcacatattggggccttcttgtgccatttttctaccgtgacaagtttgggttagctttgttcactgatggcatgcactccttaaatgctgtttttctacttattgacacacttctcaacaacatgccctttccctggtaccgaatgtctttctttgttttctggagctgcgcctatgtaacattccagtgggtccttcatgcttgtggaggcgtatcctggtggccgtacccatttctggacctttcatcatctggagctcctctatggtacctcggcatggccatcgctcatgtcccctgcttcttcctgtattggttgatcgtcaaggcgaagcacacttatttccaacggatgttcccacatgcttatgttagggcaacatagacccatttatctaatcacaggttaggataaactcataaacatgtataaataaatatctgtatcatactacttctgcacctgccgggcttaagtgtacacctgtatagtctcgtgaatttacagcccctttgagatgggtatgagacctgagaacacgccaggaccggcatgttgatcaatgaatcgcagaggttcactgtcacctgggaacacggtcttgtgctctgtgcctctgtgtgttcctttccttcgcttgaacttgaagtgcacattggaagca

SEQ ID NO: 145025 - DNA, 1099 bp, Zea Mays
agcagagcatcagtttcataaacaagtccatacgtactacttcaccttcaagcagcagcagcagccatggcagcacccaccgtcgtctccttgctcgccatggccgtggtggcgatagcagcgcttcaagctacggctgccggtccgccgccaccgccaccgtacggcaggccgacgaactgtgttcagacgttatacgagtttgccacagctatatcagcccatggatgtttggtttactcaaggaaaagtttgaggaaagccgacgaatcccgtggacttcttaatgctgatgtcgaaaatcgtgatgtttccaattctgtttctggagagaggaaaacagatgagacaaatatgatgatgagctattatgaacaaatagtgaatgagagaagagctgggttctggggccggtgcatggaaatcatataccagactagcgcaggtgcaacaatgttgactgatgtcacatattggggccttcttgtgccatttttctaccgtgacaagtttgggttagctttgttcactgatggcatgcactccttaaatgctgtttttctacttattgacacacttctcaacaacatgccctttccctggtaccgaatgtctttctttgttttctggagctgcgcctatgtaacattccagtgggtccttcatgcttgtggaggcgtatcctggtggccgtacccatttctggacctttcatcatctggagctcctctatggtacctcggcatggccatcgctcatgtcccctgcttcttcctgtattggttgatcgtcaaggcgaagcacacttatttccaacggatgttcccacatgcttatgttagggcaacatagacccatttatctaatcacaggttaggataaactcataaacatgtataaataaatatctgtatcatactacttctgcacctgccgggcttaagtgtacacctgtatagtctcgtgaatttacagcccctttgagatgggtatgagacctgagaacacgccaggaccggcatgttgatcaatgaatcgcagaggttcactgtcacctgggaacacggtcttgtgctctgtgcctctgtgtgttcctttc

SEQ ID NO: 145026 - DNA, 1287 bp, Zea Mays
gtcgcattgaattgcttctcgcggtaccggtcaccggtggaaccaactccccaccacccgcccccgcgcccgcgggctccaggccgagccgaagctaggcgcgatgtcgctgtcaccggcggacggcgcagcgtactggctgcggtggcaggtcctcgtctgcggcgcgctcatcgcgctgcccacggtggccgcggcggcgctgctgccgcggctgcggagctcagcgccgcccctgcgcgcggccgacctctgggttccttgctgggcgcgcctccacccgggctggctccttgcctaccgcgccgtcgcgctcgccgccgctgtagcgcttctcgcgcgcctcgtcgtcgcgcgcggcatcaccgtcttctacttctacacccagtggacgtttctattagtcaccatatattttgcgctatatcagcccatggatgtttggtttactcaaggaaaagtttgaggaaagccgacgaatcccgtggacttcttaatgctgatgtcgaaaatcgtgatgtttccaattctgtttctggagagaggaaaacagatgagacaaatatgatgatgagctattatgaacaaatagtgaatgagagaagagctgggttctggggccggtgcatggaaatcatataccagactagcgcaggtgcaacaatgttgactgatgtcacatattggggccttcttgtgccatttttctaccgtgacaagtttgggttagctttgttcactgatggcatgcactccttaaatgctgtttttctacttattgacacacttctcaacaacatgccctttccctggtaccgaatgtctttctttgttttctggagctgcgcctatgtaacattccagtgggtccttcatgcttgtggaggcgtatcctggtggccgtacccatttctggacctttcatcatctggagctcctctatggtacctcggcatggccatcgctcatgtcccctgcttcttcctgtattggttgatcgtcaaggcgaagcacacttatttccaacggatgttcccacatgcttatgttagggcaacatagacccatttatctaatcacaggttaggataaactcataaacatgtataaataaatatctgtatcatactacttctgcacctgccgggcttaagtgtacacctgtatagtctcgtgaatttacagcccctttgagatgggtatgagacctgagaacacgccaggaccggcatgttgatcaatgaatcgcagaggttcactgtcacctgggaacacggtcttgtgctc

SEQ ID NO: 145027 - DNA, 1275 bp, Zea Mays
gcaacgggcgcagcgcacagcaggcgcaaacgcaacacagagcagcgacccaacctacgaacccagagttcccgccaggcccagagcccagagcccagagccccacccgcccccgcgcccgcgggctccaggccgagccgaagctaggcgcgatgtcgctgtcaccggcggacggcgcagcgtactggctgcggtggcaggtcctcgtctgcggcgcgctcatcgcgctgcccacggtggccgcggcggcgctgctgccgcggctgcggagctcagcgccgcccctgcgcgcggccgacctctgggttccttgctgggcgcgcctccacccgggctggctccttgcctaccgcgccgtcgcgctcgccgccgctgtagcgcttctcgcgcgcctcgtcgtcgcgcgcggcatcaccgtcttctacttctacacccagtggacgtttctattagtcaccatatattttgcgtttgccacagctatatcagcccatggatgtttggtttactcaaggaaaagtttgaggaaagccgacgaatcccgtggacttcttaatgctgatgtcgaaaatcgtgatgtttccaattctgtttctggagagaggaaaacagatgagacaaatatgatgatgagctattatgaacaaatagtgaatgagagaagagctgggttctggggccggtgcatggaaatcatataccagactagcgcaggtgcaacaatgttgactgatgtcacatattggggccttcttgtgccatttttctaccgtgacaagtttgggttagctttgttcactgatggcatgcactccttaaatgctgtttttctacttattgacacacttctcaacaacatgccctttccctggtaccgaatgtctttctttgttttctggagctgcgcctatgtaacattccagtgggtccttcatgcttgtggaggcgtatcctggtggccgtacccatttctggacctttcatcatctggagctcctctatggtacctcggcatggccatcgctcatgtcccctgcttcttcctgtattggttgatcgtcaaggcgaagcacacttatttccaacggatgttcccacatgcttatgttagggcaacatagacccatttatctaatcacaggttaggataaactcataaacatgtataaataaatatctgtatcatactacttctgcacctgccgggcttaagtgtacacctgtatagtctcgtgaatttacagcccctttgagatgggtatgagacctgagaac

SEQ ID NO: 145028 - DNA, 104 bp, Zea Mays
gcctatcgccagagtcgtctggtcttccatcgatagctatgacctttcaagacgttgttgacattatttatgaaaactgttggaaaagttcatctcgttaagat

SEQ ID NO: 145029 - DNA, 5799 bp, Zea Mays
ccgcctcccccgacccgctccgctccgctccgctccatccatccctcccgtccccagctccccggcttcccgctgcccctgcgtgcgtgtctctggctgtgcctgtgcgccccccggtgcacccgagaggccgagaggcgaaggctcgtcgtcgcgttgctcgtcgcctcgcctcgcctataactactccctccgctccgcgcctccgctccacacctattccgccacccgcctctcacctctccagtccccacccccgcccccgtccgctcccctatcctgttcgttcccctcctctccacacgatcccctcccttgtcggcttccgcgcgggcgggagtggccgcggccacgactccaccgcctcctgctcgcgccaccacccctcggcccctcgcggcgccgcgcgaccggcgcgtggtgcgcgtttgcctgcccgtcgtcggccctttcttattagttattattaggcggaggagaggctagctctgcggggggtcgccgcgcgccgccgaatcggatcacacgcctccccttcccgccaggccagggggccatggccacgctcccgcgcgccgcgccgcccacgcccgccgcgctgctcccgctgccccgcgccgcgccgccgctgctgctcgccgggagggccgccgccgcgcgccgctctcggctgcgcgcgcggggcccgtccgcggcggcgcgccggagctgggtcgtcgcctccgccgcttcctcctcctcacgggccgtggtcggcggcgtcgcccgccgggaggcccctcccgcgccgcagaagcccacgcagcaggctgcggacttgaaccatatcttgtctgaacgtggagcttgtggtgttggatttgtcgcaaacttgaaaaatatgtcttcatttgacattgttcgtgatgctcttatggctcttgggtgcatggagcaccgtggtggttgtggagcggacagtgactcaggtgatggtgcaggactgatgagtgccgttccatgggacttgtttgatgactgggccagcaagcaagggcttgctctctttgacagaagaaatacaggtgtaggcatggtcttccttccacaagatgagaagtcaatggaagaagccaaagctgcaactgaaaaggtttttgtggatgaaggccttgaggttcttggttggagacccgttccttttaatgtatcagttgtaggtcggaatgcaaaagaaaccatgcctaatatacaacaaatatttgtgaaagttgcaaaagaagataatgctgatgacatagagagagaattatacatcagccgaaagctgatagagcgggctgcaaaatcttttagttgggcagatgaactttatttctgctctttatcaagcagaacgattgtctacaagggaatgctacgatctgaggttcttgggcaattctatttagaccttcagaatgaactgtataaatcaccttttgccatatatcatcgaagattcagtacaaatacaagtcctcgatggcctcttgctcaacctatgaggttacttggacacaacggagaaattaacacaatacaggggaacttgaactggatgcgatcaagggaaaccacactaaagtctcctgtatggcgaggtcgtgaacatgaaatttgcccgtttggtgaccctaaagcatctgattcagcgaatcttgacagtacagctgaattgctgctaagaagtggtaggagtcctgcagaagctcttatgattctcgtccctgaggcatataagaaccatccaacattatctataaaataccccgaggtaactgacttctatgactactacaaaggacaaatggaagcttgggatggacctgctttacttctatttagtgatgggaggactgtaggagcaactcttgataggaatggtctccgtccagcacgctattggagaacgtcagatgacttcgtttatgtcgcatctgaagttggtgttataccaatggatgagtcaaaagtagtaatgaaaggacgattaggtcctggaatgatgataactgttgatctacagactggacaggtgcttgaaaacacagaagtaaagaaaactgtggcttcagcgagcccctatgggacttggttgcaagaatgcacacgtttgataaagcctgtcaactttctctcttcaactatcatggacaatgagactgttttgagacatcaacaggcatttggctattcaagtgaagatgtgcaaatggtgattgaatcaatggcttcacaaggaaaggaaccaacattttgtatgggcgatgacattccattagctgtgttatcacaaagaccacacttgttatatgattatttcaagcagcggtttgcgcaggttacaaatcctgcaattgatccccttagagaaggtttagttatgtctcttgaggttaatattgggaaaagaggcaacatcttggaggttggccctgaaaatgctgatcaggttgcactatcaagccctgtgctgaatgaaggtgaactggaaactctattgaatgactcaaaacttaagcccaaagtactgtcaacatacttcgatattcgtaaaggtctagatggttcacttgataagacaattcaggctctttgtgaagaagctgatgctgctgtgcggagcggctctcaacttcttgttctttctgatcgttctgaagcacctgaacctactcgtcctgccataccaatacttctagctgttggcgccatccaccagcatttgattcagaatggtctccgtatgtctgcttctattgttgctgatactgctcagtgttttagcacacatcattttgcctgtctgatcggatatggtgccagtgctgtgtgtccttatctggcactagaaacatgccggcaatggaggctgagcaacaaaactcttaatttgatgcggaatgggaagatgcccacagtgaccatcgagcaggcacaaaggaactttatcaaagcagtaaaatcaggtctgctcaaaattctttcaaaaatgggtatctcactgctctcaagctattgtggagctcagatctttgaaatttatggtcttggtcaagaagttgttgatcttgccttctgtggaagtgtatcgaaaattggaggtctcacacttgatgagctgggtagggagaccttatcattctgggtgaaggcgttctctgaagatactgcaaagaggctagaaaactttggatttatccaatccagacctggaggtgaataccatgcaaataatcctgagatgtccaagctgttgcacaaagcaattcgtgagaaacgtgataatgcgtacactgtctaccaacaacatcttgcaagccgtcctgtcaatgttcttcgagatcttcttgaattgaaaagtgatcgtgcacctattcctattggcaaagtggagtctgcaacctccattgttgaacgtttttgtactggtggaatgtccctaggagccatttcaagggaaacgcatgaagctattgcaattgcaatgaatagaataggtgggaaatctaattcaggagaaggtggtgaggatccaatccgttggaatcccctcactgatgttgtagatggttattctccaacacttcctcatctcaagggtcttcagaatggtgacacagccacaagtgccattaagcaggttgcatctggacgttttggagttacaccaacattcttagtaaatgctgaccaaattgagataaagattgcgcaaggtgcaaagcctggtgaaggaggtcaacttcctgggaaaaaagtcagtgcatacattgctcgtctgaggaactccaaacctggagttcctctaatctccccgcctccacaccatgacatttattctatcgaggatcttgcacagttgatttatgacctccatcagataaatcctaaagctaaagtatctgtaaagcttgtgtctgaagctggaattggaactgtagcttctggagtttcaaaggcgaatgcagacataattcagatatcaggtcatgatggtggtactggagctagcccaatcagctccatcaaacatgctgggggtccgtgggaacttggtcttacagaaacaaatcagacacttatacaaaatggattgagagagagggtagtacttagggtggacggtggattcaggagtggtcaagatgttcttattgctgctgctatgggagctgatgaatatggctttggttctgtagccatgatagctactggatgtgtcatggcacggatttgtcacacgaataattgtccagttggagtggctagtcagagagaagagcttcgtgcaaggtttcctggtgttcctggtgatcttgttaactacttcctctttgttgccgaggaggttcgagctgcattagcccagttgggttatgagaagttggatgacatcattgggcgaacagatttgcttaaaccaaagcacatctcattggtgaaaacgcagcacattgatcttggatacctcctatcaaatgctggattgcctgaatggagcagctcccaaattaggagccaggacgtccacactaatggccctgttcttgatgagacaatccttgcagatcctgagatagctgatgctattgagaatgagaaggaagtttccaaggcatttcaaatctataatgttgacagagctgtctgtggtcgggtagcaggtgtgattgccaagaagtatggagacacaggttttgctggccagctcaacatcacgttcaatggaagtgcagggcagtcctttggttgtttcctgactcctggaatgaacattcggctagttggggaggccaatgattatgttggaaagggtatggctggtggagaactggtggtagttcctgtagacaaaacaggatttgttcctgaggatgctactatagttggaaacacttgtctgtatggagctacaggtggtcaggtatttgtgagaggcaaggcaggagaaagatttgctgttagaaactctctatgtcaggcagtggttgagggcaccggagatcattgctgtgagtacatgactggtggctgcgtagtcgtacttggcaaagctgggaggaatgttgcagctggaatgactggtggtcttgcctacattctagatgaggatgatacacttgtcccaaaggtcaacaaggaaatcgtcaaaatgcagagagtgaatgctccagctgggcagatgcagctaaagggcttgattgaggcctatgttgataaaacgggcagcgagaaaggtattgcgattttgagggaatgggaggcctatttgccgctcttctggcaactggtaccgcccagtgaagaagactcgcctgaggcttgtgcagagtttgagagagtacttgccaagcaagcaaccacccaattgtctgcgaagtgatcgaatcagactacaggaaggtggtaggtgttttctatttgacacaaagtgatctcatcttatcacttcaagaaaatcgaagaccataaccggcgctctgaggcaccgaagtgcccgtctgaagactgcaactttgtggaggctctgcccaggccatctttttgagttgagctaacagaaccgagggttcttctcgacgctcgtgcacctaggtaacccctgtaaattggtttgctgacgctaggctgcaaggggcctgccctgtttgaactgctgtactgtacatgattcttggccgttgccctgtgtaattatgttttggttagctcgtaaatttatacgcatccaatggaggcatacaatgcaaaaaaataattaagatacaacaataa

SEQ ID NO: 145030 - DNA, 5897 bp, Zea Mays
ccgcctcccccgacccgctccgctccgctccgctccatccatccctcccgtccccagctccccggcttcccgctgcccctgcgtgcgtgtctctggctgtgcctgtgcgccccccggtgcacccgagaggccgagaggcgaaggctcgtcgtcgcgttgctcgtcgcctcgcctcgcctataactactccctccgctccgcgcctccgctccacacctattccgccacccgcctctcacctctccagtccccacccccgcccccgtccgctcccctatcctgttcgttcccctcctctccacacgatcccctcccttgtcggcttccgcgcgggcgggagtggccgcggccacgactccaccgcctcctgctcgcgccaccacccctcggcccctcgcggcgccgcgcgaccggcgcgtggtgcgcgtttgcctgcccgtcgtcggccctttcttattagttattattaggcggaggagaggctagctctgcggggggtcgccgcgcgccgccgaatcggatcacacgcctccccttcccgccaggccagggggccatggccacgctcccgcgcgccgcgccgcccacgcccgccgcgctgctcccgctgccccgcgccgcgccgccgctgctgctcgccgggagggccgccgccgcgcgccgctctcggctgcgcgcgcggggcccgtccgcggcggcgcgccggagctgggtcgtcgcctccgccgcttcctcctcctcacgggccgtggtcggcggcgtcgcccgccgggaggcccctcccgcgccgcagaagcccacgcagcaggctgcggacttgaaccatatcttgtctgaacgtggagcttgtggtgttggatttgtcgcaaacttgaaaaatatgtcttcatttgacattgttcgtgatgctcttatggctcttgggtgcatggagcaccgtggtggttgtggagcggacagtgactcaggtgatggtgcaggactgatgagtgccgttccatgggacttgtttgatgactgggccagcaagcaagggcttgctctctttgacagaagaaatacaggtgtaggcatggtcttccttccacaagatgagaagtcaatggaagaagccaaagctgcaactgaaaaggtttttgtggatgaaggccttgaggttcttggttggagacccgttccttttaatgtatcagttgtaggtcggaatgcaaaagaaaccatgcctaatatacaacaaatatttgtgaaagttgcaaaagaagataatgctgatgacatagagagagaattatacatcagccgaaagctgatagagcgggctgcaaaatcttttagttgggcagatgaactttatttctgctctttatcaagcagaacgattgtctacaagggaatgctacgatctgaggttcttgggcaattctatttagaccttcagaatgaactgtataaatcaccttttgccatatatcatcgaagattcagtacaaatacaagtcctcgatggcctcttgctcaacctatgaggttacttggacacaacggagaaattaacacaatacaggggaacttgaactggatgcgatcaagggaaaccacactaaagtctcctgtatggcgaggtcgtgaacatgaaatttgcccgtttggtgaccctaaagcatctgattcagcgaatcttgacagtacagctgaattgctgctaagaagtggtaggagtcctgcagaagctcttatgattctcgtccctgaggcatataagaaccatccaacattatctataaaataccccgaggtaactgacttctatgactactacaaaggacaaatggaagcttgggatggacctgctttacttctatttagtgatgggaggactgtaggagcaactcttgataggaatggtctccgtccagcacgctattggagaacgtcagatgacttcgtttatgtcgcatctgaagttggtgttataccaatggatgagtcaaaagtagtaatgaaaggacgattaggtcctggaatgatgataactgttgatctacagactggacaggtgcttgaaaacacagaagtaaagaaaactgtggcttcagcgagcccctatgggacttggttgcaagaatgcacacgtttgataaagcctgtcaactttctctcttcaactatcatggacaatgagactgttttgagacatcaacaggcatttggctattcaagtgaagatgtgcaaatggtgattgaatcaatggcttcacaaggaaaggaaccaacattttgtatgggcgatgacattccattagctgtgttatcacaaagaccacacttgttatatgattatttcaagcagcggtttgcgcaggttacaaatcctgcaattgatccccttagagaaggtttagttatgtctcttgaggttaatattgggaaaagaggcaacatcttggaggttggccctgaaaatgctgatcaggttgcactatcaagccctgtgctgaatgaaggtgaactggaaactctattgaatgactcaaaacttaagcccaaagtactgtcaacatacttcgatattcgtaaaggtctagatggttcacttgataagacaattcaggctctttgtgaagaagctgatgctgctgtgcggagcggctctcaacttcttgttctttctgatcgttctgaagcacctgaacctactcgtcctgccataccaatacttctagctgttggcgccatccaccagcatttgattcagaatggtctccgtatgtctgcttctattgttgctgatactgctcagtgttttagcacacatcattttgcctgtctgatcggatatggtgccagtgctgtgtgtccttatctggcactagaaacatgccggcaatggaggctgagcaacaaaactcttaatttgatgcggaatgggaagatgcccacagtgaccatcgagcaggcacaaaggaactttatcaaagcagtaaaatcaggtctgctcaaaattctttcaaaaatgggtatctcactgctctcaagctattgtggagctcagatctttgaaatttatggtcttggtcaagaagttgttgatcttgccttctgtggaagtgtatcgaaaattggaggtctcacacttgatgagctgggtagggagaccttatcattctgggtgaaggcgttctctgaagatactgcaaagaggctagaaaactttggatttatccaatccagacctggaggtgaataccatgcaaataatcctgagatgtccaagctgttgcacaaagcaattcgtgagaaacgtgataatgcgtacactgtctaccaacaacatcttgcaagccgtcctgtcaatgttcttcgagatcttcttgaattgaaaagtgatcgtgcacctattcctattggcaaagtggagtctgcaacctccattgttgaacgtttttgtactggtggaatgtccctaggagccatttcaagggaaacgcatgaagctattgcaattgcaatgaatagaataggtgggaaatctaattcaggagaaggtggtgaggatccaatccgttggaatcccctcactgatgttgtagatggttattctccaacacttcctcatctcaagggtcttcagaatggtgacacagccacaagtgccattaagcaggttgcatctggacgttttggagttacaccaacattcttagtaaatgctgaccaaattgagataaagattgcgcaaggtgcaaagcctggtgaaggaggtcaacttcctgggaaaaaagtcagtgcatacattgctcgtctgaggaactccaaacctggagttcctctaatctccccgcctccacaccatgacatttattctatcgaggatcttgcacagttgatttatgacctccatcagataaatcctaaagctaaagtatctgtaaagcttgtgtctgaagctggaattggaactgtagcttctggagtttcaaaggcgaatgcagacataattcagatatcaggtcatgatggtggtactggagctagcccaatcagctccatcaaacatgctgggggtccgtgggaacttggtcttacagaaacaaatcagacacttatacaaaatggattgagagagagggtagtacttagggtggacggtggattcaggagtggtcaagatgttcttattgctgctgctatgggagctgatgaatatggctttggttctgtagccatgatagctactggatgtgtcatggcacggatttgtcacacgaataattgtccagttggagtggctagtcagagagaagagcttcgtgcaaggtttcctggtgttcctggtgatcttgttaactacttcctctttgttgccgaggaggttcgagctgcattagcccagttgggttatgagaagttggatgacatcattgggcgaacagatttgcttaaaccaaagcacatctcattggtgaaaacgcagcacattgatcttggatacctcctatcaaatgctggattgcctgaatggagcagctcccaaattaggagccaggacgtccacactaatggccctgttcttgatgagacaatccttgcagatcctgagatagctgatgctattgagaatgagaaggaagtttccaaggcatttcaaatctataatgttgacagagctgtctgtggtcgggtagcaggtgtgattgccaagaagtatggagacacaggttttgctggccagctcaacatcacgttcaatggaagtgcagggcagtcctttggttgtttcctgactcctggaatgaacattcggctagttggggaggccaatgattatgttggaaagggtatggctggtggagaactggtggtagttcctgtagacaaaacaggatttgttcctgaggatgctactatagttggaaacacttgtctgtatggagctacaggtggtcaggtatttgtgagaggcaaggcaggagaaagatttgctgttagaaactctctatgtcaggcagtggttgagggcaccggagatcattgctgtgagtacatgactggtggctgcgtagtcgtacttggcaaagctgggaggaatgttgcagctggaatgactggtggtcttgcctacattctagatgaggatgatacacttgtcccaaaggtcaacaaggaaatcgtcaaaatgcagagagtgaatgctccagctgggcagatgcagctaaagggcttgattgaggcctatgttgataaaacgggcagcgagaaaggtattgcgattttgagggaatgggaggcctatttgccgctcttctggcaactggtaccgcccagtgaagaagactcgcctgaggcttgtgcagagtttgagagagtacttgccaagcaagcaaccacccaattgtctgcgaagtgatcgaatcagactacaggaaggtggtaggtgttttctatttgacacaaagtgatctcatcttatcacttcaagaaaatcgaagaccataaccggcgctctgaggcaccgaagtgcccgtctgaagactgcaactttgtggaggctctgcccaggccatctttttgagttgagctaacagaaccgagggttcttctcgacgctcgtgcacctaggtaacccctgtaaattggtttgctgacgctaggctgcaaggggcctgccctgtttgaactgctgtactgtacatgattcttggccgttgccctgtgtaattatgttttggttagctcgtaaatttatacgcatccaatggaggcatacaatgcaagtcgcaagcgcaatagtacggtgcatgataaactgtacggccaggttggattggaatgtttgcttcgtgaatgaacgaaaccggcgtcatgcctgtggtgtgaccgctctggttggcatccaa

SEQ ID NO: 145031 - DNA, 1847 bp, Zea Mays
cgacggcggtgacgaccggggcctgccgccaccatcgccggcgccgcacgtcacacagtgggtacctccacgggaggtgaagcgacaaggggagaccatcgccaagggacacaagcactacgagcttatgctaaaattgcagctcgggatcaggcatgcagtggggaagcaaggcccaattgtgcttgatctgaaatcgtctgctttcgacccaaaggaaaaggtatggacgaagtttcctcctcaaggctcaaaatacactcctccccacaattcttgtgacttcagatggaaggattactgcccacaggtcttccggacgctgcgcaagctgttcaaggtggatgctggtgactatatgttatcgctatgtggaaatgaggctctcagagagctttcatctcctggtaagagtggaagctttttctacctgacaaacgatgatcggtacatgataaagacgatgaagaaatctgaagtgaagatgcttctgaagatgctcccagcttattacaatcatgtccgggcatttgagaatactctagtaaccaagttttttggtctacactgtgtcaagttagctggagcaaatcagaagaaggttcgttttgtcataatgggaaatctattctgctcggaatatccaattcataggcgttttgatctcaaaggttcatcacttgggcgcacaactgataagccacatacagagatcgatcagtatacaactttgaaggatcttgacctgaacttcatctttagattgaagaagcaatggttccatgagttccaaaggcaagtggacagggattgtgagttccttgagcaggagaaaatcatggattacagtcttcttgttggcgtacatttcagagataacacagagaagcttctgactgaaggttccattgactttgatatcatcaacaacgtaccgacacctcgcctttcaaaaggaaatacagatcggtttcttgctggtccaaacaggtctcctaaaatcaaacttggggccaacatgccttcgagagcagaactcactgcccgtaagagcgactgcgaaccgcggatgatcggagagcccaccggagagtgctacgacgtcatactgtattttgggatcatagacatacttcaggattacgatatcagcaagaggcttgagcacgcgtacaagtctttccagcacgacccaacctctatgtccgcggtggacccgaggcagtattccaggcggtttaaagaattcgtgtacagagtgtttcaagaagacgggtgcgcagctgcagacgcgttgagactttggagatgccgcagcctccatgtgtaggtgggtgaactctcaaaggaagcccatctgggtggactagagttgccagaagccagcctccatgttgagactttggagggtggcgtgggtgagcgtcagtcagtggaagcccatctgggtggactagagttgccagaagccagccgtcatctttgtcttccagaattatagttttagccatacacatacgtacatagctcatcactaatgttttgtagggtagggaggtgtttagcttacagatccagctcacagatagaaagattgtaagacaagagcgcaagccagtcgggagatgtagattcttcatcacccgtcccgaggtgtttagcttacagattcagctcacagatacaaagctactgtcttgatcgcaacctcttattttaacttatcgataggaaaccccttgtagacgacgagtgagatcgctgtaatgtacagggtttgtgggtggcctacaagtgatggctcagttttgttccttctttgttttctggaaatgaatgatcttgct

SEQ ID NO: 145032 - DNA, 982 bp, Zea Mays
cccaacaccaaccccaaccccaaacctcctcctccgccaccggcttatcatcgagctctggttccccttgttcgtatgctctactgtatactgagctgggtacttggctccattaacttgccaggccgctaggtacgacgacttggaggacgtcgtcgccctgttctccgctggtgtctcgctggactccacagattcgcaaggccgcacagctcttcacatggcttctgccaatggtcaccttgctgtggtggaatacttgattcaaaatggagcgaatgttaatgccaccaacatggagaagaacacaccactccactgggcatgccttaatggacgtatagaggtaatcagggctttgatctcagcgggggctagcgtgagtgctctgaacagccacgagaaaacgccaatggacgaagcggtgaccacaggcaagatggacgtgatcgacgcgatcggtgcggcagtagctcaagccgagctcgacgccgttactgtctcctaaaaggacctgatgagtacctggagctttgaatgacttgcagccttgttcttatctcccagcggttctgtctgtatcactcgcgaacctggatcccccgacgggccagtatccgggcaatatctatactgacggcaatcgcctgttagtgtcattggcacgaggacccgacctgtcgttgtaaaccagatgtgcagatgtcaaagatcaggattttctcctacaaatgttgtagggccgttgcttgttctcccaggcaaccttcgttttcctttgggttcccttggctccaagtagcagcgaaacgggatccgcacctccaccctctgtgtttttttttcttctcgaaattcagcttttgttgcctttaaaattggaatgcaatgtcgtgtccctgtttgagggttgtttttattgatgaaacgctgcaatcaaggattctctccacttggttagtgctactgtattggtctactg

SEQ ID NO: 145033 - DNA, 1037 bp, Zea Mays
ggccgatatagtgcctagcgtcgacagtcgacgcgtacaggaagcgctagaacaacgcgaccgccgccgccgacgacgacgactcagctactcgcctggtgatgggggtcgaactggcgcaaccgaccgccgccgcggctgcggtgaccaccgctgagcaggctcaggatctcatcgacgccgctaggtacgacgacttggaggacgtcgtcgccctgttctccgctggtgtctcgctggactccacagattcgcaaggccgcacagctcttcacatggcttctgccaatggtcaccttgctgtggtggaatacttgattcaaaatggagcgaatgttaatgccaccaacatggagaagaacacaccactccactgggcatgccttaatggacgtatagaggtaatcagggctttgatctcagcgggggctagcgtgagtgctctgaacagccacgagaaaacgccaatggacgaagcggtgaccacaggcaagatggacgtgatcgacgcgatcggtgcggcagtagctcaagccgagctcgacgccgttactgtctcctaaaaggacctgatgagtacctggagctttgaatgacttgcagccttgttcttatctcccagcggttctgtctgtatcactcgcgaacctggatcccccgacgggccagtatccgggcaatatctatactgacggcaatcgcctgttagtgtcattggcacgaggacccgacctgtcgttgtaaaccagatgtgcagatgtcaaagatcaggattttctcctacaaatgttgtagggccgttgcttgttctcccaggcaaccttcgttttcctttgggttcccttggctccaagtagcagcgaaacgggatccgcacctccaccctctgtgtttttttttcttctcgaaattcagcttttgttgcctttaaaattggaatgcaatgtcgtgtccctgtttgagggttgtttttattgatgaaacgctgcaatcaaggattctctccacttggttagtgctactgtattggtctactg

SEQ ID NO: 145034 - DNA, 1272 bp, Zea Mays
caccactcgccacgccttcgccgcctataaaccgccaccactagccccccctgctccgaggaccacaggagcccacggcacggcgacgccatcgacctcactccatccctccctccctccctccctcactcctcctcttcgccgcctcgcaagcaatggcggtggcgcggctacgcgcggtcgccgccgccgtgctgcagccggcgctcgccgcgggcggccgcggcgagaggcggccgctcgggacggcggcggaggtggccgcgggcgcgggcccgggggctgcgaggtgggagctcttgggcgcgcgggagtactacgactaccgccgcgccatgtacggcgacatcacgcacaaggccatcctcgtcgacgccgccggcacgctgctcgcccccaccgagcccatggcgcaggtgtacaggacgataggccagaagtacggagtgaattactcagaggatgagattctgatgcggtaccggctagcttatgcgcagccatggggtcgatcgcgtctgaggtatgtcgatgacggaaggcccttttggcaacatatagtgagctcatctaccggctgctcagatctacagtatttcgaggaactgtaccagtactacacaactgagaaggcctggcgtctctgcgacccagacgctggacgtgttttcgaggcgctgaggagggctggcgtcaaaacagccatcgtgtccaacttcgacactcgtcttcggccgcttttacaggcgctgaaatgcgacggctggttcgacgcagttgctgtgtctgctgaggttgcagcagaaaagccgaaccccacaatattcttgaaggcctgcgagctgctaggagtgaaacctgaagaagcggtgcacattggtgatgaccgtaggaacgacttatggggagcgagggatgcaggctgcgatgcctggctttggggcagtgacgtttactccttcaaggagatcgcggagaggatcggagttgaggtgtagcaagttgtttctcctcggtcggcgccacttaccccgggcgtcttgtacatattcccaagagaaataacaagagcatcagtttctcctgtgtgcgactgtgccaggccttttgtagcaaataccgatgtgcatttccacgcttccctgtagcaaatactgatgtgcaggagctctgtccgggttgaattcacagagaagagggtaccaaaaaggacagctaaaatgcaatacagagaaacaagaacagcaaactcacacaaataatggcgaaagc

SEQ ID NO: 145035 - DNA, 4639 bp, Zea Mays
gcccagacccgaagccctgcgcctccccctccgccgctcgccgggcgagatgtccccgccgttcgtgttcccctcgaccctgcgggatctggagctggacaccgacggagacagagacgaggagccctcgctccggccgcagaaccccgtcgccgtcgccacgctccgcgctgccgacctcgaggagttcgtcaagggtgcatcatttgatctttctgataaggagctcttctgcattgaggaacaggaggtgtttgatgccatctactctatcgtgcgtgatttcaattgcctacccccagcccttaagtttaacattgttgagaccttgcgctccaacctcagtgtccttctacccagcatagactcactttcccgggcatccatgtcatccccttctgatgctaccgaaatcactgaccgcattgcctcacaccgcaatgccctcaagatctactccttctttctcatttccattgttctcaccgcggaagctggcgctgaaagctgcacagcggctaaggcaacagcacatggtcgaaagaagaaccatatatattcttggaactgggaagcacaaagaggcaggatcatgagtctagtcgctaattctcttgaagctaacctttcgctactttttggtcctggaggaaccgatgaacgatatctctcttttgtttcgaagtgtacttttgttctctgtgaaaatcaaaatgtgttaaaagatgaggatacaagaaatggcctgtgccggataattggagcaattgccacgaagcatcagaggatttctcaaatcagtgcatctgtttcacatctaatacacaaatttgatttcactgttcctcatcttgcggaagcagttgcttctgcggagaaaaagtttggtgatggaagccttgcaatttccctgattagggaaataggtcgggctgatccaaaagaatacacgagagatagtgttggtgcggataatgttgggagattccttgtagaacttgcagaccgcttgccaaaacttatgtcaaccaacattggtgttctgatacctcactttggtggtgagtcatataagatcagaaatgctcttgttggagttttgggaaagctggctgcaaaggctttcaaggatgttgagggtgatagcaatgctcggcttcgaagtaagcaggctatgctggagattttgattgagcgctgtagggatgtgtcagcatacacaaggagtcgtgtgcttcaggtgtggtctgagctttgtgaagaaaattctatttcaattggcctgtggaatgaagtggcttccgttgcttcagggcgactggaggacaaaagtgctattgtgagaaaatcagcattacagcttcttataacaatgctgcaacacaacccttttgggcctcagttaaggactgcaacctttgaggcaactctagaaaagtacaaggaaaaattacaaggaatggagccttcaaattcagacaaagatgaggccgcaaatgatagttcgcctggtgaagtgatcatggggcaagatgaaagtgtcagtgatagctgtttagcatcaagtcaggatcaaaatgaccgtgatgctacgattgtggatataacaaacttggaacaaataagagctttagttgcttcacttgaagctggtctgcggttttcaaagtgtataacttcgttaatgccaattcttgttcagttgttggcgtcatcctcagctactgatgttgagaacaccatccttttactgatgagatgcagacagtttcagatcgaaggatcagaagcagcactcaggaaaatgttacctctggtgttttctcaggataagtcaatatatgaggcagtggagagtgcattcattactttatacacaaggaaaagtccaatagaaacagcaaaaagtttgttagaccttgccattgattgcagcattggtgaccttgctgctctcgagagcttaattagttccttagtttccaaagcagaaatttcatccagcatggtatcagcactgtgggactatttttgctttaacataaatggagtgagaccagtgcaaagccgtggagctctatctattctttgtatggctgcaaagtcgtctcccagcattttgggtaatcacttgcaagatattattgacattgggtttggacgctgggctaaggaagaacctctgcttgctagaactgcatgtcttgctttgcagagattatcagaggaagacaaggacaagctgataagtaataatagtagagtatttgctgcattgcaaggtttggtaacaagcttctcgattcctgagaaaatatggtatggagctgcagataaagctataagcaccatctataccctacaccctgcacctgaactttttgctactgagactgcaaagaagtctctcagttctgtattcagcgttttaggaacaaatgatgtgtcaaatggagatgaagctcagaatggtgcctctctgtcatcagtatcaccttcaaagctgggtagatttctttttgttattagccatatagcactaaatcatttggtgtacattgagaattctgttaggaaaattcagaaacagaaacggaagaatgaaaaatctcagcccaccactgaggatctccaacctgacgtgtctaaaagtttggaggcacaaggcataaatgccgaactgggacttagtgcaaccatagatattgcaatcgagtcccttgctgaaagagcagaaaaggaaattgtttgctgttcttctgaaaagaatctcataggacattgtgggccatttctctcaaaactctgcaggaatcttgcattgctgcaaaagttcccagaccttcaagcttctgcaatgcttgctctttgcaggctaatgatcattgatgcagagttctgcgaagcaaatcttcaaatcctgtttactgttgctgagagtgcgccttctgaaactgtccgatccaattgcactatagcccttggtgatttagcagttcgcttcccaaatctcttagatccttggacagagtatatatatgcccggttacgtgatccttcagtgtctgtgaggaagaatgctgtgctggtcatttctcatcttatattgaatgatatgatgaaggttaaagggtatataaatgaaatggctgtaagaatagaagataaagatgagaggatatcaagcctggcgaaactcttctttcacgagttgtcaaagaaaggaagcaacccaatttataatcttcttccggatatcttgggtagactatgcaatcaacacctcaaagaagaaacattttgcaatattatgcagttcttaatcaactcaattaagaaggacaaacaaatggaagctcttgtggataagctgtgcaataggtttgctggagtaaatgatgtcagacagtgggagtatatttcttattgcctttctcagctaaccttcactgaaaagggcctgaaaaaactcattgataattttaagatgtttgaacatgcattatctgaagattctgtgatgaaccacttcagaagcgtaatatcaaagtgcaagaagtttgcgaaacctgagctaaaaatttgcattgaggaatttgaggagaaacttagcaaggttcatcaggaaaagaaagagcaggaggaaacaacaaaaaatgctgaggcacacagacagagaattgattcgcttgatgaatttctggttactaaggaagttagtgagaacagtgggaattctgctgaagatgaaactagcgaggtagttgatccttctgtggatagcagcacggaacatatggagaacacgccagaatgcagtgtcaatactagtgctgagaattctcagacaacagccccacttacagaatcagaaggtggcggtgaagagattcaatccgcacaacctgttagcaaaggcatgtcacggttaagggcaaagaaaaccagagatcctgttgtagatccttcggtggaccgcagcaccgaatataaggggaacacgccagagcacagtgcggatactagtacggagaattctcagacatcagtcccacttacaggaacagaaggtggcagcgaagagattcaatccacacaacctgttggcaaaggcgtgtcgcggtcaagggcaaggaaaaccagagaccccgttgtagaggactcagcagctccagtgagacgcgccacgcgttcaaccagaagacaaggaagctgatggtgcagcaaagcggcagctcaagccattccgtgccgatctcgcctcgaggtcccggagtactggaccacagcaaagcggtgcctggacgtctggatcggagagttggctggctctatcctttttgcgtgatgcgtgtcggtctagttttagctcgctgattcccggacaggccaataatgatctctcgtgaatctgtctaggggcagtatgtttaactgctccatacgaggagctcttgtgtttggttgttgcagtaggtcggctttcatatggattgtctactacagacattgctcccttggggagcgtatgtataatatctggcctgatctttttgaggcctgatgacgctatgatatttttgaacgtgttgttcttatgaatccagcaggctcagctgatttccagcctttcaatgtg

SEQ ID NO: 145036 - DNA, 860 bp, Zea Mays
aaaactggggaaagtttcatcaatgccatcgccacctgtgaatctgtactctacagactccatggctcaatttaaggaaaaacaaaagcaacatgtccattgtttgttggttcaaacatcagtggggtattataattataaagagatcacaacagacacgaggcagccgtccgagttcaccaaacgcacgctagggtgataccaacactgacatacaagaacgaacacgggtttttttgctagtgtacaggcgcttctactttctctcctacttcgaaccagaagaaaacagagctgcgggaatagatggcccgcacatggcgcagcgcgagtgtgccgttcgtcctgacggccctcgcgcctccttcgatcctggtgcggacgaccgttactccgtgcccttgctccttgagggatgagaatggatcgtactctatcgctgtgctgattattgggaaggacaggtggtccaaagggttttgctcgcactgcagcagacactcctggatggtcaatctaccgcctcgatgcagcaagcagcatccgagttctgctctaatagtcagatttgcaatcttgcatgttgatagaaactccagtgcgctgtttgataggccaatcaatggaaacctaggtaagactgagacattgacagaaacagcaagataaacagaaccatgtaccagtgtgcaagttcattgctttctgaagtagacagaacttacattaccatttaccaactcaattccatgggaaaaaagacaatagatcaataaattgtatcctctcaactatcagacagacataaactactaacaatagaatatagttgaattaataaccttaagtcaagcataaaa

SEQ ID NO: 145037 - DNA, 1122 bp, Zea Mays
gatcttctcgcgtcgattgcttgcccagctcgcttcctcttcgtcttccttctcccccttctctcgcctccggttaaccgccacagcctggattcgccttctcccgcggcggcgcggccggccgctgctgctgcgtcggcgcgtgagatggatgattgcggcggcggcggcggcaagaggccgttccagctggcgcggtcgctgacgtaccaccaccacccggggcaccggccggcggctgcgtccaggtggcggcggcagcaccagcagcatcagctcgcggacgagccgcgcgctccccggccgcaggcggtggtgctgtacacgacgtcgctgcgcggggtgcggcgcacgttcgcggactgcgccgcggtgcgcgccatcctgcgcggcttccgcgtggccgttgacgagcgggacgtgtccatggacgcggcgctccggcgggaggtccaggcgctgctggccgcgcgcggccgcgccttcgcgctcccgcagctgctcatcggcggccgcctcgtcggcggcgcggacgaggtgcggcagctgaacgagaccggccagctccggcgcctcctcgacggcgcggccgggcaggacccggccttcgtctgcgacgcctgtggcggcgtccggttcgtcccgtgcgccggatgcggcggcggccgcaaggtgttcgtcgaggaggagggccgcgtcgtccgctgcgtcgagtgcaacgagaacgggctggtacgctgccttaactgctgctcttgatcgccgacggcggcggcgaacatcgccgttccattcgtgctgctaatccaagcggtagaggttgtggtagatatcaacaaaaggaagaagaagaagaagaagagggggctttcggtttcccggcgtggggttcgtgtgtgtccgatccgatcattttgaggatcggatttgctgctagtcggtggacaagaacagattgttcttggctcattgctgcaaaattgccatatggtgatggcgattggagaataagaactgggcttgtttgtatatgcatctgatgtatcaaagattgatactgctgctagttcaactaatgtaaatacttaagtttggtgtgatgaattgcttcatgccttgtcc

SEQ ID NO: 145038 - DNA, 5035 bp, Zea Mays
atggcattcttcagcaactccgggagcaaggctgattcaggagggtacaacctgaatgaaaaggccgaagatgagggcatctacgagtcagttcaggatgggaatgttgacctgagttctaggcagtggaacttaaatgagaaagcagatgatgcttaccattgtgaagcagagcaatatgaggcgggccagtcaggtttgtactcttctgagaaggcatcagggcagcatatccagaaaggaggcagatcttctggtggtccatggggcacaaattttctgaaggattccaggtccaaacagatggccgaggatgttccatcgaatagtggtagaggaatgaatgctgctagcttgcatgatggcttggatgatagtggagaggatgatgagctgaacagggcaaatggtgaggtgcctgctgaggaaatgctctccgatgactattatgagcaggacggagaggagcagattgaatcgttgcatcgtggcgggacgaagcaatcaagctgttccacttctgaagacgaccccgctgatgtggattttgagccagacagcgaaacggacaaagctactgataaggataagtttatggatagtgagaattctgatggcgacgatgatgatggccttgaactctcagatgatgatgatgactttgttgagaaccggaggcaacctaaacgacttaagattgtagcaactaaaacttccaagggaaggaagttgcccatgccagctcaacgaaaacgaggggtgtctcacagcgatgaagaatattcttcaggaaaagattcagatcttcccagtgatgctgatttcaaacacagatcgaaaagacctgacaggttgcatcagaaatctgtgggccgcagtgatgttgccccaatcaattctcataatgagcttcgaacttctggaaggaggacagtgaaaaagatctcatatgttgaaagcgaagaaagtgatgatagcgaggagaagtcaactaaacaacaaaaggttagtggattcaagaaggtaataaattacacgaaaagagttgctgaggaacagaggtacaagagggcactatcacgtgaagaggttgaggtgcatgatgtgggcaaggagatggagctggatcttattaaacaatatagtcaggttgaacggatatttgctgatagggtcagcaaagctgatggagatgatctggttcctgaatatttagtcaaatggcaaggacttccttatgcagaatctacctgggaaaaagatacagatatcgattttgctcaagatgcaattgatgaatataaggctcgtgaagctgccacatctatacttgggaaaacagtagatttccaacgaaagaaaagcaaagctagtttgaggaggcttgatgatcagccagaatggctaaaagctggtaagcttcgtgattatcagctggaaggactaaactttctcgtgaatgggtggagaaatgatactaatgttatacttgctgatgaaatgggtctggggaaaactatccaatctgtttccatgcttggcttccttcataatgctcaagaaatcaatggtccatttcttgtagttgtgccactgtcaacattgtcgaactgggcaaaagaatttcggaagtggctgcccaacatgaatgttgtcatttatgttggcaaccgtgccagcagagagatgtgccagaagcatgagtttttttcagacaagaagggtgggcgtcatgtaaaattccatacgttgataactacatatgaggtgattctcaaggacaaagcggttctttccaagatcaaatggaactatcttatggttgatgaagcccaccggttgaaaaattgtgaagcatcactatatactacccttttggaattcagcactaagaataagctgcttatcactggaacacctttgcagaacagtgtggaagagctttgggcattacttcatttccttgatccagttaaattcaacagcaaggatagttttgttgaaagatacaaaaatttgagttccttcaatgaaaccgagcttgcgaatctgcataaggaattgaggcctcatattctaaggcgggttataaaagatgtcgagaagtctttacctcctaaaattgaacggattctacgtgtcgagatgtcaccccttcagaaacaatactacaagtggattttagagcggaatttccagaatctaaataaaggagtccgtgggaatcaggtatcacttttgaacattgttgttgaattgaagaaatgctgcaaccatccatttttgtttgaaagtgccgatcacggttatggtggagatagcattggcgatcggaataaagttgaacggattgttatgagtagtggtaaacttgtcttgttggacaaactattgatggttaagatgttggacatccttgcagaatatctctcccttcggggatttcagtttcagaggcttgatggtagtacaagagcagatcttcgtcatcaagccatggaacattttaatgctcctggaagtgatgacttctgttttcttttatccacacgtgccggaggacttggtattaatcttgcaactgcagatacagtgataatttttgattcagattggaatccacaaaatgatctgcaggttcttcctctcattctcttcctcctgcaagttcttgatcacttggttattcagaagctaaatgctgagggcaggcttgagaagaaagaatccaaaaagggtggctccatatttgacaagaatgaactttcggctatcttgaggtttggagcagaggaattgttcaaagaagacaagactgatgaagaggccaagagaaaccttgaaagtttggacattgatgaaattcttgagagagcagagaaagtcgagacaaagggtggtgaaggggaggaaggaaatgagcttcttagtgctttcaaggcatgtgatgtcgcaaacttttccagtggcgaggatgatgcaacattctggagtaggctaatacagccagatcctgcagatattattcaggaaactttggcgcctcgtgctgcacgtaataaaaagagttatgttgaagatccccagtttgacaaaaataataacaggaaaagacgtgcagttgaagcacaagaaaagccaaggaggcgttctggcagaacagtggaaacagttaattcagtaccattggttgatggagcagtagctcaagtacgagagtggtcttttggtaatattccaaagaaggatgcttctcgttttgtacgagcgggcacagttttggattttttcggtgtagctgtgaaggcctatgaattgctagctcgtgttgaagagcttcagttgttgtcaaagcgcattgcacgatacaaagatccaatcaagcaataccgcatccaactaccttataaaaagcctcagtggtcagcaagctgtggatggactgaaactgatgatgctagattgatggttggaattcattggtatggctacgggaattgggagaaaatacgtttggatccaaagcttggcctgacaacaaaaattgcaccagcaacacttggtgagagagagacatttttaccacgtgctccaaacttggataaccgtgctagcgctctcctgcaaaaggaatatgctaagtttagcggtaatagctcaaaagtcaaaggaaatgcccgccagacagtcaataacgacagtaatagtggagctcgatcaatgagaggccgacaaaaggatgcaccagataaagaggataataagccgaacaaagatgacattcagaagcgcaaggtaatgatggaagctgaagcaagagaagaaggtgaaatttctgaatcagaggcagagacaaagtatcgtctggacaaagaggagaagtggctcgaatggtgctctgaagttttaaatgaggaacaggaaactttgaagcgcctggacaggctgcagaatacaagtgtaaacctcccaaaggaaaaggttctttcaagaatccgcaagtatctcctgataattggggacaaaattggtgaagttgtccggcaacacagtgaatcttataggcaatcccgtaagtgtagccgcacctcccgcatgaccatgaggttatggaattatgttgccaccttttcaaacatgtctggggagcaattgcatgatctctatttgaaacttagtcaagaccaactggaaggtggagttggcccatctcatggtgccaatttcacatccattccttccagcaagggaggtaactcaaatcaacttcatcctacaagaaaccataggccaaccaggtctctccagtacaattctgagtctttgcacaataatgagagctctggaagttctgaagcctggaagcgtcgacggagagcagaccctgataatcagtttgacacccagcctttgtatcaacctccaattatgacaaatggaaataggttgcaggaatctagtagttctgcaggaattcttggttggggtccagttgaaatgagacggtatggtaatgaaaggccaaagcgtggtgttcatcctagtcattttcctactgggcatggacctttgttgtagctgaaggaattagatgactcgaacaaccttgtccactttggcataactgttcccagtgaatttcagcttccatatagttacaaatggtggaactctgtcggaattgaaattcttttttccataacaagaaggaataaaaagcaagacctgacctggagcgcagtttgaatactgtccctcaaaggtaatgccaggactccagaggcgacgcagggatttgttaacagctacactgaatatccttctgacaacatcacagtaaaacgaatacatggtggcttgtcaactgccaagaggattaatcgaggaaattttgtcgattcagttttgtgatccaatagaaaagttgggggtcattaggaaaaagttcatctcaacaatgatctatagttcactctatacatgtattatgttttacattgcaatataatgaaatatggttcagttattcccactc

SEQ ID NO: 145039 - DNA, 1269 bp, Zea Mays
atggccgtccgccgcaggaccgcggcggccgctgccggggacccgcctccgcaggcgccaccggcagatgaggcggcggcggtggcaccagacgaaccggtcctccgggcgccgaacctgcgcgtggccgctgtggcagcggcgctcttcctcgcgcccttctcgtacctcgcgttcgtgcactactccctgaccgccgatctgcagcgatccatcctcaaatgcggcgccatgagcctcgttgggttctgcgtcgcgctcaagctcatccctatcgcggcccgctaccacctccgccgccgtatgttcggctacgacatcaacaagaaaggcttgcctacgggtcaaatcaaagtgcctgaggcactaggccttgttgtggggattgtctatttggtcattgctattatatttcagcagtttcactatgccccagactccatttggcttgttgaatataatgcagcattgacatccatctgctttatgattcttcttggatttgttgatgatgttcttgatgttccatggagagtgaaattggcgctgccaacatttgcagcactcccattgttgatggcatatgctggtggcacttccatcatcattccaaagcctttaaccccttatgttgggctaacagttttggagctaggtttattttacaagctattcatgctcttgttagcagtcttttgtacaaactcgataaatatacatgctggcctaaatggacttgaagttgggcagacagttgttatatctgcggcggttttgatacataatgtaatgcgcatagcatcttctacagatattgaaactcagcaagctcatgaattctctatttatcttgtcttgccattcctaaccatttcattagctctgctagcttttaactggtatccttcaattgtttttgttggtgatacctacacctattttgctggaatggctttggctgtgataggaattttgggacatttcagcgagacgttgttgctcttctttttacctcaagttcttaatttcctgtgttcggtcccacagctctttcactttgttccttgcccaagacataggttgccgaggtttgatcctggagcgggtctgttgactggtaccaaagatgggaatctggttaacatattccttaggttatttggaaagtgctcagagagggccctttgcataaggctccttattttccaggctctatgttgcgtattctgcttctggctaaggcacatgctcaccggatggtacaagtga

SEQ ID NO: 145040 - DNA, 1162 bp, Zea Mays
aattttgcactcccacccctcaaaaaaatttcagccgccactctcttcctcctccccacgctgtcttcttcctccccttgctgtcttcactagcgctcgtcctcgcatggaaaccagctgcgcgcaggagtgcggcaaggcttggccgatgccctctgttgccgccatggcatctcccttccccaagctccagcgcgcacacggcagcagatcgtggtgcccctccctgcaagctcgagtttccccatggcgcctgtcctcgggcatgggcgagctcctctctgccctatgatttttccacggctgtgagctccccctggctgccattttccccaaccgtcgtcctcttgctctccggccatcagcagccagcagctctgctcgcccccttccatggcgtctgcctcccctgctcttccctgcccggccagggaacgcccagatcctcgcctccctgctccacacgccccagccatggcgttcttcacttccctgctccacgggcgtgagtctccactcccccttcaatggatgctgaccaagactccgccttcgcttgctccctgcaatcgagcagcagcgtccccagcctcccatggcgccacctgcgacttccatggccggcgcccaagttccagcccctcctcccatgggcattccccagcagcagccctactattccctccccatggcgccaccccctgcagccccgcgctgcgcatgccttgcgagtgctcgacaaaatgcctatgaaaggcttggtgttgtagacagctccgtccacgacgccgtcgaccctcgctagtggtcgacgccgtgcttcgcgcttggctcgttcgacgaaacgccaagccttgtggacagcccatgtgactagcctcgattcgtccaggttgttcacttggtattttgtggattaatctgtttaagcttggtcgatgttgtgcatgtgtgtatatgtgtaagaaaatgtattggtatggattgaagttcgtggcgaaagaaaaagaagtagaaaagaactcggatgtttttatatttcgataggaatttatgcgatgtgttgtttgatgtgtgcaatttgtagtttgtataagtatattttggtcgatgtggtgtacattggtgttggaatgtgtgtgggtataaaaatgttttggtt

SEQ ID NO: 145041 - DNA, 333 bp, Zea Mays
atgattttgacaggtataactggtgggacaacagcctctgtcttcacattctcaaataaaccattgttagcaggaacattaacaggagggcatccattagccagaactggtccaccgtttgaaaggcttgaccctgcagctttcttttcattattgcatgcattctccttcgtgatggcactggtttccccttttgctgattttgcaggaagaacaacacttgaagtagatattttctctaaattcagcactgacaagttcagggtgccaaactggatctccgtccgttcacattctttgctgacacttttagttggacttttgaggggctga

SEQ ID NO: 145042 - DNA, 504 bp, Zea Mays
atggaaaggttcaaaaagagacgtgcggaagggaaaattctgaaccctttgatcttagaagagttccaatgggacaatgaatgggttcaaatggcaactaacaatgaagaagttcatcctggagatcatggtcttttctggttccatattgatgaagccattggtgcaacaaaaccactacagggccgtaattttcctaggatgagcagaacttatactcgtagaaatggtgttgtcgctgctgcttcaacttccaccacaaccacaatttcagatcaagaccaacaagaattaggggaagaggaagaagctgaaattgactttgttgctcctgatgatctacatgttgaggatgactatggccaagctcttgctacagatgatgaagctgctgcaactgcaaataatgaggatgtgggcacatgcaatggacttagatatcgattaggccttatgggcttagggcagtatgccatatttatcagtttatcatttatttgttag

SEQ ID NO: 145043 - DNA, 103 bp, Zea Mays
gattccctatcttatcctctattttaaaccttactctataaacaatatcatctacagttctgtgtcccctattttacactacctgctggagacagtgctataa

SEQ ID NO: 145044 - DNA, 1247 bp, Zea Mays
tccccctctctgccggcggtcccactcccaccacacaacacaacgcggcacggcgcccatagaaaacccgtccggcggacgcgggccagccaggcgttttgccgggccccagttgacagtggactagtggacacaccgcgttttcctgacgaggccgtgggccatggccaagccgacaaccagtctccaccctgggacctcccgagtccgccgttcgggtcaactggcagctggctgcctggctataaacacccgccctcgcaccaccgcggcagggcacggcacacgtctcggcagccacaagaaaccacccccttccggcacacgggctcgaccacctgactccatcaccgtgcctgtctgtgttctagggacaagaagagcagagagatccaggagcgagcagaggcggggagaagaggatgagcaccacaacggcgtcgtcgctgaaccccaacgcgccgctcttcatcccggcggcgtaccggcaggtggaggacttctcgcccgagtggtgggagctcgtcaacaccaccgcctggttccgggaccactgcttccggcagcgccagctccacgaggccgcctgcgacgacgtcgccgcgctcctccccgacgacctcctcgacaccaacgacctcttctacgcgcccgacgtcgtccaccaccaaccagcgacggcgctgctgcccgggtacgatgtcctcgacgtgctcgcggcgctgagcctcagctcccccagggccatccgccagcctcgctaggagaagcctgctcatggcgcctggcgggccaccacctccaccacggctgctgtgcctagtgtaaccccaagcaaggctagtctgtttctgtgtatacaatacgactgaaaaactaggagaggggggattcggccaaggcggccggtgctctctcctctcctcgtagctagtttttcctcctgttccagctcagttcttgttcatccagccgtgttaggaaaacaaacccagccccgtgcccatgttgttgaaaaatatattagtctggtatttacaactcttcgccaggtgcttcttgttcctcgagatttttttttcctctgtttcaacagtgtgttctctgatttgagagctgcaaggtgtgttttttgtctgtctcaacttcggtgatggtgggggcctgaaaatgggatgtgattgaaagctcggttgctacatagtacaaaagtacatctgctcatgtgccagcacttaagcgaataa

SEQ ID NO: 145045 - DNA, 6135 bp, Zea Mays
atggaggcgctggtggggcgggcggtacggaaggcgttcccggggttcggcacctacgcgggcgtcgttgagtcgtacgaccccggcgcgggctacttccgcgtgctatacgaggacggcgactccgaggaggtcgacgccgacgagatggcccagattctcgtcggacccgcgatgccgcgcgcgcagcagcagcgcacctcgccgcaggatgccgcggggaggcgccccaagaagcgccgccgcgggaacgaggacgacccatccccgacctcgactccagacggcgtcgtgctggccgttgccgccgccgcgggcgaggagaccgagcccgcgacgcccgttatggaggcggtggcggagaagaagccgagggtcagcccgggaccagagtcgtccaggccgctgcggcggagcgcgcgccaggcgaaggcggccgagcacgcggccgagatggaggcggcggtggccgtcgcggctgccgcggaggccgaggaggaggctgctgctgctgcggcggcttcgacgccgcagcagtctgggaggaagcgaccccgcgcgattgggagtgggcggtaccgctcggtgtccagggacttggaggaggccgcccctaagaaaccgctgccaccgccacctaagccggagctgccaccatcgtcgcagggtctggatttaggcggcctccctgttctcgatgtctttcaagtttactcctgcttaaggtcgtttagcaaacagttgttcctcagccccttctcactggagacatttgtggctgcgttgcggagcacctatgtcaacccgttgatcgactgggtgcatttcacgctgctgcgggctctcaagagtcatctggaggactcggccaatgaaggagacccgtcggcggtacactgcattaggaatcttaactgggagctgttagacctagcaacttggccaatctatcttgctgaatacttgctaactaggggctcagaattgaggtatggtatgaagcttacagatttaagtttgctgagtacagagtactataggcagcctgcaggggtaaaactcgagctgctgcgttcactctctgatgatgttctagagatcggggctatacggtcaaggttgtcagagtcagatggaaacgacgagggcttcagaagcactggtgtaagaagaaaaaagaggggcaggggctcttctgctaaggtggcagtgggttcttctcaatttccagaaggatctgctgaagtggatgatggaaacagcgatgaatgttatctttgtggcatggatggcaacttgttatgctgtgatggctgtccagctgcatttcattcgaaatgtgttggggtggtggaggatcttttgcctgaaggtgattggtattgtcctgaatgtttgatacggaaggatggatctagaaatattgcaaatccaatgagaggagcagagattctaggaactgatccacacggtcgactatacttcttcacttgcggctatcttttggtggttgactcatgtgatggttactcaccatgctattattatggtcagatcgatcttcatcatcttgttgcagttttgaactcatgtcatccttcgtacagctcaatggttaacacaatttcttcattttgtgatactgcaatcaagtcacccaatcttaacagtcgttaccagagtagcagggaatgtagtacatctgatgctgagatagactcaaaacatttatcattattgaagcaacctagtgatcatgatcagtttaaggtagaacaaagaagctcctttgaacacttgaattctggaaaaatttctacctcaaattctgatgatttggatcaagatttgtcacagcatagcattaaactaagatattcacttatgtctcgaagtggaattgttgctgaaggtgatttgaatcaaatacctgaaaatagatcctctagtgccaagaatgataactgcaattccccaaaagatattgtttattcacgtgctaatggttctcttgcaaagaaccagaaagattcaccacctaaagaaaaaccaagagattggcagctccattctgatcctgctaggtacataaactattacagtttcggtcaaatagcagcttcagctgctgaagagctaaaacacaagctgtctgaaaacaaggacgtgaaaaaacctgttcaggatgtactctcgttccatctgagaacaatatgtaaaaagtatgctaacttttttgcactaactgatcaaaagctttctgctgaactgcttaaagaaaaatgtggatggtgcaattcctgccaaattagtggtggcgttgattgcattttcagattaactgatattaagtacatggaaggccctaagccacatactcttgatctcggagcagaaaataatatggaaagtcatatcatccttgctatgtataacattttgtcagttgaagaacggttgaatggtttgctgagtggcccttggcaaaatccacaatatagcatttgttggcgcaatgcggttctcaaggcttcagatgtgtcatcacttaagcagcctcttctaatgttagagtccagtctgcgacgtgttgccattactacggaatggcagaaagcggcggactctgttgaagttgttggttctgcagctcatattttggtccgctcgtctaataagtctctaagtcatgtaagtgctactgctagaaagccagggagaaagccgtctcctaacggtgaacttaaagttgactctcgtgatgttggtgtttattggtggaggggtggaaaattatctcgccaagtgtttcattggaagaggttgcctcagtcattggtcaacaaagctgctcggcaagctggacgtaggagaattcccacgatttcatacacggatggttcacaatttgcgcggaggttcaaatacatagcctggcgagctgctgtggaaatggcagaaaatgcggcccagctcattttgcagattaaagaacttgaatggaatatcaagtggactgagatactgagcactctcccttctagccttatgaccaaagaaacccagaaaatagctaggcttttcaagaaagttataattcgcaggaaacgcattgaaggaacaaatgttgaatatctgcttgattttggaaagagggagaacattcctcctgttatttctaaacatggaacaaaacttgaggaatcctctagcgagaggaacaggtactggttgagtgaagttcatgtccctttgaatctgttgaaggcttatgaagccaaaacatttgctcgcttactgaaaaagaaagaaactgacgaactatctaagaagactaagaaattgtgtggctcaaaaccagaaatgccaagaaagacaggctttgattacctctttgaaaaagcagaaaaaagatccaccatgccttgtggtcattgtcacaaagaggtgattgcaagtgaagctgttaactgccaatattgtgcagctcttttccatagaaaacatttcaaggtccctagaggtgctacaaatgctgtttatgtttgtaataagtgcttagatgagaaggttctaaaggtggagtctcctcagaaaaagactgcaccaaagaagctgtctcccaaaaagaagcagaagaaacaaaagaaacaatcacgcaagattgagaccaggaggaatcagatagttctgaaatgcaaaacgaaaattggcaaaaagggtaagcgtggccggcccaggaagaacccaacggatctgtcaaagaatgaaccatcaaagatccatgaaagtgaaccatcaaatgtttccaaaaatgaaccagtgaaacgtatatcaaaacgattacatgataaatacatgaaaagtaactcaaatgtatccgagaatgcagctagctctagcaagaggaagaggactgtttcacagtattcatactggttgaatggcctccgatggtcacaaaatccacatgatgaacgagcaagaagtttcaggaaagaaagagtagtttttccatcagaagatgctgaaatttctgaagtcaacccagtatgctgcttgtgtgaaaaatgctataatgaagaggatatctatattgcctgtgaaaaatgtgaagactggttccatggggatatatattctgttaacattgagaatgtgaacaatctcattggtttcaagtgccatagatgccgccggagaagtctacctgtctgcccgtatgcagagactgtaacagttgtcaaaggccagtcagatgaggatcattgcatcaagcttgtagatcaatgtgttggcaagtttgtggaggatgaggatcccaattgtcccaaagatcttggtgctccgggtagtctgcaagagcttcatgatcatgaaattgagcaggggctcaatgttcatattactgagatagaattcagttacgataactgtctagaggagctgaatgatcatggctgttcgaaagagtttgatgctcatagcactgagaaagatctagaggacgataaaagtttgagaaaggtagacatccataatgagttgagggcgcttgacgatcttggctctgagaaagaacctggtgatcattgtaatccgaaagatctcaacagtcacatcaatctgaaagatcctggcaactgtagaagtgacaaagagatgaaggataataattgtctaaatgaactagatggagacaacaattggaaagcactcgacagctataacagttggaaactgctcgacagccataacagtcaagaggagcttgactgtactacaaatagcaagttttctcctaaagaaataccatgtcctatggaacttgacggttttagtagcctgaagcttgtcagtcataacatcttggaagaacttgataatcataactgtctaaaagagaacggtaatgaaaatagttctaaagagctggacaacaatggaagtccaaaagattcaggtgactgtctagcagatcacttcaacagcagtaggatatctggcaatgaggcactggtccttacacctgaaactgattcggtaaatgaatctcttggtttgcaatccaaggatgatcctgggaagtctgttcctactgagcatgagattgatcttcaggtggtggtgactttatagtgtactttggacagtcagaaaccttccagcctcagcatgagtcccattagttccactggtcatttcttgatgctgttctggttgataattttgttgaccttgcctcattgccgtaatctacaataaggaaaaaaagctattctttatttcctttgggaaatattctgatctgactagccaagcgatagaataattaactcttgaggttaagttatattattcttaatagggctgacatagggaatagttagggtttcaatgtttcatttcctttccaagcttcacattgcctgtcagaatatggagtcatgtcacccacgattatgcattgatttggatccctctaagtacaagtgactggtatttggctgccctgcagtaatatatgatgttcaagggagatagcagccacagccgccgcgaagcatgaggaggcaatatattccattccccattgtttcgttttgtgggccccttagatgttgcacaagatggatgtgccaaaacctgatgattcaatgattcattctttcaactttgctcctaacagtgagttgcaatctttatctgtaaaaaatgctccaagggaactcgtctggacagggttaattggattttgtataggtttgcgttatcagccttcctagttacagagttcactctagcatggaatcggtttggacaatgctgttttggtcctctggttacattccgcttcagcgttagattacgatcgattcttcgcggcattgcgcgcgttcttttgataaagagacgctcttctagtcgctccaaaaattctgtaattccatctcgtgtctggaatggtcggccatcgagaagaatggtagaagaacgagcgaggagccaaggaaggagacgagagtacctcagaaaactagttcctacgaaaactcctgtatagttggtgctttatagcatctccaacgacatgacataaaaatgtcctataatttaaaaaagtgtattttattg

SEQ ID NO: 145046 - DNA, 6450 bp, Zea Mays
ggtccctcgcaatccccaaccgcgcgccgccgccgatctcgccgcgacccaggccctagcgcccgatccgtcgccgcgctggcctccccgcgctccgcaaaccctaggggttccgcgcgcgcgggagggatggaggcgctggtggggcgggcggtacggaaggcgttcccggggttcggcacctacgcgggcgtcgttgagtcgtacgaccccggcgcgggctacttccgcgtgctatacgaggacggcgactccgaggaggtcgacgccgacgagatggcccagattctcgtcggacccgcgatgccgcgcgcgcagcagcagcgcacctcgccgcaggatgccgcggggaggcgccccaagaagcgccgccgcgggaacgaggacgacccatccccgacctcgactccagacggcgtcgtgctggccgttgccgccgccgcgggcgaggagaccgagcccgcgacgcccgttatggaggcggtggcggagaagaagccgagggtcagcccgggaccagagtcgtccaggccgctgcggcggagcgcgcgccaggcgaaggcggccgagcacgcggccgagatggaggcggcggtggccgtcgcggctgccgcggaggccgaggaggaggctgctgctgctgcggcggcttcgacgccgcagcagtctgggaggaagcgaccccgcgcgattgggagtgggcggtaccgctcggtgtccagggacttggaggaggccgcccctaagaaaccgctgccaccgccacctaagccggagctgccaccatcgtcgcagggtctggatttaggcggcctccctgttctcgatgtctttcaagtttactcctgcttaaggtcgtttagcaaacagttgttcctcagccccttctcactggagacatttgtggctgcgttgcggagcacctatgtcaacccgttgatcgactgggtgcatttcacgctgctgcgggctctcaagagtcatctggaggactcggccaatgaaggagacccgtcggcggtacactgcattaggaatcttaactgggagctgttagacctagcaacttggccaatctatcttgctgaatacttgctaactaggggctcagaattgaggtatggtatgaagcttacagatttaagtttgctgagtacagagtactataggcagcctgcaggggtaaaactcgagctgctgcgttcactctctgatgatgttctagagatcggggctatacggtcaaggttgtcagagtcagatggaaacgacgagggcttcagaagcactggtgtaagaagaaaaaagaggggcaggggctcttctgctaaggtggcagtgggttcttctcaatttccagaaggatctgctgaagtggatgatggaaacagcgatgaatgttatctttgtggcatggatggcaacttgttatgctgtgatggctgtccagctgcatttcattcgaaatgtgttggggtggtggaggatcttttgcctgaaggtgattggtattgtcctgaatgtttgatacggaaggatggatctagaaatattgcaaatccaatgagaggagcagagattctaggaactgatccacacggtcgactatacttcttcacttgcggctatcttttggtggttgactcatgtgatggttactcaccatgctattattatggtcagatcgatcttcatcatcttgttgcagttttgaactcatgtcatccttcgtacagctcaatggttaacacaatttcttcattttgtgatactgcaatcaagtcacccaatcttaacagtcgttaccagagtagcagggaatgtagtacatctgatgctgagatagactcaaaacatttatcattattgaagcaacctagtgatcatgatcagtttaaggtagaacaaagaagctcctttgaacacttgaattctggaaaaatttctacctcaaattctgatgatttggatcaagatttgtcacagcatagcattaaactaagatattcacttatgtctcgaagtggaattgttgctgaaggtgatttgaatcaaatacctgaaaatagatcctctagtgccaagaatgataactgcaattccccaaaagatattgtttattcacgtgctaatggttctcttgcaaagaaccagaaagattcaccacctaaagaaaaaccaagagattggcagctccattctgatcctgctaggtacataaactattacagtttcggtcaaatagcagcttcagctgctgaagagctaaaacacaagctgtctgaaaacaaggacgtgaaaaaacctgttcaggatgtactctcgttccatctgagaacaatatgtaaaaagtatgctaacttttttgcactaactgatcaaaagctttctgctgaactgcttaaagaaaaatgtggatggtgcaattcctgccaaattagtggtggcgttgattgcattttcagattaactgatattaagtacatggaaggccctaagccacatactcttgatctcggagcagaaaataatatggaaagtcatatcatccttgctatgtataacattttgtcagttgaagaacggttgaatggtttgctgagtggcccttggcaaaatccacaatatagcatttgttggcgcaatgcggttctcaaggcttcagatgtgtcatcacttaagcagcctcttctaatgttagagtccagtctgcgacgtgttgccattactacggaatggcagaaagcggcggactctgttgaagttgttggttctgcagctcatattttggtccgctcgtctaataagtctctaagtcatgtaagtgctactgctagaaagccagggagaaagccgtctcctaacggtgaacttaaagttgactctcgtgatgttggtgtttattggtggaggggtggaaaattatctcgccaagtgtttcattggaagaggttgcctcagtcattggtcaacaaagctgctcggcaagctggacgtaggagaattcccacgatttcatacacggatggttcacaatttgcgcggaggttcaaatacatagcctggcgagctgctgtggaaatggcagaaaatgcggcccagctcattttgcagattaaagaacttgaatggaatatcaagtggactgagatactgagcactctcccttctagccttatgaccaaagaaacccagaaaatagctaggcttttcaagaaagttataattcgcaggaaacgcattgaaggaacaaatgttgaatatctgcttgattttggaaagagggagaacattcctcctgttatttctaaacatggaacaaaacttgaggaatcctctagcgagaggaacaggtactggttgagtgaagttcatgtccctttgaatctgttgaaggcttatgaagccaaaacatttgctcgcttactgaaaaagaaagaaactgacgaactatctaagaagactaagaaattgtgtggctcaaaaccagaaatgccaagaaagacaggctttgattacctctttgaaaaagcagaaaaaagatccaccatgccttgtggtcattgtcacaaagaggtgattgcaagtgaagctgttaactgccaatattgtgcagctcttttccatagaaaacatttcaaggtccctagaggtgctacaaatgctgtttatgtttgtaataagtgcttagatgagaaggttctaaaggtggagtctcctcagaaaaagactgcaccaaagaagctgtctcccaaaaagaagcagaagaaacaaaagaaacaatcacgcaagattgagaccaggaggaatcagatagttctgaaatgcaaaacgaaaattggcaaaaagggtaagcgtggccggcccaggaagaacccaacggatctgtcaaagaatgaaccatcaaagatccatgaaagtgaaccatcaaatgtttccaaaaatgaaccagtgaaacgtatatcaaaacgattacatgataaatacatgaaaagtaactcaaatgtatccgagaatgcagctagctctagcaagaggaagaggactgtttcacagtattcatactggttgaatggcctccgatggtcacaaaatccacatgatgaacgagcaagaagtttcaggaaagaaagagtagtttttccatcagaagatgctgaaatttctgaagtcaacccagtatgctgcttgtgtgaaaaatgctataatgaagaggatatctatattgcctgtgaaaaatgtgaagactggttccatggggatatatattctgttaacattgagaatgtgaacaatctcattggtttcaagtgccatagatgccgccggagaagtctacctgtctgcccgtatgcagagactgtaacagttgtcaaaggccagtcagatgaggatcattgcatcaagcttgtagatcaatgtgttggcaagtttgtggaggatgaggatcccaattgtcccaaagatcttggtgctccgggtagtctgcaagagcttcatgatcatgaaattgagcaggggctcaatgttcatattactgagatagaattcagttacgataactgtctagaggagctgaatgatcatggctgttcgaaagagtttgatgctcatagcactgagaaagatctagaggacgataaaagtttgagaaaggtagacatccataatgagttgagggcgcttgacgatcttggctctgagaaagaacctggtgatcattgtaatccgaaagatctcaacagtcacatcaatctgaaagatcctggcaactgtagaagtgacaaagagatgaaggataataattgtctaaatgaactagatggagacaacaattggaaagcactcgacagctataacagttggaaactgctcgacagccataacagtcaagaggagcttgactgtactacaaatagcaagttttctcctaaagaaataccatgtcctatggaacttgacggttttagtagcctgaagcttgtcagtcataacatcttggaagaacttgataatcataactgtctaaaagagaacggtaatgaaaatagttctaaagagctggacaacaatggaagtccaaaagattcaggtgactgtctagcagatcacttcaacagcagtaggatatctggcaatgaggcactggtccttacacctgaaactgattcggtaaatgaatctcttggtttgcaatccaaggatgatcctgggaagtctgttcctactgagcatgagattgatcttcaggtggtggtgactttatagtgtactttggacagtcagaaaccttccagcctcagcatgagtcccattagttccactggtcatttcttgatgctgttctggttgataattttgttgaccttgcctcattgccgtaatctacaataaggaaaaaaagctattctttatttcctttgggaaatattctgatctgactagccaagcgatagaataattaactcttgaggttaagttatattattcttaatagggctgacatagggaatagttagggtttcaatgtttcatttcctttccaagcttcacattgcctgtcagaatatggagtcatgtcacccacgattatgcattgatttggatccctctaagtacaagtgactggtatttggctgccctgcagtaatatatgatgttcaaggtgagtctcaatttcgtgttacatgtatgttcattagaacatttgacatgtttcccttaggccttgttcgtttctatcggattgcacccggaattgttccacctaatcaaagtttatataaattagagaagcaatccggttaggaatcgttccgacccatcaatccgatagaaacgaacaaggccttagtcttttcctattttccctcctgttatgcccaaacttcaaataatcagtactgatggttcgaagcaatttactagtggagtaattgtcagcaacacattacaagtgtgatgcccatattttctttcagctttatcgaccatgttaccagtctatagtaatgacatatggatattaccaactcatcaaatttgcaaaagcacacttcatcaaagtcttctcagttggcactcatcgtgtttgttctccatgtaaacagggagatagcagccacagccgccgcgaagcatgaggaggcaatatattccattccccattgtttcgttttgtgggccccttagatgttgcacaagatggatgtgccaaaacctgatgattcaatgattcattctttcaactttgctcctaacagtgagttgcaatctttatctgtaaaaaatgctccaagggaactcgtctggacagggttaattggattttgtataggtttgcgttatcagccttcctagttacagagttcactctagcatggaatcggtttggacaatgctgttttggtcctctggttacattccgcttcagcgttagattacgatcga

SEQ ID NO: 145047 - DNA, 6398 bp, Zea Mays
cttcctccctgcccatccccttcctctcgtaatcccggaaatccgcgggtccctcgcaatccccaaccgcgcgccgccgccgatctcgccgcgacccaggccctagcgcccgatccgtcgccgcgctggcctccccgcgctccgcaaaccctaggggttccgcgcgcgcgggagggatggaggcgctggtggggcgggcggtacggaaggcgttcccggggttcggcacctacgcgggcgtcgttgagtcgtacgaccccggcgcgggctacttccgcgtgctatacgaggacggcgactccgaggaggtcgacgccgacgagatggcccagattctcgtcggacccgcgatgccgcgcgcgcagcagcagcgcacctcgccgcaggatgccgcggggaggcgccccaagaagcgccgccgcgggaacgaggacgacccatccccgacctcgactccagacggcgtcgtgctggccgttgccgccgccgcgggcgaggagaccgagcccgcgacgcccgttatggaggcggtggcggagaagaagccgagggtcagcccgggaccagagtcgtccaggccgctgcggcggagcgcgcgccaggcgaaggcggccgagcacgcggccgagatggaggcggcggtggccgtcgcggctgccgcggaggccgaggaggaggctgctgctgctgcggcggcttcgacgccgcagcagtctgggaggaagcgaccccgcgcgattgggagtgggcggtaccgctcggtgtccagggacttggaggaggccgcccctaagaaaccgctgccaccgccacctaagccggagctgccaccatcgtcgcagggtctggatttaggcggcctccctgttctcgatgtctttcaagtttactcctgcttaaggtcgtttagcaaacagttgttcctcagccccttctcactggagacatttgtggctgcgttgcggagcacctatgtcaacccgttgatcgactgggtgcatttcacgctgctgcgggctctcaagagtcatctggaggactcggccaatgaaggagacccgtcggcggtacactgcattaggaatcttaactgggagctgttagacctagcaacttggccaatctatcttgctgaatacttgctaactaggggctcagaattgaggtatggtatgaagcttacagatttaagtttgctgagtacagagtactataggcagcctgcaggggtaaaactcgagctgctgcgttcactctctgatgatgttctagagatcggggctatacggtcaaggttgtcagagtcagatggaaacgacgagggcttcagaagcactggtgtaagaagaaaaaagaggggcaggggctcttctgctaaggtggcagtgggttcttctcaatttccagaaggatctgctgaagtggatgatggaaacagcgatgaatgttatctttgtggcatggatggcaacttgttatgctgtgatggctgtccagctgcatttcattcgaaatgtgttggggtggtggaggatcttttgcctgaaggtgattggtattgtcctgaatgtttgatacggaaggatggatctagaaatattgcaaatccaatgagaggagcagagattctaggaactgatccacacggtcgactatacttcttcacttgcggctatcttttggtctcaatggttaacacaatttcttcattttgtgatactgcaatcaagtcacccaatcttaacagtcgttaccagagtagcagggaatgtagtacatctgatgctgagatagactcaaaacatttatcattattgaagcaacctagtgatcatgatcagtttaaggtagaacaaagaagctcctttgaacacttgaattctggaaaaatttctacctcaaattctgatgatttggatcaagatttgtcacagcatagcattaaactaagatattcacttatgtctcgaagtggaattgttgctgaaggtgatttgaatcaaatacctgaaaatagatcctctagtgccaagaatgataactgcaattccccaaaagatattgtttattcacgtgctaatggttctcttgcaaagaaccagaaagattcaccacctaaagaaaaaccaagagattggcagctccattctgatcctgctaggtacataaactattacagtttcggtcaaatagcagcttcagctgctgaagagctaaaacacaagctgtctgaaaacaaggacgtgaaaaaacctgttcaggatgtactctcgttccatctgagaacaatatgtaaaaagtatgctaacttttttgcactaactgatcaaaagctttctgctgaactgcttaaagaaaaatgtggatggtgcaattcctgccaaattagtggtggcgttgattgcattttcagattaactgatattaagtacatggaaggccctaagccacatactcttgatctcggagcagaaaataatatggaaagtcatatcatccttgctatgtataacattttgtcagttgaagaacggttgaatggtttgctgagtggcccttggcaaaatccacaatatagcatttgttggcgcaatgcggttctcaaggcttcagatgtgtcatcacttaagcagcctcttctaatgttagagtccagtctgcgacgtgttgccattactacggaatggcagaaagcggcggactctgttgaagttgttggttctgcagctcatattttggtccgctcgtctaataagtctctaagtcatgtaagtgctactgctagaaagccagggagaaagccgtctcctaacggtgaacttaaagttgactctcgtgatgttggtgtttattggtggaggggtggaaaattatctcgccaagtgtttcattggaagaggttgcctcagtcattggtcaacaaagctgctcggcaagctggacgtaggagaattcccacgatttcatacacggatggttcacaatttgcgcggaggttcaaatacatagcctggcgagctgctgtggaaatggcagaaaatgcggcccagctcattttgcagattaaagaacttgaatggaatatcaagtggactgagatactgagcactctcccttctagccttatgaccaaagaaacccagaaaatagctaggcttttcaagaaagttataattcgcaggaaacgcattgaaggaacaaatgttgaatatctgcttgattttggaaagagggagaacattcctcctgttatttctaaacatggaacaaaacttgaggaatcctctagcgagaggaacaggtactggttgagtgaagttcatgtccctttgaatctgttgaaggcttatgaagccaaaacatttgctcgcttactgaaaaagaaagaaactgacgaactatctaagaagactaagaaattgtgtggctcaaaaccagaaatgccaagaaagacaggctttgattacctctttgaaaaagcagaaaaaagatccaccatgccttgtggtcattgtcacaaagaggtgattgcaagtgaagctgttaactgccaatattgtgcagctcttttccatagaaaacatttcaaggtccctagaggtgctacaaatgctgtttatgtttgtaataagtgcttagatgagaaggttctaaaggtggagtctcctcagaaaaagactgcaccaaagaagctgtctcccaaaaagaagcagaagaaacaaaagaaacaatcacgcaagattgagaccaggaggaatcagatagttctgaaatgcaaaacgaaaattggcaaaaagggtaagcgtggccggcccaggaagaacccaacggatctgtcaaagaatgaaccatcaaagatccatgaaagtgaaccatcaaatgtttccaaaaatgaaccagtgaaacgtatatcaaaacgattacatgataaatacatgaaaagtaactcaaatgtatccgagaatgcagctagctctagcaagaggaagaggactgtttcacagtattcatactggttgaatggcctccgatggtcacaaaatccacatgatgaacgagcaagaagtttcaggaaagaaagagtagtttttccatcagaagatgctgaaatttctgaagtcaacccagtatgctgcttgtgtgaaaaatgctataatgaagaggatatctatattgcctgtgaaaaatgtgaagactggttccatggggatatatattctgttaacattgagaatgtgaacaatctcattggtttcaagtgccatagatgccgccggagaagtctacctgtctgcccgtatgcagagactgtaacagttgtcaaaggccagtcagatgaggatcattgcatcaagcttgtagatcaatgtgttggcaagtttgtggaggatgaggatcccaattgtcccaaagatcttggtgctccgggtagtctgcaagagcttcatgatcatgaaattgagcaggggctcaatgttcatattactgagatagaattcagttacgataactgtctagaggagctgaatgatcatggctgttcgaaagagtttgatgctcatagcactgagaaagatctagaggacgataaaagtttgagaaaggtagacatccataatgagttgagggcgcttgacgatcttggctctgagaaagaacctggtgatcattgtaatccgaaagatctcaacagtcacatcaatctgaaagatcctggcaactgtagaagtgacaaagagatgaaggataataattgtctaaatgaactagatggagacaacaattggaaagcactcgacagctataacagttggaaactgctcgacagccataacagtcaagaggagcttgactgtactacaaatagcaagttttctcctaaagaaataccatgtcctatggaacttgacggttttagtagcctgaagcttgtcagtcataacatcttggaagaacttgataatcataactgtctaaaagagaacggtaatgaaaatagttctaaagagctggacaacaatggaagtccaaaagattcaggtgactgtctagcagatcacttcaacagcagtaggatatctggcaatgaggcactggtccttacacctgaaactgattcggtaaatgaatctcttggtttgcaatccaaggatgatcctgggaagtctgttcctactgagcatgagattgatcttcaggtggtggtgactttatagtgtactttggacagtcagaaaccttccagcctcagcatgagtcccattagttccactggtcatttcttgatgctgttctggttgataattttgttgaccttgcctcattgccgtaatctacaataaggaaaaaaagctattctttatttcctttgggaaatattctgatctgactagccaagcgatagaataattaactcttgaggttaagttatattattcttaatagggctgacatagggaatagttagggtttcaatgtttcatttcctttccaagcttcacattgcctgtcagaatatggagtcatgtcacccacgattatgcattgatttggatccctctaagtacaagtgactggtatttggctgccctgcagtaatatatgatgttcaaggtgagtctcaatttcgtgttacatgtatgttcattagaacatttgacatgtttcccttaggccttgttcgtttctatcggattgcacccggaattgttccacctaatcaaagtttatataaattagagaagcaatccggttaggaatcgttccgacccatcaatccgatagaaacgaacaaggccttagtcttttcctattttccctcctgttatgcccaaacttcaaataatcagtactgatggttcgaagcaatttactagtggagtaattgtcagcaacacattacaagtgtgatgcccatattttctttcagctttatcgaccatgttaccagtctatagtaatgacatatggatattaccaactcatcaaatttgcaaaagcacacttcatcaaagtcttctcagttggcactcatcgtgtttgttctccatgtaaacagggagatagcagccacagccgccgcgaagcatgaggaggcaatatattccattccccattgtttcgttttgtgggccccttagatgttgcacaagatggatgtgccaaaacctgatgattcaatgattcattctttcaactttgctcctaacagtgagttgcaatctttatctgtaaaaaatgctccaagggaactcgtctggacagggttaattggattttgtataggtttgcgttatcagccttcctagttacagagttcactctagcatggaatcggtttggacaatgctgttttggtcctctggttacattccgcttcagcgttagattacgatcga

SEQ ID NO: 145048 - DNA, 1137 bp, Zea Mays
cttcctccctgcccatccccttcctctcgtaatcccggaaatccgcgggtccctcgcaatccccaaccgcgcgccgccgccgatctcgccgcgacccaggccctagcgcccgatccgtcgccgcgctggcctccccgcgctccgcaaaccctaggggttccgcgcgcgcgggagggatggaggcgctggtggggcgggcggtacggaaggcgttcccggggttcggcacctacgcgggcgtcgttgagtcgtacgaccccggcgcgggctacttccgcgtgctatacgaggacggcgactccgaggaggtcgacgccgacgagatggcccagattctcgtcggacccgcgatgccgcgcgcgcagcagcagcgcacctcgccgcaggatgccgcggggaggcgccccaagaagcgccgccgcgggaacgaggacgacccatccccgacctcgactccagacggcgtcgtgctggccgttgccgccgccgcgggcgaggagaccgagcccgcgacgcccgttatggaggcggtggcggagaagaagccgagggtcagcccgggaccagagtcgtccaggccgctgcggcggagcgcgcgccaggcgaaggcggccgagcacgcggccgagatggaggcggcggtggccgtcgcggctgccgcggaggccgaggaggaggctgctgctgctgcggcggcttcgacgccgcagcagtctgggaggaagcgaccccgcgcgattgggagtgggcggtaccgctcggtgtccagggacttggaggaggccgcccctaagaaaccgctgccaccgccacctaagccggagctgccaccatcgtcgcagggtctggatttaggcggcctccctgttctcgatgtctttcaagtttactcctgcttaaggtcgtttagcaaacagttgttcctcagccccttctcactggagacatttgtggctgcgttgcggagcacctatgtcaacccgttgatcgactgggtgcatttcacgctgctgcgggctctcaagagtcatctggaggactcggccaatgaaggagacccgtcggcggtacactgcattaggtaccatgtcctttgctgtatagtgtatactaagcttagagacctctatgtgattg

SEQ ID NO: 145049 - DNA, 799 bp, Zea Mays
caagagtattttggggaatgggaatatatagggatccaaataatcaaatttgccctccctcaccaagtcgaggaccccctccgaatccgagggttcaagcgaccgacggcgaacatggcggcggacggcggcccagcgacgtcggcgctggaagaggccctcaagcccttccaggaaagagcctccgaggctgagatacgcatagcgaagctggaagccttgctgtacaacaaagatggtccgagcggtggatccgaggcaacttcctctgccgtgaaggatctccagtcgaagctagatgtggttactgcagaatgcttgactgaaaaggagaagaacaagaagctgaccatggagaacgagaagctccagtaccgcatgacccatctgattcgtgcgataaaagaggcggaatcgagataggagcagcccggcgaggccgattcaaagcctgatgtcgaagtgttccccacccgccttgctgatcctacacgctgttcctgcatctacctcaagttatcattgtgatcttgagatagagcttggtcacaagtcaagactgtattatcaaactgtcgattgaaaatgatgatgtgtgcacagctttctgtcttcacctgaccccatctcgaagggcacattggaacacaaaatgttatctgaaatgacagttcatattttgaaacatttcgcccccacttcatttatgcctaggggaatgttggtgatctactgagctgataatggagagccggatgttggtgatctactcagctgataacggttggagcaaagaggg

SEQ ID NO: 145050 - DNA, 606 bp, Zea Mays
ctggagtcccaaacaccccttagtctcaacatcctcaaatgtttcacagttattcatttttcttctttggagtctcgtcttgttttacatcatcactgagtggctcagtgttcacctcttcatcgtggctcctcacgcttgcccttctttttcttctcctcagtttgaggttcatcttgtccacgagcaatcttatcaacatccatcgcttcaccttcagcctgaactttagacttatttttcctgcctttcaaacacttcgttcttctcattacctgcaaaaataattagataagtgtaaattacttagatatggttattagaaatatatgaattcaatttgagtgtttatggaactgagggaaggtctatatccttgccatcaacatcctccggacccgcattaatacccttacaacatggttctatcgaggtgcgacctcaacttgttcacgcagtttctgtcaatttttttttcttgaatacgcaggaggtctgcgtatttttatattaagaagaaaaaaggggggagccccaaaacagaaacaacagttttacaacctcacaccaccattaacgcctaagacagctcctctaaatggaaga

SEQ ID NO: 145051 - DNA, 2217 bp, Zea Mays
cttgaggctacagccgcagagacggtctcgtaccagcgggcggcattaggaaactcagcgccaggcttcgacggcaccgcggcgaagaccttaatgtcatccttagtaatggagtcactgcacaggcagcagcacaagcacaagcactataaggaaacgcaacccgatcgacatcacaagagaaatttgccatttggagcgaaaaacgacaagatcccatatcacggtcatcatcatatcgatgcgaatcagcagatctagcaacaagtctaacagcgctcacccagacacataggttttgccggcgaggtgagcctcgagggacttgaggccgtcggcggtgtggaggtcggagaagacggccatcgtatcgatcggcgaggagcaggcgtcttctcgagggatgtgagatgagcagcggcggcggctaaaatcaaaaaccctagagagacagagaggagtccaaagacgcgaccgccgcttatatatatagtggcgctctagagggtggggcccacctgccagagtcgtacactgaggacaccgagcgcccgtgcgattaggcatctacggtgaggatattccttgtgcatcacgtggggccgtaggagccgttggatcggcatattcgatcaacggacgatgcaaatctatcatctttctttggatagcgcctcctcgtcctctccggtgtcgtcccgccgcccactcccatggcctccctcgccatcccggccttgcgcccggcgggagccaagctcaccggcaatatcacacccacgaatccctggaggcccgctcgccaatgcgcttgcgcgtccggtggccatgtcggggagttgtcagctctggccccggaggctgaggcagagcaggcggtggtgagcgaggtcaagccaaggtttaggtgggacgcgttcgggtccgacctgactgggccgcagcagcgggcggtccgggtcctgtctccgaagctgcccaaccgctgcaaggccctggtggcgcgcgtggtgtgcctgagccccggggacgagaggcttggcgcgctgctcgcgtactgggtgaaggcgatgaagcctaagagagcggattggttgctggttctcaaggaactgaaggccatggagagcccgctgcttgctgaggtactggagcatgcattgctggaaaattctttcgaggcaaacgttcgtgactacaccaagttgatccacatctacggcaagcagaagcgactgcagaaagccgaggacgcatttgccgccatgaaaggcagaggtttcccttgcgatcaggtcatgctgaccgcactgatggacatgcacagcaaggctggagatcttgcccgtgcaaaggaaatattcggggaaatcgtgctgctcggtctcccactggataagcgcgcgtacggctcgatggtcatggcctatgtcagggccgacatgctgccggaagcagaggatctgatcaaagaaacggaggagcagcaggtgttcgccgggaaggaggtttacaaggcgttgctgagagcctattcatacagaggcgatccagatggggcgcagcgggtcttcgatgcagtacagtttgcggggatagtgcctgacacgaagctgtgcgcgctactggtgaatgcctactgcctctccgatcggatcgaggaagctgtctgtgtgatccgcaatatgagaagcgcgggagtggagccctgtgacaaatgtgttgctttggtgttgggtgcttgtgagaaggtcaacatgctagaaacagcgctggggtttctgacagagcttgaagagaacggtgtttcgattggccaagagccctctcagttgcttgctgcgtggttcaggaagcttggggtggttcgtgaggtcgaccaggttctgaaggacctctcgtcagaggacatgacgagtagaccaagctttgcggtttctttagaacagcagtagcgatctattggtgacttcgttaaaagttttggctctgtatatccaagcaaataacactcttggatattcactggccagaagctgagccatgtgatgtactgtacatccattaggatcatttcagaccatttagatgtgtggtaagtttctgtccaatgcttccttgtttctctgtccgagatacttttctcaagttaattgacatcctttcaaaagagaaataaatgttgcaagcctgcaacagctatgttcactaagcacc

SEQ ID NO: 145052 - DNA, 1852 bp, Zea Mays
gccagccagcttctgctggaacaagaacagtacaggtacagcctcctccctccacagcagcgacaccaatggcatcgtggtcgtggacctctgttcactgcagcagctaccccctaccggggccgtcggcacgcttcacgccttctctggtctccgcaacaacaccggcgctcaggcggacgagggcgagggggcagctgcagcgatgcctctgttcccagtacgccggcgaacgccagccgccgccgccgccaccgccacagccggagccggactcgccgcagcagctggagcgcctcttctccaacctcaaccagaccaccatgaagcacgagccagggagcgtcaccagcgccgtcttccttgtggctggcacaacggttggagcaggcatccttgcaatccctgcagtcacacaagaagctgggttcttggcctcggcagtcatatgcatcctctgctggtcatacatggtcgtcacggggctgttggttgctgaagtaaacgtcaataccatgtgtgagctaggatctggtggcgtctcactggtctcgatggctatgcgcactcttgggacatttggagtgagaacatcttgcttatcctatttatttatacattatgcacttcttgtcgcatacgtggcacgctcttcaaatatcataacaaactcattgggcattccaatatgggagagtgctaccctgttttctctagctttcggaggggtatgttactttggaagccagcgattgattggtgcagtaaatggagttctggtagtcggcatcctagcatccttcacttctcttgttgtagtggcaagtggaaacctacagtggagttctcttcttgaagcgaattttgctgctgctccacaaagtataccaataattgctctttcatttgtataccagaatgtggttcctgttctctgtacaaatttggagggagacctgtcaaaagtacgaacagctattgtggcgggtactgccatacccctggctctgttcctagtatgggatggagtaatcttggggacacttccagaccttgcagggagcagcactgtttctgaccccttggaactacttagatcgagtaatgggatagtggggcctattgttgaggcgttctcatttctcgctatagccacatcatacattggatttgttctaggaatctcggacttccttgcagacttgcttaaactaccaagtggccagaacaaaccgctgccatacgtattgactctgtttcctccacttgttctgtcactgcttgacccggagatatttttcaaggcattggactttgcaggaacttatggagttctagtgctgtttggagtttttcctgccgctatgtcttggtcagagagatattcggatgagttggaagctccagtaccccctatagtccccggagggaaatttactctctcggctgtcatgggaggtgcattgcttgtgattgttccagagttaatcaaggatgtaatgcaactacaaggactacactgacaatcggtgcaagtgaaaggacatataacagttacagtaaaacggtccttgagatttttgttgcagtaacaagtacatgtagcaaaagcaaaggcaaaactcgaaagcaatcaagtgcagagattgcagtttcatcgagcatcgacgttggagttgaattgttttttatgagattagcacggggttcagaacttcggttaaatttctgcaaccgaaagaaaaatctaaaattccgtattacactaatatatgtgctttgttgtgaatatataactttgtaattatattttctattgtttatgtcacataaaattcttcttttcattaga

SEQ ID NO: 145053 - DNA, 92 bp, Zea Mays
tgtctggtgctccaaggaagggcggcccccaggaactcgccagcctcgggttttcattccagccgctccgctataattcatcggactgtccg

SEQ ID NO: 145054 - DNA, 822 bp, Zea Mays
atggcttccgccgtgcactcgccgctggctctgctaccgaggccccgcgccgtggccgacggcggcatggaggacagcgacagcgagagcgtggcggagtcgtgcccgcacccgcgcggcgcggccaccgactcctcgtcctgctgcggcagcagcgcgtgctgccacgacgacgaggaggaggaggagatggacgaggacgacgacgggtgcagcagctgcgtggagggagacgagtgcagcagctaccatcaaggccaagaaggagctgccggcggcggcggcggcggcggcgacggcgacgtggaggaggtggggaggaggaacagggccggggcgagggggagcggcgcctggtgggagcagatggcggtggccggggcccgcggcacgacgcttcctctcccacgggcgccggaggccgcggtcgccgaggacccgaagcgcgcggcggagcggcaggaggaggaccgcaagttctgggaggactgtctcgcctccgggtacccatgaacccacccacccccttggccccttgccatgcatccgatcgagctcaccgcaatcccatgcgtgcatgctcgcgcacaaaccacaagttacatacacgacgacggcggcaaaggccagaatcgccgtgccgacacacaagagctagtagtagtagtatgtttttttagggattacccccctacttgctcttccttgtacagccatttcacgaatattttagaaattcttgggctactgtacgttgaccggcagcgtgctgcgtgcatgacatgatgatgatctgaattctgaagaaactggcggtttatt

SEQ ID NO: 145055 - DNA, 266 bp, Zea Mays
ccgtatatgcatcctacttattggtttgtaacaaagttgaactgcaaagggtaaaacagacaatcgtcacagaccaccaactctcagcagacaagaatcagtttacttgccaaacagttttaaaaaatgattctaggagaatcaagaggatcagctactcacgaggatcaggatctggagctaaagaagcagaagctggagctttgccaaacgggcccttaatacctggaacggaggttcaaacattcgatgggacatgggctaaa

SEQ ID NO: 145056 - DNA, 1010 bp, Zea Mays
ttacgtcaggtagcgtcagacattccagtgcgtgcctggcaagtggcaaactcgagctgtctagtcctcggttcgcgaatcttccacagagaggcagacggcaggactcgcttcaagctcctcatctcgcgcagggggggtcgcctgaggtatcggtcaatcagtaatcaccccaaatcctagggttctagtcgcttctcgtcgtttcgttcgtagagacaatggtgaaggcagttgctgtcctcgccggcactgatgtcaagggcaccatcttcttttcacaggagggggatggtccgaccaccgtgactggaagtatctctggcctcaagccagggctccatgggttccatgtgcacgcgcttggcgacaccaccaacggctgcatgtcgactgggccacacttcaatcctgttggcaaggagcatggcgcaccggaagatgaggaccgccatgccggtgatcttgggaatgtgacagcgggagaagatggtgttgttaatgtcaatattactgacagccagatacctcttgctggaccccactcgatcattggccgagctgttgttgtccatgctgatccggatgatcttggcaaaggtggacatgagcttagcaagagcacgggaaatgctggcggacgtgttgcctgtggtatcattgggctccaaggctaaagcagttaacctccgaggcaaacaccatagaaggtcgaagcgagcacctcaggatgttgctgttccatttcccctgtattggcaacacaatttgagtactccaaataagcgcctgatccatgatcagagagcactattcatgccattttgtatatgaacaatgttgcgcacctgcttaagtgtctgttccaacaaatgcttaagaagacactactggaggtgtactatggagtactaccagcagcatctaaacttgacgaaaccaattaaccatctatggtgacacgggatattacaacatcaggcggggggatggggcgtaggaaaaaaaaa

SEQ ID NO: 145057 - DNA, 1570 bp, Zea Mays
gggcgagcagttgtcacctggaaaaatacaatataactatgaggtgtaggttacgtcaggtagcgtcagacattccagtgcgtgcctggcaagtggcaaactcgagctgtctagtcctcggttcgcgaatcttccacagagaggcagacggcaggactcgcttcaagctcctcatctcgcgcagggggggtcgcctgaggtatcggtcaatcagtaatcaccccaaatcctagggttctagtcgcttctcgtcgtttcgttcgtaggtgcgccccctctcatctgcactaaacctgagtcctgattagggttctacataatcgcttctctttgcctgattgatttgataccctacatccgtggtcgccggttgttccggattagccggatctgttggtctccggttcgtgtgtgctgtaccggatttggggtatgttcgagttgcttggtagatttacgttggtacatacggttgcacagaagatctggatttactgagtagtaggctagtagctgcctacggcgtacacatgacttgtgtatgaatcgtgtatctggcgtgtcgatgcttagtacgcgtagtgctgcaccatactgaaactgaatggacattggctgtgtggatgatttatgcggtgatgcattcagctacggtatgctgactagacatgctgctgagttttggttcttcagcacttccgatcttaatatcttgccaccatgccctcttgagatgaacttttttccctttgtgggtttttggtggcagatcacagagacaatggtgaaggcagttgctgtcctcgccggcactgatgtcaagggcaccatcttcttttcacaggagggggatggtccgaccaccgtgactggaagtatctctggcctcaagccagggctccatgggttccatgtgcacgcgcttggcgacaccaccaacggctgcatgtcgactgggccacacttcaatcctgttggcaaggagcatggcgcaccggaagatgaggaccgccatgccggtgatcttgggaatgtgacagcgggagaagatggtgttgttaatgtcaatattactgacagccagatacctcttgctggaccccactcgatcattggccgagctgttgttgtccatgctgatccggatgatcttggcaaaggtggacatgagcttagcaagagcacgggaaatgctggcggacgtgttgcctgtggtatcattgggctccaaggctaaagcagttaacctccgaggcaaacaccatagaaggtcgaagcgagcacctcaggatgttgctgttccatttcccctgtattggcaacacaatttgagtactccaaataagcgcctgatccatgatcagagagcactattcatgccattttgtatatgaacaatgttgcgcacctgcttaagtgtctgttccaacaaatgcttaagaagacactactggaggtgtactatggagtactaccagcagcatctaaacttgacgaaaccaattaaccatctatggtgacacgggatattacaacatcaggcggggggatggggcgtaggaaaaaaaaa

SEQ ID NO: 145058 - DNA, 1247 bp, Zea Mays
gggcgagcagttgtcacctggaaaaatacaatataactatgaggtgtaggttacgtcaggtagcgtcagacattccagtgcgtgcctggcaagtggcaaactcgagctgtctagtcctcggttcgcgaatcttccacagagaggcagacggcaggactcgcttcaagctcctcatctcgcgcagggggggtcgcctgagatcacagagacaatggtgaaggcagttgctgtcctcgccggcactgatgtcaagggcaccatcttcttttcacaggagggggatggtaattcccggcacatgtttttgacttacaatgaggatctctgtggtctaacgagaatatctgcttcatgggtaggtccgaccaccgtgactggaagtatctctggcctcaagccagggctccatgggttccatgtgcacgcgcttggcgacaccaccaacggctgcatgtcgactgggccacacttcaatcctgttggcaaggagcatggcgcaccggaagatgaggaccgccatgccggtgatcttgggaatgtgacagcgggagaagatggtatttttgtctcactgccttgcgtcattgtttggttcatttgaactggagaaatctttataaagttggctgcgaagactagatttattcattttccaatgtacgttgttgcattgaaactgcagcgcaatagctcataatcccactgacaatttacttctttgcttctcaggtgttgttaatgtcaatattactgacagccagatacctcttgctggaccccactcgatcattggccgagctgttgttgtccatgctgatccggatgatcttggcaaaggtggacatgagcttagcaagagcacgggaaatgctggcggacgtgttgcctgtggtatcattgggctccaaggctaaagcagttaacctccgaggcaaacaccatagaaggtcgaagcgagcacctcaggatgttgctgttccatttcccctgtattggcaacacaatttgagtactccaaataagcgcctgatccatgatcagagagcactattcatgccattttgtatatgaacaatgttgcgcacctgcttaagtgtctgttccaacaaatgcttaagaagacactactggaggtgtactatggagtactaccagcagcatctaaacttgacgaaaccaattaaccatctatggtgacacgggatattacaacatcaggcggggggatggggcgtaggaaaaaaaaa

SEQ ID NO: 145059 - DNA, 1067 bp, Zea Mays
gggcgagcagttgtcacctggaaaaatacaatataactatgaggtgtaggttacgtcaggtagcgtcagacattccagtgcgtgcctggcaagtggcaaactcgagctgtctagtcctcggttcgcgaatcttccacagagaggcagacggcaggactcgcttcaagctcctcatctcgcgcagggggggtcgcctgaggtatcggtcaatcagtaatcaccccaaatcctagggttctagtcgcttctcgtcgtttcgttcgtagatcacagagacaatggtgaaggcagttgctgtcctcgccggcactgatgtcaagggcaccatcttcttttcacaggagggggatggtccgaccaccgtgactggaagtatctctggcctcaagccagggctccatgggttccatgtgcacgcgcttggcgacaccaccaacggctgcatgtcgactgggccacacttcaatcctgttggcaaggagcatggcgcaccggaagatgaggaccgccatgccggtgatcttgggaatgtgacagcgggagaagatggtgttgttaatgtcaatattactgacagccagatacctcttgctggaccccactcgatcattggccgagctgttgttgtccatgctgatccggatgatcttggcaaaggtggacatgagcttagcaagagcacgggaaatgctggcggacgtgttgcctgtggtatcattgggctccaaggctaaagcagttaacctccgaggcaaacaccatagaaggtcgaagcgagcacctcaggatgttgctgttccatttcccctgtattggcaacacaatttgagtactccaaataagcgcctgatccatgatcagagagcactattcatgccattttgtatatgaacaatgttgcgcacctgcttaagtgtctgttccaacaaatgcttaagaagacactactggaggtgtactatggagtactaccagcagcatctaaacttgacgaaaccaattaaccatctatggtgacacgggatattacaacatcaggcggggggatggggcgtaggaaaaaaaaa

SEQ ID NO: 145060 - DNA, 1000 bp, Zea Mays
gggcgagcagttgtcacctggaaaaatacaatataactatgaggtgtaggttacgtcaggtagcgtcagacattccagtgcgtgcctggcaagtggcaaactcgagctgtctagtcctcggttcgcgaatcttccacagagaggcagacggcaggactcgcttcaagctcctcatctcgcgcagggggggtcgcctgagatcacagagacaatggtgaaggcagttgctgtcctcgccggcactgatgtcaagggcaccatcttcttttcacaggagggggatggtccgaccaccgtgactggaagtatctctggcctcaagccagggctccatgggttccatgtgcacgcgcttggcgacaccaccaacggctgcatgtcgactgggccacacttcaatcctgttggcaaggagcatggcgcaccggaagatgaggaccgccatgccggtgatcttgggaatgtgacagcgggagaagatggtgttgttaatgtcaatattactgacagccagatacctcttgctggaccccactcgatcattggccgagctgttgttgtccatgctgatccggatgatcttggcaaaggtggacatgagcttagcaagagcacgggaaatgctggcggacgtgttgcctgtggtatcattgggctccaaggctaaagcagttaacctccgaggcaaacaccatagaaggtcgaagcgagcacctcaggatgttgctgttccatttcccctgtattggcaacacaatttgagtactccaaataagcgcctgatccatgatcagagagcactattcatgccattttgtatatgaacaatgttgcgcacctgcttaagtgtctgttccaacaaatgcttaagaagacactactggaggtgtactatggagtactaccagcagcatctaaacttgacgaaaccaattaaccatctatggtgacacgggatattacaacatcaggcggggggatggggcgtaggaaaaaaaaa

SEQ ID NO: 145061 - DNA, 632 bp, Zea Mays
ttacgtcaggtagcgtcagacattccagtgcgtgcctggcaagtggcaaactcgagctgtctagtcctcggttcgcgaatcttccacagagaggcagacggcaggactcgcttcaagctcctcatctcgcgcagggggggtcgcctgaggtatcggtcaatcagtaatcaccccaaatcctagggttctagtcgcttctcgtcgtttcgttcgtagatcacagagacaatggtgaaggcagttgctgtcctcgccggcactgatgtcaagggcaccatcttcttttcacaggagggggatggtccgaccaccgtgactggaagtatctctggcctcaagccagggctccatgggttccatgtgcacgcgcttggcgacaccaccaacggctgcatgtcgactgggccacacttcaatcctgttggcaaggagcatggcgcaccggaagatgaggaccgccatgccggtgatcttgggaatgtgacagcgggagaagatggtatttttgtctcactgccttgcgtcattgtttggttcatttgaactggagaaatctttataaagttggctgcgaagactagatttattcattttccaatgtacgttgttgcattgaaactgcagcgcaatag

SEQ ID NO: 145062 - DNA, 330 bp, Zea Mays
atggacacggcacctctcatcagtccggcccaccatattacaatttgctgtctaaatgttattttctccaatggagacttctttgtcaggttggacaaaaacgacaatgggaaaacaaatgcagctctccccaccagaaccaaccctagcaaaatcgagcttatgccgatggatttaccggggctgtcactggcaaactcccacttctcgatgtcgagggcatccatcccaacatacaggaagagaaaagtctcagcgatgaaggacaaagtagcaaaggcatgcctaattgtgactcttgagctctctgtcacattgtgccaggtgtaa

SEQ ID NO: 145063 - DNA, 3646 bp, Zea Mays
caaccgctccccaccgccagccggatctcctgagaggcgacgccgcgactgccggacggcaaccctgctcctccgccggtgccctcccgcacgatgagccgcagcgggcctcgccgcggcatcttcgatggcctccccatcccggccgacaaatcctacctcaaggaaagcctgtcgcggatcgacgagagctgggcggccgcgcggttcgactcgctgccgcacgtcgtgcacatcctcacctccaaggaccgcgagggcgagatccagttcctcaaagagcagagcgacctcatcgaggacgtcgtggacgaggtcgtgcacgcctaccaccacggcttcaacaaggccatccagaactactcccagatcctgcggctgttcagcgagtctgcagagagcattaccggactcaagggggagatggaggaggcgaagaagctgcttggcaggaagaataagcacctcggccagttgtggtaccgctccctcacactgcgccatgtgctatcccttttggatcaggtcgaggatgttgccaaggttcctgctcgaattgaaaacttaatggcagagaagcagctgtatgctgcagtgcaattgcaagtccaatcagttctgatactagaacgagaaggccttcaagcggtaggtgctcttcaagatgttcgttctgatctaacaaagctgcgaggagtactattttacaaaattttggaagagttacatgcccatttgtacaacaatggcgaatatagctctgcagttttaagtatggttgacagtgagcaagcaccgacttctacagctactgggcgattggtaaacagcatgcaacctctttcaaggagaactagatcaattaaaggtgacaaccacattggtgggccagtagatgggtttccaaaagttagttctgttgatggaggctcttcgtttgatggcccagatgataatagcttagatatgagtgaaagtgatggacacactcgaaaggattcgaaaagtttttctcatgaaatcccaatttttctttcctatgctacaccagatgagtttcttgaatcaatgataaaggcagatgctccccttaatgtgaagtacctgagaacattggtacaatgcttatccatgcttggaaaggttgcagctgcaggagctgtgatatgccaacgagtacgccctacaatccatgatgttatcacttcaaagattaaagcatgttctgaagacgcttcaaaatccagtatgggcaaagctgcaaaaacgaatgatgtgttgcattcaaatggacccactccccggtttcaaatgttcacacagaaaacaaagagtggcgcatctgtaatggcagcccaactagttgtcagtcccatttcgccgactatggcacccactggagatgctcagcgtgcagctactcaacttcttagatcaatatttgaatgtcttgtagagatacttgagaaccatattattgttggagagcttcttgaacaaaaatcaacatctgaggttgataatgtaaacacacctcatattgcaaatggggatgcaagctggaatccagactctgaatctttccaagctactggtggtttcagtgttgcattctctctatcagtcgtgcagagtgagtgccagcaacttctgtgtgaaattttgcgggcaactccagaagctgctactgctgacgcagctgtccagacagctaggcttgcaaataaggatccagtgaaggaaaagagggatggatcagaaggcctttcttttgccttccgcattactgatgcagcaaccccagcgtcaaatgaaggtcaaggatggcgaagaaattccaatgtgcctcaagaagggtatggaacagcaagtgtcatacctgaccaaggaattttcctagccgcgtctgtttaccgtcctgtttttgagtttatgaataaaatagggttgatgttgcctcagaagtactcacaacttgggagtgatggcttattggcttttgtgaataactttctgaaggagcacttcttgccagcaatatttgtagattaccgaaaatgcgttcagcaggccatatctagtccagcagcatttagaccacgtgtacatgcaacatcagcatatagttcatcggtggaacttggacgccctgtgcttcaagggcttctcgccattgatataatagccaaagaggttcttggatgggttcaattgatgccaaactatgcgactgagcttgtggagtatgtacgcacatttttagaacgtgctcatgagagatgtcgtgcatcatatatggaggctgtccttgaaaagcaaagttatattctcctttcaaggaatgacattgagagtttaatgcgcctggaaccagcaaacatttctttgcaaaattctactggtgaacatgataacaatgcaacaggtgcagaggcagtcgaagtagagattgaactaagtgatctcttattagatatgtgcccaataaaacaggaaaacttgatccatgacgaccagaaactgatattgttggcttctcttagtgactcattggaatatttagcagattcagttgaaaggcttggggaatcattcataagtccaccaaccacttcagagagcataaatcatagccatggtcgacatgcccgctcatctagtgcaattccaaaaagtctcgcgtctctggctaatgagtacagaaggttagctgttgattgtgtcagagtattgagattggaaatgcagctagaggcgatataccacatgcaggaaatgaccaaaagagaatacgtcgaagatcaagatgctgaagatcctgatgactttattatctcccttacaactcagattgcacgacgggatgaagaaatggctccttatatcacggaatcagaaaggaattacatatttggtgggatttccagtgttgctgctaatgcatcaataaaggcacttgctcaaatgaagtcaataaacttgttaggagtccagcaaatatgcaggaattcgatagctctggaacaggctcttgcagccataccttcaatagatagtgaagcagtccaacagcgattggatcgcgttcgaacgttctatgagttgttaaatttgccttttgagtctttgcttggattcatcgcagaacatgaatatttgttttctgctaaagaatacctgagtgttctaaaggtcaatgtgccgggtagagaaatacctgcggatgctgaacgacgcatctcacagattttgggtcactagatctaatcagacacaatggtgctatttttgactggttatgccttatgtgggctttggctaccaaatggttctccacctgtttccatggcggtgtttgtgtagatttagctggtttttgctatttagtaattttgtttccttttgtatttcacgtgatatattcttttgtatgtcttatcagttatcattgattgtaaatttgtagtgttccggataaaattttcattattgattattgtaaatgtgttatctgtctggatgcgatatttaataagctcatcagattcagtgtcctgtatggtgcacagacgagttgccagtcatgaacttttcagtcttgtaaaattgggaaatttattgggaatggttgaacaagtggaacgcc

SEQ ID NO: 145064 - DNA, 1127 bp, Zea Mays
ggggctgtcttgccgctgctgtcgacgccctcgtccccgccgtggctgagggtgacgacgacgctggcggggcagatctctgacatctccacgaacgaggacagacacggctcggccagagcagcgtcgttctcgcgcgccttctcctccgtccggcacgcgccgacgtcgcagccggccgcgatccacgcttgctgctcctcctgtgaccaaatttaatcagtatcgacaaaattgcaatgttaattgtgggttcaatcagggtgagcaacactaagttagataggtacgtagagaagtggctggacactgaaccaaacctcagtggaaggcactactgctgccgcgatggctgctgcatcatcatgccaggcggtgtcagcgtcgagagccccgaagtcggcgtactgtccagtaatggcagcaagctccggcgacggccatggagtaagctgctccatctcagcgcgagccgccgcctccgacctggcgagctccaccagctggcggatgacctcgtcagccagctcgccgccggagctccggctctccaagcggagcgtctggggctcctcccacgcggagccggcgcccaggatggtcgcgagatcggcgaccgaggggcacccggcgtacccttccaccgcgccaccgtcgtcgctactactgtcggcggcgccaccgccgtcccgctcatccttctcctcccccaagcggcagctggcgcagaggaagccgccgcgcgtggcgggccgcagcggcagcggctgcgcggcacccggcgcagagcggcgcccgggcgtggcgagtggacacggtgttggcgccgtgcacgtggcggtcgcacggcaggcacagcctcgcggagtcggcccggcagtacaccaccgccggcatgcccgtgcaggagtcgcacgccggcgccgcctccttgccgccggctgcgtccgcggcggacatggcttccacctgcgacaagacaagacccggggaggatctggcaccgcacaggattgatggtgcgaggcgacgatggaggcgtacaggtagtacagcctcgcacgatctccaccgtcgcccgtcgctactactgggcgacaggcctgacggcctctatgagtgagtga

SEQ ID NO: 145065 - DNA, 2114 bp, Zea Mays
ctcctgcgccaaaactcgctgaatcgtccgtcggcagagcctgggcggagcagcgaacaaggcaaaacaagacctcacctcaccctgacgcacgcacgtccacgccgagttccgcggctgccaacgccaacgcgcgcgccgcggccacccctttccctagcccttttttcccgttcgtttcccgcgccgcgacccataaattctcgtcggggacacgcacacgcacgaacggacattcccgggacaacttggtcgatttccatgcagaccatgccggtgatgatgacgcggatggcgtcggcgtcggcgacggcgacgcgccggccgcagggcacccgggccccaggtggacgcgcgccgaacagggtcgcgttcccaccggcgcggcatggtggctgcagcagggacctcagggccgccgggctcggccgcttcttcggcgtcggcgaccacaacaacaagaaccacgaggtggacgacctggacccggcgaggctgttcgtgggcctgcccatcgactcggtcacggacggcgcgacggtgaacagcgcggcggcgatcgcggcggggatccgggccgtccggctgctgggcgcggacggcgtggagctgccggtgttttggtcggtggcgcagcccgagtcccccgacaggttcagctgggccgggtaccaggccgtggccgacatggtgcgggccgagggcctgagcctccgcgtgtcgcttcgcacccacggcacgcccggcgccggcgtgcccacgctgccctcctgggtcagcggcgtcgccgccgacgatcccgacatcttcttcaccaaccgctcggggggccggcacgagggatgcctctccttcgccatcgacgacctccccgtgctccacggcaagtccccgctccagctctacgaggccttcttccgcagcttcgccgtcgcattcgacgacttcttcgactccaccatcaccgacgtgacggtggggctcggcgcgaacggcgtgctccggtacccgtcgtacccgccggggagcgacgcccgcaagttcacggggatgggcgagttccagtgctacgacaagtacatgctgcagcagctgaggcagcacgccgcggaggagggccacgccaggtgggggctgtcgggcccgcacgacgcgccgcggtaccacgactcgccggacgcgtgcggcttcttccgggagcgcggcggatcttgggagaccccctacggcgacttcttcctgtcgtggtacgccgggcagttggtggggcacggcgaccgcgtcctgggcacggccaacgccgtgttcggcggcaagcccgtggcgctgtcggccaagatcccgttcatgcactggtggcacggggtgcggtcgcgccctgccgaggccgccgcgggcttctacaagagcaacaagaagaacgggtacagccccgtggccaagatgttcgcgcgccacggctgcaccatggtggtgcccggcatggacgtgtgcatgaacaagcagcaccacagcacgggctccagcccggacaccctgctggtgcagatgaagaacgcgtgccgtcgccacggcgtgcgcatcgccggcgagaacgcgtcgctcgtcatgacgcacaccagcagcttctcgcgcatccgcagcaacatcctcaccaccgagctcatgcggccctgccacttcacgtacctgcgcatgggcgccgagttcttctcccccgaccacttcccgcagttcatggagttcgtgcgaagcgtcgtgtgcggcgagtgggacgaggacgacggccccgccgacgaggagcgtggcatgactgtgtcaggcaataccagatccagggaggccaaggcggtttgaagcttcaactcatcgccgcccccgccatatctcagtcagctgtctcgttttatttttgaagtgccaaaatacttgcaaatttccgctgctactagatttagctgagaagaacgagatgatccaggtattagtggatcaggagttgcaaatgtgggatcccacatgcattttttcttttgccgatgtttcgtggtcttcattgttgttaatttttttgtttcatcttgagaccatttatattatactctctcttttct

SEQ ID NO: 145066 - DNA, 779 bp, Zea Mays
ggcattttgaatgttaaaacaatatatttcactattttacagaccttaatatatttcttcttaatatgcgttttcgagaaaaagaacagagtccttaagctgagatactttgatagagacaatttttacatataaaacatcgaattggcatgttcacctgatgagtatttatggttgggcgcagcatttgcctgatcagaagaaaccatttgtgaaagatgaactcgagaaacttattgctggatggcctacggaggtggtaaagaggcagaagaaagataagaggaaggagttggaggaagctttgatgaaggacatccctacgatggtggactgcctgacaaagtccggcctcgacatccctgtggaactggacaagcttgccaccccacagctccaagtggcgtagcaaaagaaggcgcgcggctcgccatacaaccggaacagacttgagtctcgaggaacagcatgcattttggtttggcactgatgcaggcagcgcagcgcagcgcaggacgcagattgaaaatctgtgatagatgaaatcatgtttttatttctgtttctaatgttgtagtgcaggcccgtgcgtggtgcgccctttctgttgtgcgttgaccgttgaaaatctgtgatagatgaaatcatgtttttatttctgtttctaagaagcaaattgccgtcgtatcttggcacgtgttgtaactgtacccatcctttctccaaggactttctaatctgttattacttttaatattgcattaatagacctagtcgcg

SEQ ID NO: 145067 - DNA, 1739 bp, Zea Mays
aaggccgcataacttgagcccaattaccaaaatgacaccaaccgattaaactcacagcccaactcctcttctcgccctcgtctgacttcgtttcggacctccccagtttttcccctccggccgccgccggagaagcagaagccatgcaggtcgccgccgcgcgcgcccgccgcctcctcgccttaccggcggcctcggggatccccggaatactctccggaccgatcccagggcgcgcatcatgcgccgagggcgttctcctttaccgtctcaatggcgctcccgcttcgccgtcttctccgcagcataccaggggcttctcctcctcctgcttcgcctcccgatcacactgtaacctcccatcgcctaccatagcttctcaatggttgaatgagaaatcagtacactgtcacatgacgacagcacacttctcaacggaagcaagtgacatggaccaccctacagaagctgtagaggagatgtaccagaaaatgttgaaatctgttgaagctgagaccatgcctccaaatgcctggttgtggtcaatgattgatagctgctccaataaggaggacatcaaacttctttttcaaattttgcagaaactcagggtatttagactatcaaatcttcgcatcagtgcaaacttcaatgagcatctctgcagaaaagtaactgaggcttgtgctcgtgtaggcgccgttgactatgggttgaaggctttatggaaacataatgtttatggaataacaccaacgattggttctgctcattatctactgcaacatgctaaagagcaaaatgacaacaaactaatggaaaacgtaattcatgtcctatcaaaaaatttcttaccgctgcaaccaggcacagctgatatagtcttcagtatctgttataatgctgatagatgggatttactctcaaaatacgcggagagatttgttaaggcaggtgtcaaactgcatcgagctgcatttgacatttggatggactttgctgccaaagttggggattctcaatctatttggcacattaatagtctaagaggcaggtctgtcaaacattatacacttgcaacagggtttgcatgtgcaaaggggtctctgcttgatcggaagccagaaaatgccgctgacaagattaagcttctttatgagcatttgcctgatcagaagaaaccatttgtgaaagatgaactcgagaaacttattgctggatggcctacggaggtggtaaagaggcagaagaaagataagaggaaggagttggaggaagctttgatgaaggacatccctacgatggtggactgcctgacaaagtccggcctcgacatccctgtggaactggacaagcttgccaccccacagctccaagtggcgtagcaaaagaaggcgcgcggctcgccatacaaccggaacagacttgagtctcgaggaacagcatgcattttggtttggcactgatgcaggcagcgcagcgcagcgcaggacgcagattgaaaatctgtgatagatgaaatcatgtttttatttctgtttctaatgttgtagtgcaggcccgtgcgtggtgcgccctttctgttgtgcgttgaccgttgaaaatctgtgatagatgaaatcatgtttttatttctgtttctaagaagcaaattgccgtcgtatcttggcacgtgttgtaactgtacccatcctttctccaaggactttctaatctgttattacttttaatattgcatt

SEQ ID NO: 145068 - DNA, 1804 bp, Zea Mays
aaggccgcataacttgagcccaattaccaaaatgacaccaaccgattaaactcacagcccaactcctcttctcgccctcgtctgacttcgtttcggacctccccagtttttcccctccggccgccgccggagaagcagaagccatgcaggtcgccgccgcgcgcgcccgccgcctcctcgccttaccggcggcctcggggatccccggaatactctccggaccgatcccagggcgcgcatcatgcgccgagggcgttctcctttaccgtctcaatggcgctcccgcttcgccgtcttctccgcagcataccaggggcttctcctcctcctgcttcgcctcccgatcacactgtaacctcccatcgcctaccatagcttctcaatggttgaatgagaaatcagtacactgtcacatgacgacagcacacttctcaacggaagcaagtgacatggaccaccctacagaagctgtagaggagatgtaccagaaaatgttgaaatctgttgaagctgagaccatgcctccaaatgcctggttgtggtcaatgattgatagctgctccaataaggaggacatcaaacttctttttcaaattttgcagaaactcagggtatttagactatcaaatcttcgcatcagtgcaaacttcaatgagcatctctgcagaaaagtaactgaggcttgtgctcgtgtaggcgccgttgactatgggttgaaggctttatggaaacataatgtttatggaataacaccaacgattggttctgctcattatctactggtattctgttaaaaaagtcttctggtatccatttttcctagctacttgattatgattctctcctgttgcagcaacatgctaaagagcaaaatgacaacaaactaatggaaaacgtaattcatgtcctatcaaaaaatttcttaccgctgcaaccaggcacagctgatatagtcttcagtatctgttataatgctgatagatgggatttactctcaaaatacgcggagagatttgttaaggcaggtgtcaaactgcatcgagctgcatttgacatttggatggactttgctgccaaagttggggattctcaatctatttggcacattaatagtctaagaggcaggtctgtcaaacattatacacttgcaacagggtttgcatgtgcaaaggggtctctgcttgatcggaagccagaaaatgccgctgacaagattaagcttctttatgagcatttgcctgatcagaagaaaccatttgtgaaagatgaactcgagaaacttattgctggatggcctacggaggtggtaaagaggcagaagaaagataagaggaaggagttggaggaagctttgatgaaggacatccctacgatggtggactgcctgacaaagtccggcctcgacatccctgtggaactggacaagcttgccaccccacagctccaagtggcgtagcaaaagaaggcgcgcggctcgccatacaaccggaacagacttgagtctcgaggaacagcatgcattttggtttggcactgatgcaggcagcgcagcgcagcgcaggacgcagattgaaaatctgtgatagatgaaatcatgtttttatttctgtttctaatgttgtagtgcaggcccgtgcgtggtgcgccctttctgttgtgcgttgaccgttgaaaatctgtgatagatgaaatcatgtttttatttctgtttctaagaagcaaattgccgtcgtatcttggcacgtgttgtaactgtacccatcctttctccaaggactttctaatctgttattacttttaatat

SEQ ID NO: 145069 - DNA, 1683 bp, Zea Mays
gattaaactcacagcccaactcctcttctcgccctcgtctgacttcgtttcggacctccccagtttttcccctccggccgccgccggagaagcagaagccatgcaggtcgccgccgcgcgcgcccgccgcctcctcgccttaccggcggcctcggggatccccggaatactctccggaccgatcccagggcgcgcatcatgcgccgagggcgttctcctttaccgtctcaatggcgctcccgcttcgccgtcttctccgcagcataccaggggcttctcctcctcctgcttcgcctcccgatcacactgtaacctcccatcgcctaccatagcttctcaatggttgaatgagaaatcagtacactgtcacatgacgacagcacacttctcaacggaagcaagtgacatggaccaccctacagaagctgtagaggagatgtaccagaaaatgttgaaatctgttgaagctgagaccatgcctccaaatgcctggttgtggtcaatgattgatagctgctccaataaggaggacatcaaacttctttttcaaattttgcagaaactcaggagactatcaaatcttcgcatcagtgcaaacttcaatgagcatctctgcagaaaagtaactgaggcttgtgctcgtgtaggcgccgttgactatgggttgaaggctttatggaaacataatgtttatggaataacaccaacgattggttctgctcattatctactgcaacatgctaaagagcaaaatgacaacaaactaatggaaaacgtaattcatgtcctatcaaaaaatttcttaccgctgcaaccaggcacagctgatatagtcttcagtatctgttataatgctgatagatgggatttactctcaaaatacgcggagagatttgttaaggcaggtgtcaaactgcatcgagctgcatttgacatttggatggactttgctgccaaagttggggattctcaatctatttggcacattaatagtctaagaggcaggtctgtcaaacattatacacttgcaacagggtttgcatgtgcaaaggggtctctgcttgatcggaagccagaaaatgccgctgacaagattaagcttctttatgagcatttgcctgatcagaagaaaccatttgtgaaagatgaactcgagaaacttattgctggatggcctacggaggtggtaaagaggcagaagaaagataagaggaaggagttggaggaagctttgatgaaggacatccctacgatggtggactgcctgacaaagtccggcctcgacatccctgtggaactggacaagcttgccaccccacagctccaagtggcgtagcaaaagaaggcgcgcggctcgccatacaaccggaacagacttgagtctcgaggaacagcatgcattttggtttggcactgatgcaggcagcgcagcgcagcgcaggacgcagattgaaaatctgtgatagatgaaatcatgtttttatttctgtttctaatgttgtagtgcaggcccgtgcgtggtgcgccctttctgttgtgcgttgaccgttgaaaatctgtgatagatgaaatcatgtttttatttctgtttctaagaagcaaattgccgtcgtatcttggcacgtgttgtaactgtacccatcctttctccaaggactttctaatctgttattacttttaata

SEQ ID NO: 145070 - DNA, 1494 bp, Zea Mays
cgccaagctccctctacgcacctgcctcctcctcggcccggatcccgccgccagcgcctgttatggagatgaaggcgtcggcctccgatgaaaccctagccgccgtcttggaccacctcaagccccacaccgtcggcaccttcctcccccctcgtgcgtgggacgacgacgagcgaaagcctccggccacatcttgagcgacggcagctcccccttttcgctgcgccgtccagctccccctcccctcgcgcacatgtccccaccacgctcgaatccttcagctcacgcgaccgcgactgcgaccccttcacctccctctgcaacatctagggttcgggtttgggtattggattgagcgggttcaggtagctgcgggagaggcggacgtgcggcgcgtccccctgcggcgtgccgaagatcttgacaactcgcatggccatctagggttggggttgagcgggttcgagtagttgctggagaggtggtcgggcgacgcgtccctctgcaacatgccgaaggtcttgacggtgagcatggccatctcgtcgagctggtcctgcagctacgtgatgatgtcaatggctgatttcatctacgaatgcacctgcaggattcaacccacatagcatgggccaggccagatctaaaaaatttgtgtgttgcccccgagagcccaacgacgatggtgttgtcgtcgttaagtgaggctagcactagcactgctgctttgcactatgaggttgtcgattttatcaagccagctttggggaagcttgaaggataaaatcattgttggttcaacatcatgaatgacacttggaggaacttccgaacttgaaccatgaaggaatatatcttattttatatcaatcttgtggcacataaacaatggcgacaaacatccaattgctttcgagagcttgaaacatctccaatagaggtttgctcaatttcccaagtttgtttgggaaagggaggctcatggagctatacagtgtactcggggccttctttcatcttaacgctattcgagatcgtgagtttgccagcaagccttatgtggggagcaagaggtggaagtgtccagcgctatatctgctccggcgtcgagttgctgctgtgcgtgacctgcaagtgcggcatccacaaggagtttagcttcaaccaccgtgtcagatcaagtagctcatgtccatcctcatctttgggtttcaggtttggccttacaattcactgtacaaggttaaccgcaccgaattttgaatcatacgattatgtaggtcgcctctccttccctcctttttgttttgttcttcattttaatgttatatatgttcactaaatattcttcaatgtttggtatcattttgtgacttcatttagaagaggaaccaatatttgtcatacaaatgtgttttgtgtttctaaatgggagtatctttgaaaaaaatcaaggaattattagggatggattgcacccttgaaatgattatc

SEQ ID NO: 145071 - DNA, 1465 bp, Zea Mays
cgccaagctccctctacgcacctgcctcctcctcggcccggatcccgccgccagcgcctgttatggagatgaaggcgtcggcctccgatgaaaccctagccgccgtcttggaccacctcaagccccacaccgtcggcaccttcctcccccctcgtgcgtgggacgacgacgagcgaaagcctccggccacatcttgagcgacggcagctcccccttttcgctgcgccgtccagctccccctcccctcgcgcacatgtccccaccacgctcgaatccttcagctcacgcgaccgcgactgcgaccccttcacctccctctgcaacatctagggttcgggtttgggtattggattgagcgggttcaggtagctgcgggagaggcggacgtgcggcgcgtccccctgcggcgtgccgaagatcttgacaactcgcatggccatctagggttggggttgagcgggttcgagtagttgctggagaggtggtcgggcgacgcgtccctctgcaacatgccgaaggtcttgacggtgagcatggccatctcgtcgagctggtcctgcagctacgtgatgatgtcaatggattcaacccacatagcatgggccaggccagatctaaaaaatttgtgtgttgcccccgagagcccaacgacgatggtgttgtcgtcgttaagtgaggctagcactagcactgctgctttgcactatgaggttgtcgattttatcaagccagctttggggaagcttgaaggataaaatcattgttggttcaacatcatgaatgacacttggaggaacttccgaacttgaaccatgaaggaatatatcttattttatatcaatcttgtggcacataaacaatggcgacaaacatccaattgctttcgagagcttgaaacatctccaatagaggtttgctcaatttcccaagtttgtttgggaaagggaggctcatggagctatacagtgtactcggggccttctttcatcttaacgctattcgagatcgtgagtttgccagcaagccttatgtggggagcaagaggtggaagtgtccagcgctatatctgctccggcgtcgagttgctgctgtgcgtgacctgcaagtgcggcatccacaaggagtttagcttcaaccaccgtgtcagatcaagtagctcatgtccatcctcatctttgggtttcaggtttggccttacaattcactgtacaaggttaaccgcaccgaattttgaatcatacgattatgtaggtcgcctctccttccctcctttttgttttgttcttcattttaatgttatatatgttcactaaatattcttcaatgtttggtatcattttgtgacttcatttagaagaggaaccaatatttgtcatacaaatgtgttttgtgtttctaaatgggagtatctttgaaaaaaatcaaggaattattagggatggattgcacccttgaaatgattatc

SEQ ID NO: 145072 - DNA, 1599 bp, Zea Mays
gaaaccatatgctagccaactcttatttccatggagacctcgacctcgatctcggactgacggcagcagcagcagcaccagctataggaggtcatcgttgtctgcctgctatatataattatatatactcacataccgcgctcagcacaagcagtaccctgctgggctgcctgcaagcagctagtgtccaccgccagaaactagctagctagctagcatgggtcggctggcggcggcgctggccgccgtggcggtgctctgcgtgaccttggcggcgggagcggaggtggtggacgagttcggcggcggggcgtccttcatcttcggggactcgctggtggacgccggcaacaacaactacatcccgacgctgtcccgggccaacatgaccccgaacggcatcgacttcgcggcgtcgggcggggcgcccacggggcggttcacgaacgggcggaccatcgcggacatcatcggcgagatgctggggcaggcggactactcgccgccgttcctggcgcccaacgcgacgggcggagccatcctgaacggcgtcaactacgcgtcgggcggcggcgggatcctgaacgccacggggaaggtgttcgtgaaccgcatcgggatggacgtccaggtggactacttcaacgtcacgagggggcagctggacgcgctgctgggcagggacagggcccgcgagtttttgaggaggaaggccatcttctccgtcaccgtcggatccaacgacttcctcaacaactacctcatgcccgtgctgtccacgggcacgaggatccgcgagtcgcctgacgccttcgtcgacgacctcatcttccacctccgggaccagctcacgaggctgtacacgctggacgcgcgcaagttcgtggtggccaacgtggggccgctgggctgcatcccgtaccagaagaccatcaaccgagtgggcgaggacgagtgcgtgaagctgcccaaccagctggcggcgcagtacaactcccggctcagggagctcatcatcgacctcaacgccggcctccccggcgccaggttctgcctcgccaacgtctacgacctcgtcatggagctcatcaccaactaccccaactacgggttccagacggccagcgtggcgtgctgcggcaacggcggctcgtacgacgggctggtgccgtgcgggccgacgacgagcctgtgcgacgcccgggacaagcacgtgttctgggacccgtaccacccaagcgaggccgccaacgtgctgctcgccaagtacatcgtcgacggcgactccaagtacatctcccccatgaacctcaggaagctctactccctctagctgcacgtccgacgtccggacgaccatttcatttgccatttggccggccgtccacgtcgacccacctttgcacttgcgcgttcccggcgtgtgcagcgccaactgtgtcgtgtgcggtgtgtactgcatgcgaactgtaatttttgggtgcgaggaaattaattttagcatgcaatttcgatcgtatgtatgtaacttgtaccgtatccaaacaattaaactaaagacatcgaatccaaggacacacagaagaaagacttccatcc

SEQ ID NO: 145073 - DNA, 1587 bp, Zea Mays
atcatcaactgatcaaacagacaaccctatactgctacaacacacacacagacacatgcataatggttggtacatggtaaaactatagcaatctaaggtcgatcgctcgtctagctacaccactatcaccagtaccacctccatggtttcttgactgatagatagacggacgagaatgaagaagctagctagctactagatatatcatcagtagagtgttcagttgttgatgatggcctcctccttgcccctggtcaccactgggctgcgccatcctccgcagcagcagtcgccgagggtggtcctgcagagcgaggacccgaccgagtggtgcgcgtgggcgcaccaggggcaccgcctgtgggtggccatgccggactccttctgggtgtacacgtacaaggtggaccggtgcccgttccggggcaaccacgtgtggacgacgtgcccgtacgcgcactggggggagcgcgcgcgccgccgcgaccccagccgctacgcgtacgccgccgcgacgtgcccggactacgccgactccaagcgccggaaccgcctggccgggtccaccgcgccccccacctgcgcgcgcggcctccgctgcggcttcgcgcacggcgtcttcgagacgtggctgcaccccaccaggttccgcacccgcatgtgcgaggccggcgccgggtgcagccgccgggtctgcttcttcgcgcactgcctcgcgcagcgcaggcgcgaggacgacctggtcctgccgctcgtcgtcttccccgccatcaccatgccgcccccgctaccgctaccgctgccgctgccgccgctggccttcgttgtcccgaacaacccgctgccgcccgtaccacccgccctcccctgcccccgctcggtctcggtcgtcgcccatcaggttgatcgcgtcacgcaggccatgcagcagggccgcagcgtgcgcctgcttacgcgcgccgatgccgatgccgcttcgtcgtcgtcgtcgtatttttcctcctcccgtgcccctgctagtaatgctgctgtggccacggcgccgggcgacgacgaggatatcgacatcgtcgccattgtcaccggctgctgcctcgcctccgaggaagaatctaaggctgccggcggcggcgactacccgcacttggacctcaacctcatcatggacatcgtgaggatgaactagatagctacaaattaaagatatacctgccagtgcatggcgtccatgcgtgcgcttggatggttcggcgccgcgacaggtggaggaggcgccgccgaaaggagggacgggacgccagccgcagcagcaagcatcatcgcctcgtgcccctagctagctagtatacactggcacggcagtatcgtataatacatattattatactagtataatgtaaggtgtcatgtcctttattttgaacttaactggattagtaccagatggagttttggacatgtattgtggtgttggatccgtctagctatatatgtgatggatctatatatgtgtctgtagctatttgtgggcttgtatgaattttgtggaatgatgaataatatgtgaattaacaaatatgtttacgt

SEQ ID NO: 145074 - DNA, 2554 bp, Zea Mays
gaccttggctaccatcgcaaaccccgcttttgtttatcattccgcctctccagtcttgacttcccctctctttctctcttcccggcggggcggccggaaatctccccccaaattcagctggtttcacgggagctatcggccggtggagaggaaaggacgagtcttgagctggacttcttggcggattggctgctggcattcgcaggaactgtgtgtcaggagcggggagatgagctgcttaccgtgctccggttcctcggggaaggaggacaagagcttggcggcgctctcgccgagcccccggcctgcggccaaggcggcaccagttcgatcaaattcacgtgcttcgagctccaggaaggaagattctgtacctgttcgcagaggaggaaacgctgcacatggcccggcacagattttcagtttccgggagttggctgttgccaccaaaaatttcagaagagattgcctgttgggagaaggtggctttggtcgtgtgtataaaggacatatggaaaatgggcaggtcattgctgtgaagcaacttgatagaaatggttttcaaggaaatcgtgaatttcttgtggaggttctcatgctaagtctcttgcaccatcctaatctggtcagattaattggctattgtgccgatggtgaccagcgcctcttagtttacgaatacatgttgttgggatcactggaaaatcgtctgtttgcaggcaaggaacctcttgactggaatacaaggatgaagattgctgctggtgcagcgaagggtctggagtaccttcatgacaaggcaaatccaccagtcatatacagagacttcaaatcatcaaacattcttctgggtgaagactactaccctaagctgtctgattttgggcttgcaaaacttggtccagttggtgacaaaacccatgtatcaacacgagttatgggaacatatggatattgcgctcctgagtatgccatgacagggcagttgacgctaaagtctgacgtttacagctttggtgttgtgttccttgaacttattacaggccgcaaagcaatcgatcacacccagccttcaggggagcaaaaccttgtcgcatgggctcgtccacttttcagagaccgaaggaagttctgccagcttgctgatccattgttgcatggcggctacccgaaaaggggtttgtaccaggccttagctgttgcagctatgtgtttgcaggagcaagcagcatcccggccgctgataggagacgttgtcactgcactgtcttacctagctgcacatccttatgatccaaatgcgccttccacaaaggattctaagacctgcccgtctaccccaagggcaaagacacaccgacgaaccaccagtgttcctgatgctcaacatgctgctgagtcgcttattttgaacttcccagacatgaggaaggagactgtcagaggaggggaattcgagaaggatcgtactgaaggttctggcagcagcagtagctctggaaggaacgattgcctggatgtcccgcgacttctatccgttcctaacggcaaagtttgcggtgaaggtaataacattcagaagtccactgttaaggttggtgcccgtgagaactagaatacagagccggccaaattctgcaggcatctttgaatggatgcatggattagaccattctttccatgcttgctgtcaattttgcgaggaatcttcgtcgcttggcgtgagtctttctgaaggggactgttgtcgagagttgagtactaccactgcaacaggtttggttttgcagacccggatagcctcatgctccacggttggtttttggttgcctccacggaacagttcaacaattcctccaggctttacatgaagtctcatgctgatgaaaggaagaactactctgtcgctgagattcagagcttagactctttagagtgtgcatttcgatgagaatctgctacattctgaatgtcacccacaccacagctttcacctgtgctgactaacgaaccctgcagtaatgtgtcattgaaggatgtggttgagtttccttgttctgttcttgtaggaaccacgtgccgacagggctgtgtctgtacatgttaatgggttgtttgtaggaacaattggatctataccattaaaagatccaaactttagatatataccatggacctcatatgtcattgactcatgtggacccacatgtaagtgagatagtaatggtatggatctaaagtggtgatcttttaatggtatggatccaaatttcccttgtttgtaagtagagctgttcatatatttattttttcttcttcgtcggtattgtgtaatggggtgatttgcagacaacatgtcaggcgtagctctgtagtctgtacagaaaaagaaggtttgcttttttgtttgcttggtattgtatgtaacattgactcgtcatatactattgtacaaatggggaagaacactgatcctttgggtaaggtgctgcttctcttcggtttgaactggagcgaattggaatgaggaagaggggaggggaaaccccccaag

SEQ ID NO: 145075 - DNA, 2538 bp, Zea Mays
gaccttggctaccatcgcaaaccccgcttttgtttatcattccgcctctccagtcttgacttcccctctctttctctcttcccggcggggcggccggaaatctccccccaaattcagctggtttcacgggagctatcggccggtggagaggaaaggacgagtcttgagctggacttcttggcggattggctgctggcattcgcaggaactgtgtgtcaggagcggggagatgagctgcttaccgtgctccggttcctcggggaaggaggacaagagcttggcggcgctctcgccgagcccccggcctgcggccaaggcggcaccagttcgatcaaattcacgtgcttcgagctccaggaaggaagattctgtacctgttcgcagaggaggaaacgctgcacatggcccggcacagattttcagtttccgggagttggctgttgccaccaaaaatttcagaagagattgcctgttgggagaaggtggctttggtcgtgtgtataaaggacatatggaaaatgggcaggtcattgctgtgaagcaacttgatagaaatggttttcaaggaaatcgtgaatttcttgtggaggttctcatgctaagtctcttgcaccatcctaatctggtcagattaattggctattgtgccgatggtgaccagcgcctcttagtttacgaatacatgttgttgggatcactggaaaatcgtctgtttggtccagcaggcaaggaacctcttgactggaatacaaggatgaagattgctgctggtgcagcgaagggtctggagtaccttcatgacaaggcaaatccaccagtcatatacagagacttcaaatcatcaaacattcttctgggtgaagactactaccctaagctgtctgattttgggcttgcaaaacttggtccagttggtgacaaaacccatgtatcaacacgagttatgggaacatatggatattgcgctcctgagtatgccatgacagggcagttgacgctaaagtctgacgtttacagctttggtgttgtgttccttgaacttattacaggccgcaaagcaatcgatcacacccagccttcaggggagcaaaaccttgtcgcatgggctcgtccacttttcagagaccgaaggaagttctgccagcttgctgatccattgttgcatggcggctacccgaaaaggggtttgtaccaggccttagctgttgcagctatgtgtttgcaggagcaagcagcatcccggccgctgataggagacgttgtcactgcactgtcttacctagctgcacatccttatgatccaaatgcgccttccacaaaggattctaagacctgcccgtctaccccaagggcaaagacacaccgacgaaccaccagtgttcctgatgctcaacatgctgctgagtcgcttattttgaacttcccagacatgaggaaggagactgtcagaggaggggaattcgagaaggatcgtactgaaggttctggcagcagcagtagctctggaaggaacgattgcctggatgtcccgcgacttctatccgttcctaacggcaaagtttgcggtgaaggtaataacattcagaagtccactgttaaggttggtgcccgtgagaactagaatacagagccggccaaattctgcaggcatctttgaatggatgcatggattagaccattctttccatgcttgctgtcaattttgcgaggaatcttcgtcgcttggcgtgagtctttctgaaggggactgttgtcgagagttgagtactaccactgcaacaggtttggttttgcagacccggatagcctcatgctccacggttggtttttggttgcctccacggaacagttcaacaattcctccaggctttacatgaagtctcatgctgatgaaaggaagaactactctgtcgctgagattcagagcttagactctttagagtgtgcatttcgatgagaatctgctacattctgaatgtcacccacaccacagctttcacctgtgctgactaacgaaccctgcagtaatgtgtcattgaaggatgtggttgagtttccttgttctgttcttgtaggaaccacgtgccgacagggctgtgtctgtacatgttaatgggttgtttgtaggaacaattggatctataccattaaaagatccaaactttagatatataccatggacctcatatgtcattgactcatgtggacccacatgtaagtgagatagtaatggtatggatctaaagtggtgatcttttaatggtatggatccaaatttcccttgtttgtaagtagagctgttcatatatttattttttcttcttcgtcggtattgtgtaatggggtgatttgcagacaacatgtcaggcgtagctctgtagtctgtacagaaaaagaaggtttgcttttttgtttgcttggtattgtatgtaacattgactcgtcatatactattgtacaaatggggaagaacactgatcctttgggtaaggtgctgcttctcttcggtttgaactggagcgaattggaatgaggaag

SEQ ID NO: 145076 - DNA, 2268 bp, Zea Mays
gcctaagcgtccgctcattttggtgtccaacacctcctctctttctcctccgtcgtaatcgcaatgtctgctcaatcgaacaactgacccagccgaattacaagccgctcaccccccaaaaaacccgaagtaattagtagatacgatgcatttctgtttctgttatttccatgattgcaggtccaaacaaactgccccccgagccacctcatcggatatgcttcattgctttcatctcatctcatatatttatattagaaaagaaaactctgttcaaccacccgccgagttcagcagcactctcctccgccctcttccaggtccagcaaagattggggacgcgtaggcatcggagattgcctcgggagcgcgtttcctggtcaactaaggccggcatgaagggctgctcagagcgcttgctgtttctgctgctgctgctggcatcgtcgtcgttactgtccgctgtgattgccgcgcagcagacttgccccgccgacctcgacagcaaatgcgatggtggcgcgtctgatgatgattgggagggggagttcttccccggcgtcccgaaaatcaagtatgagggtccaacaagcaagaaccctcttgcttataagtggtataacaaggaggaagtgattctcggtaagaagatgaaggattggatgcgcttcagtgttgcattctggcacacgttccgtggtactggcgctgatcctttcggtgctcctacaaagacttggccttgggaggacggcacaaattctttggccatggctaagagaagaatgagagctcactttgagttcatggagaagttgggagttgacaaatggtgcttccatgacagggatattgccccggatgggaagactcttgaagaaacaaattctaacttggatgagatagtccagctggcaaagcagctgcagggtgagaccaatataaagccattgtggggtaccgcacagctctttatgcatccacgttacatgcatggcgctgctacgagcccagaggttaaagtatatgcttatgcggctgcacaagttaagaaagctttggaggtcactcactacctaggtggtgaaaactatgtgttctggggtggaagagagggttaccaaactcttctgaatactgatatgaagagagaacttgaccatctggctaactttcttcaagctgctgttgactacaagaagaagattggattcaacggaacactattgatagagcctaaaccacaggaaccaacaaaacaccagtatgactgggatgttgcgactacgtttgcttttctacagaagtacggtcttacaggagagttcaagattaatgttgagtgcaaccatgctactctatctggacacagctgccatcatgaattggagactgcacggattaatgggctgcttggaaatatcgatgcaaacactggtgatcctcaagttggttgggacacagatcagttcatgacagacattgcagaggctactttggttatgtcaagtgtagttaagaatggtggacttgcacctggtggtttcaactttgatgccaaattgcggagggaaagtactgatgttgaggacatgtttcttgcccatatctccggaatggacaccctggcacgtggcctccgtaacgttgccaagctgattggggatggttccctagatgatcttgtccgcaagcggtaccagagctttgatagtgagattggtgccttgatcgaggctgggaaaggagactttgagacgctagaaaagaaggttctagagtggggtgagcccactgttgcatccggcaaacaggaactggcggagattctgttccagtctgccctatagatgatggtgccatgtccataggtccaggaataagcaagggtgcgccctcctccgaacacgcactcgtcctcctcaccacggggatgttatggttccgtgcgatggactacctacaatacagcatggaactgagataattaggatgtaatctgtcagaaaatttccagaattgttacctccttttgtttagagtggattagtggaatcaaactggagttagttaaagcttatcctacattttggtgtggcgatcgtgtttggtacttccttgaatgctgtttcatagtgtggcaacgatgttgctgcttagtcctacaactggtggtagtaatgtatcatagttcgaacgtttcttcacaataaattatgatctttaataaattttattagttcaaaaataaataaaaatagagttcga

SEQ ID NO: 145077 - DNA, 2331 bp, Zea Mays
cctcctctctttctcctccgtcgtaatcgcaatgtctgctcaatcgaacaactgacccagccgaattacaagccgctcaccccccaaaaaacccgaagtaattagtagatacgatgcatttctgtttctgttatttccatgattgcaggtccaaacaaactgccccccgagccacctcatcggatatgcttcattgctttcatctcatctcatatatttatattagaaaagaaaactctgttcaaccacccgccgagttcagcagcactctcctccgccctcttccaggtccagcaaagattggggacgcgtaggcatcggagattgcctcgggagcgcgtttcctggtcaactaaggccggcatgaagggctgctcagagcgcttgctgtttctgctgctgctgctggcatcgtcgtcgttactgtccgctgtgattgccgcgcagcagacttgccccgccgacctcgacagcaaatgcgatggtggcgcgtctgatgatgattgggagggggagttcttccccggcgtcccgaaaatcaagtatgagggtccaacaagcaagaaccctcttgcttataagtggtataacaaggaggaagtgattctcggtaagaagatgaaggattggatgcgcttcagtgttgcattctggcacacgttccgtggtactggcgctgatcctttcggtgctcctacaaagacttggccttgggaggacggcacaaattctttggccatggctaagagaagaatgagagctcactttgagttcatggagaagttgggagttgacaaatggtgcttccatgacagggatattgccccggatgggaagactcttgaagaaacaaattctaacttggatgagatagtccagctggcaaagcagctgcagggtgagaccaatataaagccattgtggggtaccgcacagctctttatgcatccacgttacatgcatggcgctgctacgagcccagaggttaaagtatatgcttatgcggctgcacaagttaagaaagctttggaggtcactcactacctaggtggtgaaaactatgtgttctggggtggaagagagggttaccaaactcttctgaatactgatatgaagagagaacttgaccatctggctaactttcttcaagctgctgttgactacaagaagaagattggattcaacggaacactattgatagagcctaaaccacaggaaccaacaaaacaccagtatgactgggatgttgcgactacgtttgcttttctacagaagtacggtcttacaggagagttcaagattaatgttgagtgcaaccatgctactctatctggacacagctgccatcatgaattggagactgcacggattaatgggctgcttggaaatatcgatgcaaacactggtgatcctcaagttggttgggacacagatcagttcatgacagacattgcagaggctactttggttatgtcaagtgtagttaagaatgtgagtggcatgaactagctctctccctttttactcaaatccacagtttgcctatgtacttcctggttgcactcatataagctgctgcatttttgtttaacagggtggacttgcacctggtggtttcaactttgatgccaaattgcggagggaaagtactgatgttgaggacatgtttcttgcccatatctccggaatggacaccctggcacgtggcctccgtaacgttgccaagctgattggggatggttccctagatgatcttgtccgcaagcggtaccagagctttgatagtgagattggtgccttgatcgaggctgggaaaggagactttgagacgctagaaaagaaggttctagagtggggtgagcccactgttgcatccggcaaacaggaactggcggagattctgttccagtctgccctatagatgatggtgccatgtccataggtccaggaataagcaagggtgcgccctcctccgaacacgcactcgtcctcctcaccacggggatgttatggttccgtgcgatggactacctacaatacagcatggaactgagataattaggatgtaatctgtcagaaaatttccagaattgttacctccttttgtttagagtggattagtggaatcaaactggagttagttaaagcttatcctacattttggtgtggcgatcgtgtttggtacttccttgaatgctgtttcatagtgtggcaacgatgttgctgcttagtcctacaactggtggtagtaatgtatcatagttcgaacgtttcttcacaataaattatgatctttaataaattttattagttcaaaaataaataaaaata

SEQ ID NO: 145078 - DNA, 3992 bp, Zea Mays
ctccagaatagcagggacgggcttgttgtagctatccaccagaaaccttatcatgttggcaatctgtcacccacaattaatagacatcagcaggaatacaacttataagatgggcgtttcttctattacctagctggtacagtggtactactgttcatgatttacataatgctcctagaacctttccccaccatttctcgaatatcagtaggggtatccaaaagcaaattgcccaacgattggcactgatgaacacacgctgtacttaattacagcttgacttaaaagagctggaagaaaggttcagtaaattaatctgcaagtaaaaagggccaccaacaaggaggataataaacaatatttatagtaaaaggagatgagactaccaaaggataatactgggagaaaaggaactggaacctaagtccaagtatcaaagcattatcttgatcaaaatgccaactttatcctgaagcacaacaatctagcaggagtttgaaaagcctactagtttagagccgctactcttagtatacaagtgaaaactcgaagacagctttgaaggttccaacaagcttgctggaattgtttacacttcatagaagggagatgcctccaaagaaactaaacaaaattaattgagctgaaaaaaaaatcataacctcccctctccctttttcccttgtctatctatatatacatatgatatgcttaaaaggatctgacttaacaatgcatcaatgtataaataatatgcatgcttgtgtggtggttcacttacatactgactgatgagcacaatagcaatatcctccctcgtagtaaattctttgaacgcatcctcgatttgtttaactgtcgtctctgtggcatgaaacaacaaacagtattgataatgaaccatcaggatcaacaacagtaactaatgtatgaagtaatgcagcacaaataatggggattgcagaatgaaataatgactagagatcctagtcactgatatggttacaaggtacaaggtaaaagcatcattcaagattatctgcatcagctgcacaagtacatgaaagctcacaaataaggaaaccagtactaggaaggaaaacccagatatatgatatatcctaatatagtaggcctgctttggtccgacggcatcagttaactgcatgtgaaaagcattatatcttactgtaagatccattagcaagaaacggccaaggtaagaaacagtatgacccatgtgactggaagggattttgttgtggaaggaacatgacatgaagcagaaatatatgcaccacgctactgtaagatccattaccacaaaaaaaacatagggaatcaaaagcgagagagagaggtgcatgagtgaaagtgactgttttgcaggaacatgaaatgaagcagaaacatatagtgcatgctactgcaagatccatcaccacgaaatacatgtatgagtgaagggattgttttgcaaggaacatgaaatgaggaagaaacatggtgcacgctactgtaagatacaacaccatttaacgcctagggaaacaaagatttcagaggtgtatgaatgaaagggtcagagagtataacaaaacagcggttgtaagctagtactaggcttctttgctgtctgcttgggtgtaagctgtacaagtacaagttcctcttgtgagctctagaactcatctatggatttgtataagagcagagtgtaaagggaagacccagtgccagaggctccgacatgagtagagtctggggcagggataacccgaggcaagcctaaacccttcctggtcctaggggtagaagacgaccacaaaagaggagggctgagggtactggaagcagcagcacttggctacctggcatcagagatggaggtgaggagattcggccacaaagcctgtcagattctcaaatccctcagcaaattggttgattcaccttctcggaggcaagatgaactgccagcagggaacacagagaagggacgatggtggaggcttcagtgcttacagagatacagatgatgcttaaagaagggaagggaatgaaacccggagggccctccccctgtccaacgaaagtcgaggtggtgattacagaggattcatccagaatagagatgagatgtggagggatgaccatgggaactatgttttagtcaggaaaccctaggttcctacagagattatagtactggccgcacttacaaacgtcgatccacgggaaaaatgacagcatgatggaaattgagaaggatctgaggcaaaacctgagaaatagagatgaaagaaccttcctgagaaccaaaatagagctatgtatgataacaggcagaatttcaatagaagaaccaaacctgggaaagatattacatactataactgcaatgggaccagtcaccatcatggacaatgtccaaatcaacctttcttatagaactgcaagaacagtgaacacaaagaacagtggacacaaagctatgttttgtttcagcattcacatcccctctgataagggtaaagaaagtaaacctgatgattccatggagttagacccagctacgattgactcccaagaagaattggtggattatgaacttgaccccttggagcaggaaaaattagaggtgaaaattattgaccaaaactttaaagagagaacaaaaaagctttctaatgtgctcaacaatgactccagtgcaattcatttgccaccagattggaaaaatatggacatggtgccagatactagtcatactacagacaaggagaagcagagttcagacatcctgaaggttggagaagcaaaccaagggagagttattaccaagatctcggccattgctacaagatcaagctcaagagttgctgatctgggagaaggaaattgtgacatcaagtcaggtactagttctctcactgccttctctacttctgatcctgaatcattaatgcattttacttcattttgcaatattaaattgggacacgacctagtagaatcactagatactatccctaccatccaagatcaagaagcagccaatgctgcctgggcagaaaataaagtaaggactgtccagtccaaggattgggttgatgtcaataatgcttccaacgaagaagctttattgactttttcagagttgtaaatcagtctgcagaaacacagacacctgtgagtccctcctcggatgtgagagatgcaggacatagaaccttcaggatgtctgaactctgctacagttcaatgaaggatcacttagttcagtttttgtgtagtttcatgtatgggtgaatttatggaccgttgaaacaagaaccagtgtggcagtgcataacattaagcagtgaaccttgagatgatagtagagagcagtgggcttcttggcttattaattgagccaagtgtgctgagggttcaacatacagtgtcccgtggaccatcaaggtcttgcagggaagtggtgtggatcgacacacaccatttgcagttctgccgatgacttacctaggaattctagtatgtagctactactccctctgtttcaaattggaagtcattctggcttttatagataagtagctttgagtgtgtattagagataatgtgtatccaggtgcttacaatttggaacggggggaatacttaagagcggcaggttttatttagctatttactagatgagaaggtgatgaaaagaatgggcacttggcaaagtcctttcctgtcttcaggggtaactccataatagcgatattgatgatagataataaggctcagcaataataatatgcagcagtaaagaggatattcgtttcactcactgttgtcgacgaggaggtagttggttttcttgcgcagatcaacattgccaacgccggccatcaagaagccagtgacggtgtcctgcaagaataggtgacaaagcgtgcgtttagataatcgcggatccccagatgcaacccagatgttgg

SEQ ID NO: 145079 - DNA, 1497 bp, Zea Mays
gaccactacaactacactactccaaaacgaccctcaagcaggcaggccacccagcactcaggctagatagctcatcacagccacagcagctagaccctagtagctcactcgcgctcgtgccatgatgaatacccgagcctgtggcagcggcagtggcggcaggaacgaccagaccatgatgggcttctccgagcatccgaagccggcggcgtcggggcaggcgcagccgtccccgccgtcgtcgccgagcgagcgtccgccagcaggccgcgggcgccggcgcgcgcaggagcccgggcggttcctcggcgtgcggcgccggccgtggggccggtacgcggcggagatacgcgaccccacgaccaaggagcggcattggctgggcacgttcgacaccgcgcaggaggcggcgctcgcctacgaccgcgcggcgctgtccatgaagggcgcgcaggcgcgcaccaacttcgtctacacgcacgccgcgtacaactacccgcccttcctggcgccgttccaccacccgtcgtcggtgcagcagcagcattacggcgccgcgccgcacgttggctcgtacggccaccaccactaccaccaccagggctcgtcagcagctgtcgtcggcgcgtcctcgggcgagtgctcgtcggcgttgccgcccgtggagcgcgccgacggcacgctgctgctggaccgcggcggcggcggcgggcaccaccaccaccaccaccaccaccccgagttcctgttcgcgagcgcggacgacaactccgggtacctgagcagcgtggtcccagagagctgcctccggccgcggagcagcgcggcggcggtggaggacctgcggcggtactcggacgcggacgcctacgggatgggcgtggggctccgggaggacgtggacgacctcgcgcagatggtggccgggttctggggcggcggcgccggcgacgcggaccagctgtgcggcggagggttcccgtcgggcggagccggggacagcatggccgtggcgtcgtcgcaggggtcgtccgacggctactcgcccttcagcttcctctcccactgatgacaaatgagctagctgccgcgcgcgcatggattgcattgcatctgctgcgcacgtaatgtagatcgatcgatcgatcgatcaccagttagcctagctagctagtttgcttatcatgcatggtgatcgatcggtcctgatcatcggttcttccgatccctgctgtttaattcctttcgagagagtacgttgggtcgaccagtgtgagagtgagcagtatagtagtgttagcatttagcatcagaagtagagggaggagcgatcgagagagaagaagagagagtacgtagctgcgtgccctagcttcttcatgtgtactccgtcttcgttctagtacgtcctacaagacctacgtactctcgatctgtagctttaaccatccaactttattattaagatcatcaactcggtcgaacgcttgctcttat

SEQ ID NO: 145080 - DNA, 557 bp, Zea Mays
ggttcgaccagaccagaactcaaccggtcgcgcttccttcttcaccctcagtcctcttccgtcctcctcctgtccaccgccccgtgcagttcggcggcgacatggcggcggccggcgacctgtccgacgatgagaagcgggcgatgaggggcagcaagttcgcgccgcttcctccgcctcctccctcttcccgcccccagccgaggatggcccatcctggaggagcactaaccacaaacaaggctgctgctttagcaaaattcctcgagagaaaacttcagcaacctgatggcttggactccctggaccctgaccttgtaaaactggctgtgaaaaatgcaaaggaaaccataaaagctagcaatggtgagccttcaacttcaggaagagtagtacgacatgtttcctcatttgtggatggaactgaggattctgaagatgaagcagaggttaaggggatcaaaagaaaaaggaaaaataagaaggttaaaactcatcaaggtgacaaacaacagagcaagaaaaagaagaaaaataaaaagaaaaagggcaaaggt

SEQ ID NO: 145081 - DNA, 529 bp, Zea Mays
ggttcgaccagaccagaactcaaccggtcgcgcttccttcttcaccctcagtcctcttccgtcctcctcctgtccaccgccccgtgcagttcggcggcgacatggcggcggccggcgacctgtccgacgatgagaagcgggcgatgaggggcagcaagttcgcgccgcttcctccgcctcctccctcttcccgcccccagccgaggtaccgcgcggcccccttctctgaagcctgagtccagatctaccgataacagattcagcgcgtgttgtgttgttacggttgcgggtggcaactagcttcgattccactgaatactgtttgcttgaattcgttgtgaacaaattgatagagcgaaggctgtgtaggtctggagtaaggttttgccaaaccgccgtgtagctgctctgtcagatggaaacagcgtgtagttgaagtaaatttcgaatagtgataccactggttcgtgtaatctgtaactcgtggtttggagaaatataaatgctagtgcaaattgtgatttagatt

SEQ ID NO: 145082 - DNA, 2851 bp, Zea Mays
gcttgggcctcgcttccacttcgtagctgcctacgcgctcgcgactcgcctggtcgcttccggttgaagggccgggccgcaatggacgaagaggtcggcgccgccgggcggcagcaggttcagtggaaaagttactgcagtactctctccctcctagcgttccagagcttcggcgtggtgtatggagacttgagcacatcgcctttgtatgtctacagaaactcactgtctgggagactgaacggttaccttgatgagacaaccatctttgggttgttttctctggtgttttggaccttcacacttgttccgttgctgaagtatgtcataattgtcttgagcgcggatgataatggggaaggtggagcttttgctttgtactcacttctttgcaggcatgcaaaattcagtctgctgccaaaccagcaagcagcagatgaagagctgtcaacttattaccatccaggcactgatcgagctgtggtttcctctccattcaaaaggtttctggagaagcacaggaagctgcggacctgtttacttctttttgtactgtttggtgcgtgcatggtgataggtgatggtgtctttacaccaactatatctgttctgtcagccatctctggattacaagatcctgccacaagtggactaggagatggatggatcgtattcatcgcatgtgttatgcttgttggtctctttgctctgcagcaccgaggtactcataaggtggcattcttgttcgctccgattattgtgctctggctcttgagcattggtatcattggactatataacatcatccgttggaatcctagaatatttgttgctctttctccacactatattgtaaagtttttcaagaaaactggaaaagatggttggatatctcttggtggggtacttcttgctatcacaggtaccgaagctatgtttgccgatcttggccacttctctgctgcatctatcaggttggcttttgtcagtgtcatatatccctgtcttgtgctgcaatacatgggacaggctgcgtttctgtctaaaaacataccagctgtatataacagtttttatctttctattccaagtcctttattttggcctgtgttcgtcatagcaactcttgctgcaattttgggcagccaagctattatatctgcaaccttttctatcgttaagcagtgccttgccttgggatgctttccacgggtaaaggtcgtgcatacttcaaggtggatccgtggccagatttacatacctgagataaattggattctgatggtcctctgtttagctgtgacacttggcttccgtgacataacagtgataggaaatgcttatggtctcgcgtgcatcactgtgatgtttgtcaccacctgtctgatgtcattggtcatcatcttcgtgtggcaaaagaatctcctcatctccttgctattcttcgtattctttggggcactcgaaggcgcctacctgtctgcagcagtgatgaaggttccccagggaggctgggctccgatcgcgctatccgccgtgttcatgttcatcatgtacgtgtggcactacggcacgcggcggaagtacctgttcgacctccagaacaaggtgtccatgagatggatcctgaacctgggcccgagcctgggcatcgtgcgcgtgcccgggatcggcctcatctacacggagctggtgacgggcgtgccggccatcttctcccacttcgtcaccaacctgccggcgttccaccaggtgctggtcttcgtgtgcgtcaagtccgtgccggtgccgtacgtgcccatggacgagcggtacctcatcgggcggatcggccccagggagtaccgcatgtaccggtgcatcgtcaggtacgggtacaaggacgtgcagaaggacgacgagaacttcgagaacaacctggtgatgagcatcgcccggttcatccagatggaggccgaggagtcggcctcgtcggggacggggaggagctacgagtcgtcgacggagggcaggatggcggtcgtgcacaccaccggcacgacggggaccgggctggtgatgatggcctccgccgaggacgcggaaggcacgtccctgtccaggagcagcaagtcggagacgctccggagcctgcagtccatctacgagcaggagtccgccggcaccgtcagccggcggcggaggagggtgcggttccagatcgacgaggaggagcggatcgagccgcaggtgagggacgagctgtccgacctcctggaggccaaggaggccggcgcggcctacatcatcggccactcgtacgtgaaggcgaggaagaactccaatttcctcaagacgttcgccatcaactacgcctactccttcctccggaagaactgcagggggccgtcggtgacgctgcacatcccccacatcagcctcatcgaggtcggcatgatctactacgtgtaagtgtaacccaggcggcctgccctcaaagtcaaagcagcacggggggattttcattttctttcgggtgatacgatatgcttgttttggacccagacttactgctggagatactctctccgtttctttttatttgtcgctggatagtgtaaaattacagtatccagcgacaaaaataaaaagaaacagatgaagtaattagttagttttgtctctgctctgcaccgtatctgtatcgtagtttcatcaaggtggtggcataagacacacagtagccgaatcggccggttgccaccgtttgttcaccagagctttcggtaaccctttgtaaatagattctgttcatcatggaaattaagcattgtagcttgtcaataggctacagctagcatacagatttgag

SEQ ID NO: 145083 - DNA, 2265 bp, Zea Mays
atgccactgcggcggctgcctctgcctctgccttgccccgcgcgcgcgacggccaaaggcaaaccacacccactctccaccgcccaccacccgttcgccgaaactccccacccgccgcccgcaggcgccgccacgcccctcgccgccctccgcggccgcctgcaggcgggcctccccgtctcccccaccgccttctccgcggcggtcgcgcgctccggcccggacgctctgcccgcgctccatgcccttgcggtcatctccggcctcgccgccttcgcgcccgtcaccaactccctcgccgcgcgctacgccaagggcaactccttcgccgcggccgccagggtgttcgccgccgcgccgagccgggacacgagttcctacaacaccatcctctccgcgacccccgaccctgacgatgcgctcgcgttcgccgcgcggatgcttcgggccggagacgtgcggcccgacgccatcacgttcaccgtcacgctctcgctcgccgccggccgcggggagggtcgcctcgtgcggcagctgcacgcgctggtgtcgcgcgcggggatcgccgccgacgtgttcgtcggcaacgcgctcgtcacggcctacgcccggggcgcgtcgctggatgcggcccgcaaggtgttcgaggagatgccggcgcgggacctcgtctcctggaacgcgctggtctgcggcctcgcgcaggacggcgagtgtccggcggaggtcatccgggtgttccttcggatgctcaagcacggcggcgtgcggcccgatcggatatcggtctgcagcgtgatctcagcgtgtggcggcgaggggaagctcgagcttggccgccaaatccacggcttcgcggtgaagctgggcatcgaggggcacgtctccatcgccaacgtgcttgtcgcgatgtactacaagtgcggcactcccggctgcgcccggaggctcttcgagttcatgggcgagcgcgacgtcgtctcatggaccacggtaatgtccatggacagggaggacgccgtctcgctgttcaacggcatgatgcgagatggggtggcgccgaacgaggtcacctttgtggccattctgtcggctatgccaggacactgcccggcaagggaagggcagatggtccacgcggtgtgcatcaagaccggcctgtctgataagccggcggcagcgaacagcttcatcaccatgtacgccaagctgcggcgcatggatgatgccaagatgatctttggtcttatgcctcacccggaggtcatcgcttggaacgctctgatctccggctatgcccagaacgagatgtgccaggacgcgcttgaggccttcttgtcaatggtgaagatcacgaagcccagcgagacgacgttcgcgagcatcctcagcgcggtgactgcggtcgagaccgtgtccatggcttacggacagatgtaccactgccagacgctgaagctggggctcggcgccagcgagtacgtctccggtgctctcatcgacctgtatgccaagcgaggcagcttggaggagtcctggaaggcgttcggcgagaccgtccaccggagtctaattgcctggacggcgatcatctcggcgaactcaaagcacggcaactacgatggtgtcgtgagcctcttcaacgacatggcgcgctccggtgtgactcctgacggcgtggttctgctctctgtcctcaccgcctgccggtacagcgggtttgccagcttgggccgtgagatcttcgagtcgatggccaccaagcacggcgccgagctgtggcctgagcactacgcgtgcgtcgtcgacatgctaggccgagcggggaggctggaggaggctgaggagctcatgctgcagatgccttccgggccgagtgtctcggctatgcagagcctgctgggcgcctgcaggatccacggcaacacggacgtcggcgagagggtcgccggcgtcctgttggagacagagcccacggaatccggcgcgtacgtgctgctgtccaacatctacgccgagaagggtgactggggcgcggtggcgagggtgcggcggaagatgcgggggatgggcgtcaagaaggaggtcgggttcagctgggtggacgcgggcggcgccaacgattccctgcacctgcacaagttctcgtcggacgacacgacgcacccgcagagggaagagatataccgagtggccgaggggctaggctgggagatgaagtttttcaagaactgtcttcaggtcgagatggaatttctcgattga

SEQ ID NO: 145084 - DNA, 372 bp, Zea Mays
atgacaacgacctttgtgcttgtcgtcgtagttgctgccatggtcgatgagttgagcaaagggacttgtattgtaccactgaagaaagaccacgacgaggcttgcttggcgttcagtgctgagactgcattgagactatcagggctgtggctcttctcctatgccggcgacggcgacggtgcatccacgttgacgctgaagacgtggatcgtccccttgacgctggagggtacgacgagccacttggagtcgggagagaaggccatgctgtacatgtctggtgtcgtttggttcataaaatataacgggcagatctacactccgagccacttgggtggtggcctgaggcttgatccatgtaactctacataa

SEQ ID NO: 145085 - DNA, 142 bp, Zea Mays
cctggtgattgtgactgcccacgaggaggaaatccccacggcatcggcggtggcatctgtgtttgcatcggtggccaaatgcctggctggcgaggtgcccacggcatcatttgccctcctatcacacccaatggcatcaatt

SEQ ID NO: 145086 - DNA, 423 bp, Zea Mays
gtgagtgctcgcggctttcccgtcttgtcccttctctctcttctctccttctccttgcttcagaaacgcaccagagagctctcggaccggattgaagtgcgccgcccgtgagctctcggccgacgctgggaacttgagcagactgggcgagcactaggaaatttgcgccgtgggagcggtggatggacctccgggaggcgtccgtctgccacgcccacgacgagctgctggcgctgagctccgccgcggcggcagccacggcggccgaggacttcctccggtggcagttccccgagtccccgcgcgggaaagggtggtggtcggcggcgcggcagctcgtggaagacgcctggcgcagcctcggcgaggccaagaacgcggcgaggctcatggacaacttcgtgctctgcgagttcactacaa

SEQ ID NO: 145087 - DNA, 2315 bp, Zea Mays
gtttgttgcgcatggacctattctgatcatagtggatgcaggttggggatttcaatgggacactctgacattagcttctgccatcagaaggcggtgagatctcacagcagttgatgggtgcggagcagggaggcacgcgggcgactattctatgttgcaccaccacagggaggccaccatatgcggcgagcatccgcggcttgtgaatccacacacctttattctgaattgaccggaaaatatcacaaaggaagtacatcagctgcaattatcacagacagtagctctgtggtagggtccatgggattgtcttgcagaggaaacatcaaagttgttttaggtgttctcaatctctggaaagtctggttacacaggaaatgatgttcttcaagagcttgaaatactgactataaatgccaaagcagcacaagaggttatattgagtaaaattcttgagaagaatcaggctactgaatacctgaacaaattcatgaatgggtccgtagacatttctgccttcaagagccaggttccagtagtgacgtatgatgtggtccaaccctacattgcaaggattgccgctggtgaaaggtcttcaattttgtgtggagaacaaattgtagagctgctccgaagctcgggaacttctcagggtgaaccaagattgatgccatcaatctcagaggatatttaccgccgaatgtatctgtatagtctgatcatgcctatcatgagcaagtacatacgaggccttggcgaggggaaggcaatgtatcttctctttgtgaaagctgaaacattgacaaatgctggcattccagtccgatcagtcctcaccagctactacaagagccctcagttcttgcagcgcaagcacgacctctacaacagctacaccagtcccgacgaggtcattctttgccccgacagccagcagagcatgtactgccagctactctgcggcctggtggaacgccagaacgtcgtccgtctcggagcagtcttcgcctcagcattcctccggtccatcagcttcctcgagaagcactggcatgacctagtcaccgacatccgaaccggccggatcaatcccagcatcaccaacgccgcatgccgggtggccacggagagctttctcgcgcagcccaaccccgagctagctgacgaagtcgaggcgatatgcagctcggagtcatggaagggcgttcttggcaggctctggcctaacgtcaagtacatcgaggccgtcctgacggggacgatggcgcagtacgtccccatgctcgagttctacagcgacggcaggatccccctggtctgcaccatgtacgcttcctcggagagctacttcggcgtcaacctgcggccgctgtgcagcccgaaggacgtgtcctacaccatcctccccaacatggcctacttcgagttcgtgccgttggacgacggcctcaggctggcggaggatggtgaggctgtggagaaggagaagcttgtcggcctcgtggacgtcaaggtcggatgctactacgagctcgtggttaccacatttgccggtctttacaggtacagggtaggcgatgtactccaggtgacaggcttctacaaccgcgcaccccagttcaaattcatctgccggaggaacgtgatcctgagcgtggacgcagacaagacgaacgaggaagacctccacggcagcgtctcccgggccaagaagatcctggaggaccgaggccacatcctactggagtacaccagcttcaccgacacgtcgacggtgccgggccactacgtcctgttctgggaggtgaaggccacgcccacctccggctccgggggcgcgcggctggacgcgcaggtcctggagagctgctgcgtcgccgtggaggagtcgctggactgcgtgtacaggcggtgcagggcgcacgacaggtccgtggggccgctggagatacggctggtggaagccggcgccttcgacgcgctcatggacctgttggtcagccagggcggctccatcaaccagtacaagacgccacggtgcatcgagccgggcggcgccgcgctggagctgctcgactccaaggccaccgcctcgttcttcagcccccgggatcctgaagctactggtgtctgaggttgttctgctactctgaaactaatcctctgctggatctaaataatctgagaattttcgtctgggttatccccgtttacattgcacttttgtcaggctttgctactatgcaaagaagccttttttctttatttgagattgtgatcatcaattgtctatcacttgacgacttttgtgtgtg

SEQ ID NO: 145088 - DNA, 2540 bp, Zea Mays
gctatgcaatcttaggcttttttctgttttgattccgcacaatcacttgcacggacggcataacgtgcggaacacaatttgtgtttaggttctggtgtagctcttcatcttttctcataatctcttatgaaggatttaggtgctgatgcaacatttcaagaataacttttgaagtggataaatgcgttcttatctttcagtcctgcacactttgttggttgcatgcaggggcagacccaagtagggccgagtgagggcacatgcccccgctcatttctttgttctaagtactagagtctaaattttcatcatgaggtcccctgctcagtctaatttagatgcctatattctggtattttagttctcgtccttacaagtatgctctcagttatattttgtcctgggtccgcccctggttgcatgtgcccgtgttggcagatagtgtgcattccttaggggtgtattatcgataactttgtgggtggttagacaattattattgtctctaaatctgcaccttctgtctcatgagtgttggtagtttcttctggacgttttaatttgttgaagaaaatattcttcaaatatcttttagtagtcataagaacaaaatgtccattctcattggtttgtattttgatctttcattttcagtagctctgtggtagggtccatgggattgtcttgcagaggaaacatcaaagttgttttaggtgttctcaatctctggaaagtctggttacacaggaaatgatgttcttcaagagcttgaaatactgactataaatgccaaagcagcacaagaggttatattgagtaaaattcttgagaagaatcaggctactgaatacctgaacaaattcatgaatgggtccgtagacatttctgccttcaagagccaggttccagtagtgacgtatgatgtggtccaaccctacattgcaaggattgccgctggtgaaaggtcttcaattttgtgtggagaacaaattgtagagctgctccgaagctcgggaacttctcagggtgaaccaagattgatgccatcaatctcagaggatatttaccgccgaatgtatctgtatagtctgatcatgcctatcatgagcaagtacatacgaggccttggcgaggggaaggcaatgtatcttctctttgtgaaagctgaaacattgacaaatgctggcattccagtccgatcagtcctcaccagctactacaagagccctcagttcttgcagcgcaagcacgacctctacaacagctacaccagtcccgacgaggtcattctttgccccgacagccagcagagcatgtactgccagctactctgcggcctggtggaacgccagaacgtcgtccgtctcggagcagtcttcgcctcagcattcctccggtccatcagcttcctcgagaagcactggcatgacctagtcaccgacatccgaaccggccggatcaatcccagcatcaccaacgccgcatgccgggtggccacggagagctttctcgcgcagcccaaccccgagctagctgacgaagtcgaggcgatatgcagctcggagtcatggaagggcgttcttggcaggctctggcctaacgtcaagtacatcgaggccgtcctgacggggacgatggcgcagtacgtccccatgctcgagttctacagcgacggcaggatccccctggtctgcaccatgtacgcttcctcggagagctacttcggcgtcaacctgcggccgctgtgcagcccgaaggacgtgtcctacaccatcctccccaacatggcctacttcgagttcgtgccgttggacgacggcctcaggctggcggaggatggtgaggctgtggagaaggagaagcttgtcggcctcgtggacgtcaaggtcggatgctactacgagctcgtggttaccacatttgccggtctttacaggtacagggtaggcgatgtactccaggtgacaggcttctacaaccgcgcaccccagttcaaattcatctgccggaggaacgtgatcctgagcgtggacgcagacaagacgaacgaggaagacctccacggcagcgtctcccgggccaagaagatcctggaggaccgaggccacatcctactggagtacaccagcttcaccgacacgtcgacggtgccgggccactacgtcctgttctgggaggtgaaggccacgcccacctccggctccgggggcgcgcggctggacgcgcaggtcctggagagctgctgcgtcgccgtggaggagtcgctggactgcgtgtacaggcggtgcagggcgcacgacaggtccgtggggccgctggagatacggctggtggaagccggcgccttcgacgcgctcatggacctgttggtcagccagggcggctccatcaaccagtacaagacgccacggtgcatcgagccgggcggcgccgcgctggagctgctcgactccaaggccaccgcctcgttcttcagcccccgggatcctgaagctactggtgtctgaggttgttctgctactctgaaactaatcctctgc

SEQ ID NO: 145089 - DNA, 2332 bp, Zea Mays
gctatgcaatcttaggcttttttctgttttgattccgcacaatcacttgcacggacggcataacgtgcggaacacaatttgtgtttaggttctggtgtagctcttcatcttttctcataatctcttatgaaggatttaggtgctgatgcaacatttcaagaataacttttgaagtggataaatgcgttcttatctttcagtcctgcacactttgttggttgcatgcaggggcagacccaagtagggccgagtgagggcacatgcccccgctcatttctttgttctaagtactagagtctaaattttcatcatgaggtcccctgctcagtctaatttagatgcctatattctggtattttagttctcgtccttacaagtatgctctcagttatattttgtcctgggtccgcccctggttgcatgtgcccgtgttggcagatagtgtgcattccttaggggtgtattatcgataactttgtgggtggttagacaattattattgtctctaaatctgcaccttctgtctcatgagtgttggtagtttcttctggacgttttaatttgttgaagaaaatattcttcaaatatcttttagtagtcataagaacaaaatgtccattctcattggtttgtattttgatctttcattttcagtagctctgtggtagggtccatgggattgtcttgcagaggaaacatcaaagttgttttaggtgttctcaatctctggaaagtctggattgccgctggtgaaaggtcttcaattttgtgtggagaacaaattgtagagctgctccgaagctcgggaacttctcagggtgaaccaagattgatgccatcaatctcagaggatatttaccgccgaatgtatctgtatagtctgatcatgcctatcatgagcaagtacatacgaggccttggcgaggggaaggcaatgtatcttctctttgtgaaagctgaaacattgacaaatgctggcattccagtccgatcagtcctcaccagctactacaagagccctcagttcttgcagcgcaagcacgacctctacaacagctacaccagtcccgacgaggtcattctttgccccgacagccagcagagcatgtactgccagctactctgcggcctggtggaacgccagaacgtcgtccgtctcggagcagtcttcgcctcagcattcctccggtccatcagcttcctcgagaagcactggcatgacctagtcaccgacatccgaaccggccggatcaatcccagcatcaccaacgccgcatgccgggtggccacggagagctttctcgcgcagcccaaccccgagctagctgacgaagtcgaggcgatatgcagctcggagtcatggaagggcgttcttggcaggctctggcctaacgtcaagtacatcgaggccgtcctgacggggacgatggcgcagtacgtccccatgctcgagttctacagcgacggcaggatccccctggtctgcaccatgtacgcttcctcggagagctacttcggcgtcaacctgcggccgctgtgcagcccgaaggacgtgtcctacaccatcctccccaacatggcctacttcgagttcgtgccgttggacgacggcctcaggctggcggaggatggtgaggctgtggagaaggagaagcttgtcggcctcgtggacgtcaaggtcggatgctactacgagctcgtggttaccacatttgccggtctttacaggtacagggtaggcgatgtactccaggtgacaggcttctacaaccgcgcaccccagttcaaattcatctgccggaggaacgtgatcctgagcgtggacgcagacaagacgaacgaggaagacctccacggcagcgtctcccgggccaagaagatcctggaggaccgaggccacatcctactggagtacaccagcttcaccgacacgtcgacggtgccgggccactacgtcctgttctgggaggtgaaggccacgcccacctccggctccgggggcgcgcggctggacgcgcaggtcctggagagctgctgcgtcgccgtggaggagtcgctggactgcgtgtacaggcggtgcagggcgcacgacaggtccgtggggccgctggagatacggctggtggaagccggcgccttcgacgcgctcatggacctgttggtcagccagggcggctccatcaaccagtacaagacgccacggtgcatcgagccgggcggcgccgcgctggagctgctcgactccaaggccaccgcctcgttcttcagcccccgggatcctgaagctactggtgtctgaggttgttctgctactctgaaactaatcctctgc

SEQ ID NO: 145090 - DNA, 771 bp, Zea Mays
cgaggaggcgaggtgaggcgtaaaaaactcaaacaacgtaaggtgttcgacacccggtcagcggcctcgacctctttcggtcgatccaactacaccattgcgctgaatcaatctgcccgctccgagcgcattctctggccgagccaatgcccgcctatcatcgaccccaccaaatgattgaaaattattgattttctcaaataccgaggcattcagttctggaatttggtttgacgtcgacatgcttctacgcagacagcagcagagcataggatcgattcctagcttacgttggaattgctatgcgtgagatattttttcgaggcagtcttttgggcgacagcgatttgattgaagtgcagatgagaacaaatgtacggagagaactgcctgagttaccttttacgcagcagggcgtccccactcccccacggcgttatgccgcgcccaccacctgttcggcaaaatggctatggatgcaggttggggatttcaatgggacactctgacattagcttctgccatcagaaggcggtgagatctcacagtacgtctgtggagctgtgcattacttccacatggccttgttctgatcatggtggattcgggctatccattttgaagaggacactcatgtagtttctgctactcgagcaagaaggcgaggagatcttgcaaggatgggaggcttgaaagttggggggagatatgataagaacaaggctacagaggatcgaatagcttgtcttgttgattaaacactgtgacttt

SEQ ID NO: 145091 - DNA, 760 bp, Zea Mays
cgaggaggcgaggtgaggcgtaaaaaactcaaacaacgtaaggtgttcgacacccggtcagcggcctcgacctctttcggtcgatccaactacaccattgcgctgaatcaatctgcccgctccgagcgcattctctggccgagccaatgcccgcctatcatcgaccccaccaaatgattgaaaattattgattttctcaaataccgaggcattcagttctggaatttggtttgacgtcgacatgcttctacgcagacagcagcagagcataggatcgattcctagcttacgttggaattgctatgcgtgagatattttttcgaggcagtcttttgggcgacagcgatttgattgaagtgcagatgagaacaaatgtacggagagaactgcctgagttaccttttacgcagcagggcgtccccactcccccacggcgttatgccgcgcccaccacctgttcggcaaaatggctagttggggatttcaatgggacactctgacattagcttctgccatcagaaggcggtgagatctcacagtacgtctgtggagctgtgcattacttccacatggccttgttctgatcatggtggattcgggctatccattttgaagaggacactcatgtagtttctgctactcgagcaagaaggcgaggagatcttgcaaggatgggaggcttgaaagttggggggagatatgataagaacaaggctacagaggatcgaatagcttgtcttgttgattaaacactgtgact

SEQ ID NO: 145092 - DNA, 79 bp, Zea Mays
ccgtggaaaaggggagtgcaggtacacggcgtctgttttgcggagacggatgcagaggttgctggagagcgaaatagtg

SEQ ID NO: 145093 - DNA, 88 bp, Zea Mays
gcgatccttacctatatatgtgttacctctatcatgatctcagtcaatcaattctattctagccacatacacctctgcacggtattgg

SEQ ID NO: 145094 - DNA, 742 bp, Zea Mays
attttcagttcagttcggaaggtgatccaaatccagagtcaccaccggcaaagacgagctcgcgcgcgcgcgcacacacacacacactactggccctctgccagcggctcggcctctggcgccgacgaaaacaccttggcgatgcgttcggtggggatggcggggaggtacttggcccccgcgtagccgtgctccgcggcggctgcgaccgccctgttgtacttgtcggcccagtgcgcggcggtgggcacgacgatctccgcgacgtgcgggaacaccggcaggccgttcagcgagcgccaggcggagacggccaggtgctccgccgcgggctcgtaccgcacgtagaggtccttggccacgggctccacgcggccgtacacgtcccgcgccaccggctccgtcatcgcgagcgccgcacgggctgcgcccctcacgcccgaccgctgcgcctcggccgccagctcgcgcgccacctccggcacgccccgaaccaccgcgtagacatgcgccgacgccgccttcagcgcgcccgggaggtgcttgtccacctcgtgcaccgtgtcgtccacctgcgcccattgttgttgcgcatcggtcagcaataagcggaggaacacacgacatggtgatcgcacagtgattcagtgaacaccggttgttgttatttttgtggtggtgttgttgttattgctgttattaacgtcactaataaggaagcccaaaatctaacacttgctaa

SEQ ID NO: 145095 - DNA, 763 bp, Zea Mays
cccccggattcacgcttccttattttcagttcagttcggaaggtgatccaaatccagagtcaccaccggcaaagacgagctcgcgcgcgcgcgcacacacacacacactactggccctctgccagcggctcggcctctggcgccgacgaaaacaccttggcgatgcgttcggtggggatggcggggaggtacttggcccccgcgtagccgtgctccgcggcggctgcgaccgccctgttgtacttgtcggcccagtgcgcggcggtgggcacgacgatctccgcgacgtgcgggaacaccggcaggccgttcagcgagcgccaggcggagacggccaggtgctccgccgcgggctcgtaccgcacgtagaggtccttggccacgggctccacgcggccgtacacgtcccgcgccaccggctccgtcatcgcgagcgccgcacgggctgcgcccctcacgcccgaccgctgcgcctcggccgccagctcgcgcgccacctccggcacgccccgaaccaccgcgtagacatgcgccgacgccgccttcagcgcgcccgggaggtgcttgtccacctcgtgcaccgtgtcgtccacctgcgcccattgttgttgcgcatcggtcagcaataagcggaggaacacacgacatggtgatcgcacagtgattcagtgaacaccggttgttgttatttttgtggtggtgttgttgttattgctgttattaacgtcactaataaggaagcccaaaatctaacacttgctaa

SEQ ID NO: 145096 - DNA, 498 bp, Zea Mays
gatatactaactctgcgttatctattacagacactttgctttacatagtctatacacgccaccggatgattcatactgtgagctctggcatctggctccacctccacgtcgccatcctcatcaacaaatacaaatttagaaaacgagagaaccgaacgggtggcccttccttcacgcttcatcacaagaaaatccccatacggaagtgcagttccttacggaacactgtttgctagtgaggcagtccctgaacggcagacgccgaaaacaaaaacgttcatcgccctgagctcaccgtgggtctggtctggccgacgcccgcagtattagaacaccttccacgccgccgtcgtcaacgaatactataatataagagataagtaaaagcagagagcacacatccttccactgacgacgacataacctgcactgagggctaatacaacaggcaaagctaagcacacagatttacacaggaaaaaaaaaagattataagag

SEQ ID NO: 145097 - DNA, 1734 bp, Zea Mays
atcagacaacagacaaacattcaaactacacgtcgatcatcgcatcgcaccacacggcctgcctgaataatccgtccgtccaccgaccgccaatggcgcagatggagcgcgagcacctcagcgtggtcatgttcccgtggctcgcgcacggccacgtcaccccgtacctggagctggccaggcgcctcacctccgccaacgacgccgacatcgacgtgaccgtccacctcgtctccacgcccgtcaacctgtcggcgatcgcgcggcaccagacccctcggatccgcttcgcggagctccacctcccggcggcgccggacctgccgcccgagctgcacaccaccaagcacctgcccgcgcgcctcatgccggcgctcaagcgcgcgtgcgacctcgccgcgccgcgcttcggcgcgctgctggacgagatccgcccggacctcctcctcttcgacttcctctacccgtgggcgccgctcgaggccgccgcgcgcggcgtgcccgcggcgcacctcagcaccttcagcgccgccgccacctccttcgtcgtgcactgcctaggccgcggccgccgcgaaggctgcgcgttcccgttccgaggcgtcgggttcggcagcgccgaggaggaggccaagtacatggcgcagtacatcctccgcgaggagctccccgacgccctcgtccccgagcgcaaccgcctgctgctcagcctcgcgcgctcctcggccttcgtggccgtcaagacgtgcgccgacgtcgagcgcccgtacatggactacctgtccgagctcgtgggcggcaacaaggagatggtccccgtcggcccgctgctcgtcgacgccgacgccgccgccgccgccgccggaggcggcacgtcgtcggagtccgagtcagaccgcgtgatgcgctggctcgacgcccagaccccggcctccgtcgtgctcgtctgcttcggcagcgagtacttcatgtcggagcagcagctggcgcggatggcgcgcggcctggagctcagcggcgagcgcttcgtgtgggtggtgcggttccccagggagacagaggagggcgacgaagctgcgcgcgcgctgccccgcgggttcgccccggcgcccgggcgcgggctggtggtggaggggtgggcgccgcagcgccgcatcctggcgcacccggcctgcggcgcgttcctgtcgcactgcgggtggagctccgtgctggagtccctggcggcgggagtgccgatcgtggcgctgccgctgcacatcgatcaaccgctggacgccaacctggccacggagctgggcgccgccgtgcgcgtgcagcaggagcggttcggcgagttccgggccgaggacgtggcgcgcgctgtgcggagagccatgcgcggggaggagagccacgcgctcaggcgccgcgccgcggagctgcgggaggtggtggcgcggaacgacgcggacgacgcccaggttgccgcgctcgtgcagcgcatggcgaggctctgcggcaagggacagcagcgagtggccgtgcccaactgaattcccttgcgctctttgctgttccaaattccaataaatctgcctgcgcatggcagcatgggcttcttcttcttcctgctgtagattcaaaagcccaccaatgtaggaactggtaaatttttctattgggcctttcggcggcctagtctcgtgtcagttatgacttcccagaaaatatatatacttgtttggaaccgaa

SEQ ID NO: 145098 - DNA, 1272 bp, Zea Mays
ctagggcatcaggagtgaacaatatctcaaaaagcccatcttctcttcctctctcgcagcaccgcctctcaacctccgccgccgctcgcccggggcgtcacccacccgcgcagaaggcccccgccgctcaaactaccggtgccctaaaccccgatattcttcttcgcctccctttcctcctcagcacccaaaccccgaccttcagggttccgccgccatgccgcagggagaccacatcgagcttcaccagaagcgccatggcaagcgcctggaccacgaggagcgcaagcgcaagcgcgaggcgcgcgaggtgcacaggcgctcgaaggacgcccgcaatttgattggtgctaagggcaagaggttcgccaagaaacgctatgctgagaaggcgcagatgaagaagaccctgaaaatgcacgatgaatcaaataagcgacagaaggttgatgatgatgtccaagagggtgctcttcctccgtatctactggatcgtgatcagacacagcgtgctaaggtactcagcaacacaatcaagcaaaagaggaaggaaaaggctggcaaatgggatgttccgctgccaaaggtcagacctgttgctgaagaagaaatgttcaaggtgctacgaactggcaagcgaaaaaccaagcagtggaagagaatggttaccaaagccacttttgttggagctggatttacaaggaaaccaccaaagtatgagcggttcattcgaccaactggtctgcgtttcaccaaagctcatgtgactcacccagaactgaagtgcactttcaaccttgacataatttctgtgaagaaaaacccaaatggtccgatgtacacttctcttggtgttatgacaaggggaacaatcattgaggtaaatgtcagtgagcttggtctggtaactcccgctggaaaagttgtttgggggaaatatgctcaagttacaaacaacccggagaatgatgggtgtatcaatgctgttttgctagtgtagaaccatagtgagattttgtttatggtgatgaatcgtcccatttgtatctgctcttgataagatgctcccttttgaccgatctcatggctattcccaggagtttgttttgcaccgtggtccatgggcgagcattctatatccttgctatgtgcgacaagccgacaaatgacttggctattatagcctgctataaagttgactaatacaaattagcaacatttttcttgagctacatgattttggcttcgaaacttacgcgtctccgatgaacc

SEQ ID NO: 145099 - DNA, 797 bp, Zea Mays
aagcaacataatttggaacagagggggtatgatacagtaacgttttatggcattgatcactgatttctggtgaagcgtaggtactcagcaacacaatcaagcaaaagaggaaggaaaaggctggcaaatgggatgttccgctgccaaaggtcagacctgttgctgaagaagaaatgttcaaggtgctacgaactggcaagcgaaaaaccaagcagtggaagagaatggttaccaaagccacttttgttggagctggatttacaaggaaaccaccaaagtatgagcggttcattcgaccaactggtctgcgtttcaccaaagctcatgtgactcacccagaactgaagtgcactttcaaccttgacataatttctgtgaagaaaaacccaaatggtccgatgtacacttctcttggtgttatgacaaggggaacaatcattgaggtaaatgtcagtgagcttggtctggtaactcccgctggaaaagttgtttgggggaaatatgctcaagttacaaacaacccggagaatgatgggtgtatcaatgctgttttgctagtgtagaaccatagtgagattttgtttatggtgatgaatcgtcccatttgtatctgctcttgataagatgctcccttttgaccgatctcatggctattcccaggagtttgttttgcaccgtggtccatgggcgagcattctatatccttgctatgtgcgacaagccgacaaatgacttggctattatagcctgctataaagttgactaatacaaattagcaacatttttcttgagctaca

SEQ ID NO: 145100 - DNA, 1574 bp, Zea Mays
tggggtcaagatcatttgcctggcactgcctgctcggcacccgcctgctcggctgctcccaccgtcccacgtgccgtccgtccgtgttggagcgtgttgccatcgccattccctccgcttcgctccgtttcgttgccaccctttacacgcactccaccttcgctcctccgggcccccgaaatgtcggacgaaggcggcgccggcgagccgctcagcgaccgccagaaacgggagatcgccacctggttcctatccaacgcgccagccggcgagatccattacatcgccaaagatgtgcgcgcgctgctggggaacgacgcggtgtacgaggccgccgccgcggaggccttcccggagtacaacaaggcccgcctcgtgtccatcgagctccccgaccgcagtggcgacataatcatctcaacttatggggagattgacaagaacaattatctggaccccaggactgcgcaagttgctactatagatcatatgaaacagacttgtacaaaactgaggcctgctgaagatgaggagcttccatcagcttacattgaagagtttaggtgtgctttagatgttgaattgtcaaagtatgtttctgaagcttatcctaaaggggcctgtgccgtttattgtactagtggaaaggatatagagggaccaggagcagatttcagttttgcagcagttatttctgctgctaagcgtagcccacagaacttttgcaatggcagctggtgttcagtttggactattgaattcaattatgagttgcagtttgttgatattaaaggaaagatacaggtagatgctcactattttgaagagggaaatgtccagctggatactaacattgatcgtaaggactccaccagaatgcagtcacctgacgattgtgcggtttcaatcagtggcatcattcgacatcacgagtctgaatatttgtcctctctcgaggaatcatacttaaatttatctgatgcaacttttaaggaccttcggcgaaaacttccagttacccgtactcttttcccctggcataacacactggtgttcggtcttacgagagaccttgccaaagaattagcgcttggaaaatgaagtctccgctggccatgtcaccagattgtttcatctttgaacttcccaatcccagtgtaaatcaacaagatactttttttttgggggaggatgacattcaaaaaatacacattctcttcacatatcctagggcttttatttggatgccgttaggaaccaaacagactcttgttgacgtgtgtgaatcatttgtttcttcaccaatgctccattgtgatagattattttaggtgttctgtatgagcctttttttaacagaaagaggtttccctcctatttaattaggaaataagaacatagttcggaacaagatctggcatccaacttgtttacatgacttagtgaccaacaacgagaggaaaagctaaaccacctttccagaatgtatctgaagaggagactaacaacaccaagcataaaaggacggccaaactaagtcagcatcaccagcgaaaggtttacgacttcgcaac

SEQ ID NO: 145101 - DNA, 1937 bp, Zea Mays
tggggtcaagatcatttgcctggcactgcctgctcggcacccgcctgctcggctgctcccaccgtcccacgtgccgtccgtccgtgttggagcgtgttgccatcgccattccctccgcttcgctccgtttcgttgccaccctttacacgcactccaccttcgctcctccgggcccccgaaatgtcggacgaaggcggcgccggcgagccgctcagcgaccgccagaaacgggagatcgccacctggttcctatccaacgcgccagccggcgagatccattacatcgccaaagatgtgcgcgcgctgctggggaacgacgcggtgtacgaggccgccgccgcggaggccttcccggagtacaacaaggcccgcctcgtgtccatcgagctccccgaccgcagtggcgacataatcatctcaacttatggggagattgacaagaacaattatctggaccccaggactgcgcaagttgctactatagatcatatgaaacagacttgtacaaaactgaggcctgctgaagatgaggagcttccatcagcttacattgaagagtttaggtgtgctttagatgttgaattgtcaaagtatgtttctgaagcttatcctaaaggggcctgtgccgtttattgtactagtggaaaggatatagagggaccaggagcagatttcagttttgcagcagttatttctgctgctaagcgtagcccacagaacttttggtattgtctggttcatgtcttctgtcttttccttgttcctgaagaaatttgccatattttcttaaatcttgcacatatggatcagttagttttgctctgcgttataataagactaaaaaatttgatagatccttttcagcctttaaggccatttagacatttacccatcctctgtttctagtttctctttagttttagaactttattcaggaaattcttcaaactttagtttcttattagtgtctccttacattcctttgagaacctctcatttttccattcagcatgcaacttttagtcttcagttttttcatgggtgtcattttcaatatccctgtgaactgtggtttgttttgagtatactattttatcatcagcctagaaccttttgagttatgacatgtttaatgccggcctgttctttctatttctccatcagaggaattgcttcacataatctcaatagaactgttaaacatgcttcaaatagatttaatcttttaatcgtttagcctctgatgaaggccttgtgtcatccagcaatggcagctggtgttcagtttggactattgaattcaattatgagttgcagtttgttgatattaaaggaaagatacaggttgaccttttttacttaacaaggtaagagctctaaatttatgttaatgtaacagaagttaattttttgtaaatatcacttgcatatacgccaggtagatgctcactattttgaagagggaaatgtccagctggatactaacattgatcgtaaggactccaccagaatgcagtcacctgacgattgtgcggtttcaatcagtggcatcattcgacatcacgagtctgaatatttgtcctctctcgaggaatcatacttaaatttatctgatgcaacttttaaggaccttcggcgaaaacttccagttacccgtactcttttcccctggcataacacactggtgttcggtcttacgagagaccttgccaaagaattagcgcttggaaaatgaagtctccgctggccatgtcaccagattgtttcatctttgaacttcccaatcccagtgtaaatcaacaagatactttttttttgggggaggatgacattcaaaaaatacacattctcttcacatatcctagggcttttatttggatgccgttaggaaccaaacagactcttgttgacgtgtgtgaatcatttgtttcttcacc

SEQ ID NO: 145102 - DNA, 1462 bp, Zea Mays
tggggtcaagatcatttgcctggcactgcctgctcggcacccgcctgctcggctgctcccaccgtcccacgtgccgtccgtccgtgttggagcgtgttgccatcgccattccctccgcttcgctccgtttcgttgccaccctttacacgcactccaccttcgctcctccgggcccccgaaatgtcggacgaaggcggcgccggcgagccgctcagcgaccgccagaaacgggagatcgccacctggttcctatccaacgcgccagccggcgagatccattacatcgccaaagatgtgcgcgcgctgctggggaacgacgcggtgtacgaggccgccgccgcggaggccttcccggagtacaacaaggcccgcctcgtgtccatcgagctccccgaccgcagtggcgacgcaaggatgctggagcttctgcccaccaatccaagtggatcgatgtgtgatgctgatatcaatactgagcttaaagcgattgttcctgtgattatcgatgtgtgcatgactgcactgtatgcgaagaatccatcatgattatggagtgcacccttccagataatcatctcaacttatggggagattgacaagaacaattatctggaccccaggactgcgcaagttgctactatagatcatatgaaacagacttgtacaaaactgaggcctgctgaagatgaggagcttccatcagcttacattgaagagtttaggtgtgctttagatgttgaattgtcaaagtatgtttctgaagcttatcctaaaggggcctgtgccgtttattgtactagtggaaaggatatagagggaccaggagcagatttcagttttgcagcagttatttctgctgctaagcgtagcccacagaacttttgcaatggcagctggtgttcagtttggactattgaattcaattatgagttgcagtttgttgatattaaaggaaagatacaggtagatgctcactattttgaagagggaaatgtccagctggatactaacattgatcgtaaggactccaccagaatgcagtcacctgacgattgtgcggtttcaatcagtggcatcattcgacatcacgagtctgaatatttgtcctctctcgaggaatcatacttaaatttatctgatgcaacttttaaggaccttcggcgaaaacttccagttacccgtactcttttcccctggcataacacactggtgttcggtcttacgagagaccttgccaaagaattagcgcttggaaaatgaagtctccgctggccatgtcaccagattgtttcatctttgaacttcccaatcccagtgtaaatcaacaagatactttttttttgggggaggatgacattcaaaaaatacacattctcttcacatatcctagggcttttatttggatgccgttaggaaccaaacagactcttgttgacgtgtgtgaatcatttgtttcttcacc

SEQ ID NO: 145103 - DNA, 116 bp, Zea Mays
aaaagcaccacacttatattattcagagctacatcactaacacaggccacacatgttatcgtattttgtacatgtatttacaaacattttataaaatcattcacaaaagaactaaa

SEQ ID NO: 145104 - DNA, 711 bp, Zea Mays
acccaacctactttatctttatctttctcctcgccaaccatccccactcctgcagtccttctccacctagctcccccgcgccaagaacacgccagctagcaagcgcgctcgatcgaataccgttaccgtgtcgccatggccgccaccgcgtctctatcagccgtcggggcgccgctgtcggtgcccgggctcaggaagccgctcggcgtgtcgtcgctccggcccctgcagccgagggcggcgaggatgacgacgacggccgtgcgggcgtcggcgtcgccctcgtccacgtccatcaaggagaaggctgcggccgggctgaccgcggcggccctggcggccgcgctggtgctgccggacgtcgcggaggccgcgcagtccggcgggctcacgccgtcgctcaagaacttcctcctcagcatcgtgtccggtggggtcgtgctcgttggtattgtcggcgccgtcgtcgccgtctccaacttcgaccccgtcaagagggcctgatcggaatccatcgtatcgatcgtctcgcctgtgtcctgtcctgtgcctgtgctgtctgtatcgactggtggtgctatatcccctgtgtgttaattgattttggagaatgttcagacgtatatctatgtctaagaaatggagttcgagttaaactttgctgagacttctcttgtctatataatattattagtaggaatcaatcttcaa

SEQ ID NO: 145105 - DNA, 106 bp, Zea Mays
attacacataattatagtgcatatatatattgttaataaatatttatatatatttgaaaacgttgttcatattaaatacaaagtaactaaaatataacataacatc

SEQ ID NO: 145106 - DNA, 824 bp, Zea Mays
catgatgattatgtgtacagtgcaatcttcagaggtctctgcaaacagaggaaactagaacaggcatgtgatttcttgtacgaattggtggattgtggggttgctcccagcgcagtgtgctacaacatactcatagacgctgcctgcaagcagggaccgaataagttagcatattagttaaggagatgaaaagaaatgaactagcacctgatgctgttacttggaggattcttagcaaactgcatcactatgacgaggaagaacaagaggggaaccagcatcaaacgtttggtgtcgatcgaacttctaaagaaggtggcgatgatgtataggcctttggtagtcaaaatacgagactacagattatagataagctttgtctgctctgcatccataatgcacaaagcagaaggttgttgcgacaaggtgcgcctatgaatgttggattcgcttacactacaaggtctctgcgccaccaaaggtaccatggtagtagcagcgataagagaagaatcggcttccaaattgtgtcccaagtcagatcggccggcataggtggtgcttgtgagctgaactggtagtgtagtcgcagccttgttcaagagactgacaaactgacgaaggctatcatccacggccaagtcctcgcacccatctgtggacaactggatgatccttcaatttgtttgcagccttgcagtacagtatcctatttcgcggaaccaatagctctgaactacttaggacttgtttggaagcaacctagtttttaagaaaccagtttttattttttttagttatgaaaggccagctttttggttttt

SEQ ID NO: 145107 - DNA, 133 bp, Zea Mays
atcgtcacaagctagctattggtacggtggtgggttcagtgacccctacccctgccggccggtgcgtacccggcctacccgtcgccgccgttcgacatcgatatcgcaaggtccaaggtatgctagttcgtga

SEQ ID NO: 145108 - DNA, 1112 bp, Zea Mays
cgagacacagcaacctcccactccactgtccactccacccccaccacctttgcctctcctagcttttccttggcatcctagctcttcctcctcagccgcagcagatcgactaggaaacatgtgcggcggcgcgatcatctccgagttcatcccgcatcgcggcgccaagcggggtctctgcgccgaggacatctggccgcacgcggccgccgacttcgacgacctcctccacgcgcacgcgcacgcgcacggccacgacgacgacgacttcgccgccgccgcctccttccatcccgaccaagagccgccggcccgcaagcgggagcgcaagaccatgtaccgcggcatccggcgccgcccctggggcaagtgggcggcggagatccgggacccggccaagggcgcgcgcgtctggctcggcaccttcgccaccgccgaggccgccgcgcgcgcctacgaccgcgccgcgcgccgcatccgcggggccaaggccaaggtcaacttccccaacgaggacccgccgcccgagtacgacgacgacgacgacggccacgcccacgcccacgccgccgcggcgcaggggatgctcgccatgtccgccggcggaggcagggacgaccacctagtcgactacgacgtcgtcgacgtcatgggcatgggcggcttcttccagcaccacgcgtacgtgcccgacgccgtggcgcagcaggagcaggtgcccacggtcgcgtacgtgcaccaccagccgccgccgcagcaaccgcagggcgctgccgggatggacatgtggacgttcgacgccatcaacacgcccgtgcccatgtgatgtgatcgacagggcaacgggcggatatgctagctgctgtgcggcctgctttgtgcttcttatgaatgaacatgttgctactttccaatatttatttatattcgttgcaagctttctatacctgcaatatattagtataggagcaatttatctgcccatgtaatactaggggtccaagtccaactctagcatctcacaaacactttcccttcctgccctagcggttcttgcgcaaagatgaattctccagtaataaattgccgtggattaagtcccattttatttt

SEQ ID NO: 145109 - DNA, 2353 bp, Zea Mays
gatgcgcaatcgggtcacagccacaccaaaagtgtcctcattcgacatttgatcagagctacagatgactcttcaattaaattcgatttctaatttcttagaggagatataccgtatgtcccgtatctagactatgctataaaaaaactataaaagttgggctccctccaatccaatccgagtatctgacgctcctcactgtccttgtcactctcactggctcaccgtcacgtcaccgcccagatcgcaccgtacacacaaaatgcgaaggccgcccaagcccaagcgagtggcggcggcggccaagcttcccctccccctcaccgccaccttcctctccctcgtcctcctgccgctcggcttcgtcgccacccacagggcattctccggcgtcgtctccgcggcctcgacgcccgcagccaagcgtgttcttctcgaggacgacggccgtgccagtcgtggagccgcagccaatgccagcgccggcgccgagcacgcggccgccgtggagcggcactgcgcgggcacgctgcaccgcgacgtgtgcgcgtcgacgctgggcagcatcccggacctggcgcggaagccggcccgcgaggtgatctcggccgtggtggcgcgcgcggcgtcggcggtgcgcgcgtcggcgtccaactgctccgcgtacctccggcggcccgcgggggcgctgcgggtgcgcgaccgcctggcgctggccgactgcgtggagctgctggggcacacgctggcgcagctgggcacggcggaggcggagctgtcggcggggaacttcaccgcggcggaggcggaggtggagtccgagtccttggcggcggtccagaccgtgctgtcggccgccctgaccaaccagtacacgtgcctggacggcttcgcggggccgtcggcatcggaggacggccgcgtccgtccctacatccagggccgcatgtaccacgtggcccacctcgtgtccaactccctggcgatgctgcggcgtctcccgcagcgccggcggcggcgccagggcagaggggcactggagctggaggggtacgggcgcgtgcggcgcgggttcccgtcgtgggtgtcgggggcggaccggaggcggctgcagcagcagcaggtggtcccggggccggacctggtggtggccaaggacgggagcggcaacttcacgacggtgggggaggcggtggcggcggcccccaacaacagcgagacgcggttcgtgatctacatcaaggcgggcggctacttcgagaacgtggaggtcgggagcgagaagacgaacctgatgttcgtcggcgacggcatgtggaggacggtgatcaaggccagccggaacgtggtcgacaactccaccaccttccgctccgccacgctagctgtggtcggcacggggttcctggcgcgcgacctgacggtggagaacgcggcggggccgagcaagcaccaggcggtggcgctgcgcgtgaacgccgacctgtccgccttctaccgctgcgcgttcgcggggtaccaggacacgctgtacgcgcactcgctgcgccagttctaccgcgactgcgacgtgtacggcaccgtcgacttcgtgttcggcgacgcggccgccgtgctgcagggctgcagcctgtacgcgcggcgcccgtccccggggcagaagaacgtggtcacggcgcagggccgcgaggaccccaaccagagcacgggcatcgtcgtgcagggcggcaaggtggcggccgccgccgacctggccccgctcgtcgccaacgtctcgtcctacctcggccgcccctggaagcgctactcccgcgccgtcttcgcgcagaccaagttggaggcgctcgtccacccgcgcggctggctcgagtggaacgacaccttcgcgctcgacacgctctactacgccgagtacatgaaccgagggcccggcgccgatacctccgccagggtgccgtggccgggataccacgtgctcaacgactccgccgacgccgccaacttcaccgcgctcgacttcatccagggagacatctggctcaacgccacctcattcccctacacgctgggatttacgtagctatagctagctagtactacaacgttcgattttgcttcgggttcttcttctggaatactagtatactgctgtgttctgccagctccatcgatcactcaggttttcgctgtacgtaatcctgagagctggatctgcatccatcttctactactgtatgattctttgcttaacgacgatcgacaacggcctaaggctagtcatccgtgtaccgtgtatgcaagtaaatggcatcgcactgatagctgcttaagcaggctctggttcgccttcgct

SEQ ID NO: 145110 - DNA, 128 bp, Zea Mays
aggggggggggggggggggggggggggcggggcggggcgacaagatttacaatatttctcaataataattcacctgtatcgatcactaagaagggtagggagacatgaagcctgaaggtaaaagaaaa

SEQ ID NO: 145111 - DNA, 909 bp, Zea Mays
gcaaagagacaatgctcataatagtttgctttgatatttgttgttcatgctaaggatgccacttactttatttgcaaacaagctatttcagatgattgacagctttggcatgacttttcttttccttcttttgcattgtttcatatgtgtgaggattttagggagcatattaaatgagatacatgagtgctcagtcatcatagtaagactgcacaggtagtcatgtgttatacctggccattccatatttatcaaaagccatttcctttaaataattgtattctatagcctcaatcattcaatcaagttattgtaccatgactcattttgtgtgcagttttcccttttttgtgctaactctaatgaaatttcgtttaaggggacaagtaaacatgagcgaaatgggtaattgagtaattgatttgagttggtttcagttactaaagtagcaacctcataaaaaacttaaacatgaacagatcaatacaagtacgcatcttaagcactttgtcagtttgattagtaattgcaagaaaataatttacgtacattactctgcaattactaatatgtcctctaattgatgctacaggtcgccccaccaagctgccatgatattcctccacttaccagtgtttcaaattccaatgacatcaggttgaagaaaggaacttcacacatgaaaagagacgatccggacgaccatgaagattaaacgttgctgttaagaaaagccatattttctgtattgcttctaagctgttttatggcctttaaaccaatacttttgcttggcatatatgtagctataactattgtaatataatctctgagcttctcatgctgctattcaacatatcattactcctaccaatatatgtacagtttcagttgacttgcttgctttcc

SEQ ID NO: 145112 - DNA, 1620 bp, Zea Mays
cgcttcttcacgtcccccctcaatcacatcaccggcactccccattgtccttcatctgctgcctgctcctccgcgcggccatgcccgagctcgcggtcctcgttctcagccacgcgctctttcacgcgcgcctccgttgccgctcttgctcccagactttgccgtggccctctcccgtctctcattggcatttttttatgtagggttactcacactgttacaagggtcattcagcgcctgtcactgctctggctgatagattgcttatggatggtgaatctaaactgcttgcaagtggagggtaccaatccaccttccctacccgtccagctgctcgatgcctctgaaattgatggagcgatacctagcacgcggtgcatgttgttctgaagattctgctgctgttggttgccattcaccctgacagtattgccagtggcaccgtcaactatttcttccctctccgcccgagcctgcagatgaatgtttgacggcacttctcgcctactgtcctcactggtgtttccaaagtctgcagtgagttcggtctcagctctaattaacgaggaagtcatgctaggcaccctctggtcttctcgtctccaaccaaccactaccggcgtgtggatgatagcaggttatctgttgcgtggcataaatcgtccctgttggtgagctgttccaaagactcaaaggttaaagtttgggacacagtggctccttcgagtggttcatcaccatgtgtaggcagtgctcacctcaactcaaacaggccaccaattgctatgaaatgccatgaatccctttgctatattgctgctggagctcaagtgacagcgattgacttgaggacaatgaagaaggcttctgtccttgcactccagaaccacagaatactttcttacggatacgtcaatggctgtgcagtccaaaaaaatgaagagaagggaatttgacattgtcgttcaagcttcaacattgatcacttattggttttcaggaagtctttctgaatgtcagttgctataggattatttgaacaacatctcttccaatggtgatatattttatgatgctcagaatgatttcttgacacctgaatgggacagtgagaatttacaagtggtactgatgattctatccatgttcaaatcatcaagatagtcatcagggttattgcccacggaagcttaaatacttggtgctgaactgctgaagtatgatgtctcactgaaaaacaacgagatggcaatgagaagtgttcaggaagaggggtaatatttactcagagcagcaaaggaaggtcgccccaccaagctgccatgatattcctccacttaccagtgtttcaaattccaatgacatcaggttgaagaaaggaacttcacacatgaaaagagacgatccggacgaccatgaagattaaacgttgctgttaagaaaagccatattttctgtattgcttctaagctgttttatggcctttaaaccaatacttttgcttggcatatatgtagctataactattgtaatataatctctgagcttctcatgctgctattcaacatatcattactcctaccaatatatgtacagtttcagttgacttgcttgctttcc

SEQ ID NO: 145113 - DNA, 2393 bp, Zea Mays
cgcttcttcacgtcccccctcaatcacatcaccggcactccccattgtccttcatctgctgcctgctcctccgcgcggccatgcccgagctcgcggtcctcgttctcagccacgcgctctttcacgcgcgcctccgttgccgctcttgctcccagactttgccgtggccctctcccgtctctcattggcatttttttatgtagggttactcacactgttacaagggtcattcagcgcctgtcactgctctggctgatagattgcttatggatggtgaatctaaactgcttgcaagtggagggtaccaatccaccttccctacccgtccagctgctcgatgcctctgaaattgatggagcgatacctagcacgcggtgcatgttgttctgaagattctgctgctgttggttgccattcaccctgacagtattgccagtggcaccgtcaactatttcttccctctccgcccgagcctgcagatgaatgtttgacggcacttctcgcctactgtcctcactggtgtttccaaagtctgcagtgagttcggtctcagctctaattaacgaggaagtcatgctaggcaccctctggtcttctcgtctccaaccaaccactaccggcgtgtggatgatagcaggttatctgttgcgtggcataaatcgtccctgttggtgagctgttccaaagactcaaaggttaaagtttgggacacagtggctccttcgagtggttcatcaccatgtgtaggcagtgctcacctcaactcaaacaggccaccaattgctatgaaatgccatgaatccctttgctatattgctgctggagctcaagtgacagcgattgacttgaggacaatgaagaaggcttctgtccttgcactccagaaccacagaatactttcttacggatacgtcaatggctgtgcagtccaaaaaaatgaagagaagggaatttgacattgtcgttcaagcttcaacattgatcacttattggttttcaggaagtctttctgaatgtcagttgctataggattatttgaacaacatctcttccaatggtgatatattttatgatgctcagaatgatttcttgacacctgaatgggacagtgagaatttacaagtggtactgatgattctatccatgttcaaatcatcaagatagtcatcaggttccttcagtaattcaaaccatcactaatcccttctgacgggctatatattctatcggaccaggcacaactatccaaatttcttttctatataacaaacgcggacgtaaagttgctcaaccacgctgtccacgtcgctcctccgtttcccagccattggatcggcaaccaacgacacaagagaattccgtgcgattgtttcttaacgtgaagtttctggacagcgccggacagatagagagaatagaagaatatacacatcttcttcctctcgcttccaaaggtgatgccttccacggagaggagatcgtgcgaccatgatggcagcgactcttgattttgcccatcttcccacgctcaaacggataacagtctccttccttctgtctcttccaatcgtctcttcctagttccataacactctcacaacacgctagcaggacactcattctctcaatcggctcttcccgctgcgctacacgccaccaagagcctccccaactcctccccgtcaaacggcgccgcgtcgcaaggagcacaaccaccccccgtctccttcctcagacgctgtcgcgtttctcgcgcggtgcgccccctccctgaaattcttatatacagagcaaggagcaaatatgggattccatgatgtccacgtcgctattttttgacggctcaacttgattgtgccgtgaattgtctgttagctagggagtcatcatttctgttttggcctctaaaataacgtttacagctggaaccgaagtatgcttgacaaatggttattgcccacggaagcttaaatacttggtgctgaactgctgaagtatgatgtctcactgaaaaacaacgagatggcaatgagaagtgttcaggaagaggggtaatatttactcagagcagcaaaggtcgccccaccaagctgccatgatattcctccacttaccagtgtttcaaattccaatgacatcaggttgaagaaaggaacttcacacatgaaaagagacgatccggacgaccatgaagattaaacgttgctgttaagaaaagccatattttctgtattgcttctaagctgttttatggcctttaaaccaatacttttgcttggcatatatgtagctataactattgtaatataatctctgagcttctcatgctgctattcaacatatcattactcctaccaatatatgtacagtttcagttgacttgcttgctttcc

SEQ ID NO: 145114 - DNA, 1300 bp, Zea Mays
ctagctgatcacacttggcgttgctatataagcactcgcacctcctccatcgtcccggcaacatcatcaccacacgccaaatttacagctagttagctgaattcgatcgatatccaggaactaataatccaccgacccccctcatggcggcttcgtcgcgaatgggcttatccgtctacctcgccatcatggcggcggtgctcgcctcggcgctcggagcggagctcaccgcggactactatagcgagacgtgcccgcaagcgctgaccaccatcaagctcctcgtcggcgccgccatcctgagggagcccaggatgggggcgtcgctggtccgcctccacttccacgattgcttcgtcaatggctgcgacggctccatcctgctggacgacaccgacgacatggtcggcgagaagacggcgaagcctaacaacaactccgtgagaggctacgatgtcatagacaccatcaagtcggcggtgaacacgatatgcttgggcaacgtcgtctcctgcgccgatatcttggccgtggccgctcgcgattccattgtcgctctgggaggaacctcgtacgacgtgctcctggggcggcgcgacgcgacgacggcaagcatggacgacgcgaacaacgacatcccgacgccgttcatggacctgccggcgctgcaggacagcttcgagtcccacggcctgtccctgcacgacctggtggtgctctccggcggccacacgctgggctactcccgctgcctcttcttccgcggccgcctgtacaacgagaccggcacgctggacccggcgtacgccgggtcgctggacgagcgctgcccgctgacgggcgacgacgacgcgctgtcggcgctggacgacacccccaccaccgtcgacgcggactactaccagggcctcatgcagggccgcgcgctgctgcactcggaccagcagctttaccaggcaggcggcgccgctggcgatctggtggagtactacgccgagaacccgaccaagttctgggaggacttcggcgcggccatgctcaagctgggcagcctgagcccgctcaccgccgacgaaggggaggtcagggagaactgccgggtcgtcaaccaggtgtgagtgtgacttcgccgccatcgccgtcgaatgaacgaggcatcagcttcgttccgtacgcacactgtggctgctagctgcaccggcaagctatgcagcaagattctgtagcgtgtgtcttatatttgtattcgcgtgcctacttaattttgtgagaaattggtcttatatgtttggttaacata

SEQ ID NO: 145115 - DNA, 102 bp, Zea Mays
caatatttttctgttctaaaactgctttcgtttcgctcttttactgtcttactctttgctttggtccattctatatacagacatatatattctctgaaccgc

SEQ ID NO: 145116 - DNA, 2233 bp, Zea Mays
agctactatacaaaaccagccgagcgccagaggagaagagctccgtcttgccttctcttctctacctgccgcacccgcacagccacagccaaccacacaccccacatcacaacagctccctctgcatctccgcctcgtcgccgtcgtctgcctgcacaaccttcttcttcctcatctctctctctcttcttccgctgccaccctcccagcaccgagggaagggaagcccaggaatctccgtcccgctcccggccgccgtccttctcataacctcatcggatctgtattgggttttcagtaaggagcagaaaacgccttagggaatgcagaaagatgtgcttgcacgtcgaagagctactttgtgagggacttggcaggaaagcacgccatactcttcattctctgccacctcttgatgacttcgaagctcaagagtacacgtatctccacctcgtgctttcgcacaatggggttcgacgtggcggctcaaccgtcttcttagatcaccatctcggtggagacggttgaagtcttcacaccctctcgacctctttgctgtctcattttttttaactgtcaaggataagcaagtgacctctgtgtgcataccaccaccaccatacgtagcatacacaggcacagatggcagagcataaagggaacgttctcttgcacaagtatgagatggggaaattgcttggccaaggcacctttgccaaggtttaccatgctcgtaacacggcgacttcggaaagtgtcgcgatcaaagtgattgataaggagaaggttatgaaggttggtctcattgatcaaatccagcgagaaatttctgtgatgaagcttgttaggcatccaaacatcgtacagctctatgaggtcatggccaccaaaaccaaaatatactttgtgctggaacatgttaaaggtggagagctgttcaacaagattcagcgaggaaggctcaaggaagacgcagcgaggaagtacttccagcagttgatctgtgcggtggacttctgccacagcaggggtgtctatcatcgagatttgaagccagaaaatcttttgctcgatgagaatagcaacctaaaggtatcagattttggtctaagcgcacttgctgaatgccatagacaagacggcctgctccacacgacttgtggcacgcctgcttatgttgccccagaggtgattaacagaaagggttatgatggtgcaaaggctgacatatggtcttgtggggtcatcctgtttgtgctattggctggttatcttccgttccatgataagaacttgatggacatgtataagaagattgagaaagctgacttcaaatgtccaagttggttttctaccgatgttcggaggcttttgcaaaggattcttgatcctaaccctagtagaaggatctcgatggaaaaaatcatggagaatccatggtttaggaagggtttaggtgcaaagctacttaggtacgatttacagaataagaatgcccctcatgtggacaagaatgcagattttgattcactgagcgccaacataacaactgagagcaagcaacatgaagaaaagaagcctatcaacatgaatgcatttgatataatctctctatcaactggcttggacctctctggtttatttgaagaatctaacaagaagagagaatccaaattcacatctaccaacacaagctcgacaatcatatcgaagatcgaagatattgcaaagaatttgcggttgaatttgacaaagaaggatggtggtttgttaaagatggaagcttcaaagcccggaaggaaaggggtaatgggtatcgatgccgaagtatttgaggttagccctaactttcatcttgtggagataaagaagacgaatggcgacactctagagtatcaaaaggtcctgaaccaagaaatgaggcccgcactcaaggaaatagtgtgggcttggcaaggtgagcaatcaaagcaaaagcaggaacaacagtcgtgttaaaaacttatgagctagtgcaatacatctttttagccaatttccaatctttcgtgtatttgtgtagtttttactcttttattatccatttttgttttcccgtgtaatgccaacataaacttgtgttattttctgaggacaaatttatttcaaagatgtgtttacgctgttattaagagttttctttatgttatatactgttttcaaaacacaaaaaatatatattgttataaaaata

SEQ ID NO: 145117 - DNA, 2272 bp, Zea Mays
agctactatacaaaaccagccgagcgccagaggagaagagctccgtcttgccttctcttctctacctgccgcacccgcacagccacagccaaccacacaccccacatcacaacagctccctctgcatctccgcctcgtcgccgtcgtctgcctgcacaaccttcttcttcctcatctctctctctcttcttccgctgccaccctcccagcaccgagggaagggaagcccaggaatctccgtcccgctcccggccgccgtccttctcataacctcatcggatctgataggtatgtgttgtattgatcttataactgatgcccttctcttttacatcttcggcagtattgggttttcagtaaggagcagaaaacgccttagggaatgcagaaagatgtgcttgcacgtcgaagagctactttgtgagggacttggcaggaaagcacgccatactcttcattctctgccacctcttgatgacttcgaagctcaagagtacacgtatctccacctcgtgctttcgcacaatggggttcgacgtggcggctcaaccgtcttcttagatcaccatctcggtggagacggttgaagtcttcacaccctctcgacctctttgctgtctcattttttttaactgtcaaggataagcaagtgacctctgtgtgcataccaccaccaccatacgtagcatacacaggcacagatggcagagcataaagggaacgttctcttgcacaagtatgagatggggaaattgcttggccaaggcacctttgccaaggtttaccatgctcgtaacacggcgacttcggaaagtgtcgcgatcaaagtgattgataaggagaaggttatgaaggttggtctcattgatcaaatccagcgagaaatttctgtgatgaagcttgttaggcatccaaacatcgtacagctctatgaggtcatggccaccaaaaccaaaatatactttgtgctggaacatgttaaaggtggagagctgttcaacaagattcagcgaggaaggctcaaggaagacgcagcgaggaagtacttccagcagttgatctgtgcggtggacttctgccacagcaggggtgtctatcatcgagatttgaagccagaaaatcttttgctcgatgagaatagcaacctaaaggtatcagattttggtctaagcgcacttgctgaatgccatagacaagacggcctgctccacacgacttgtggcacgcctgcttatgttgccccagaggtgattaacagaaagggttatgatggtgcaaaggctgacatatggtcttgtggggtcatcctgtttgtgctattggctggttatcttccgttccatgataagaacttgatggacatgtataagaagattgagaaagctgacttcaaatgtccaagttggttttctaccgatgttcggaggcttttgcaaaggattcttgatcctaaccctagtagaaggatctcgatggaaaaaatcatggagaatccatggtttaggaagggtttaggtgcaaagctacttaggtacgatttacagaataagaatgcccctcatgtggacaagaatgcagattttgattcactgagcgccaacataacaactgagagcaagcaacatgaagaaaagaagcctatcaacatgaatgcatttgatataatctctctatcaactggcttggacctctctggtttatttgaagaatctaacaagaagagagaatccaaattcacatctaccaacacaagctcgacaatcatatcgaagatcgaagatattgcaaagaatttgcggttgaatttgacaaagaaggatggtggtttgttaaagatggaagcttcaaagcccggaaggaaaggggtaatgggtatcgatgccgaagtatttgaggttagccctaactttcatcttgtggagataaagaagacgaatggcgacactctagagtatcaaaaggtcctgaaccaagaaatgaggcccgcactcaaggaaatagtgtgggcttggcaaggtgagcaatcaaagcaaaagcaggaacaacagtcgtgttaaaaacttatgagctagtgcaatacatctttttagccaatttccaatctttcgtgtatttgtgtagtttttactcttttattatccatttttgttttcccgtgtaatgccaacataaacttgtgttattttctgaggacaaatttatttcaaagatgtgtttacgctgttattaagagttttctttatgttatatactgttttcaaaacacaaaaaa

SEQ ID NO: 145118 - DNA, 3406 bp, Zea Mays
ttccaccacgcgctcgttgtctcttgtcgctgcagcctcgtcccgtccaatccttccaagtctctcttcttgctgcaggctgccccaagcccaggctcaatccggctggacgaggagacggcattgctcgcatcgcctgccctgccctgccccccatgcgtgttgtgcgcatgaacagaggctaggctaccaacaacgcatagcatagccatggatcccgagttcggcgtcggcacggcgccacaaaaggggcggcgggcgtggcggacgacgctgctgctggcgtaccagagcctcggggtggtgtacggcgacctcagcatctcgccgctgtacgtgtacaagagcaccttcgccgaggacatcacgcactcggagaccaaccaggagatcttcggcgcgctctccttcgtcttctggacgctcaccctcgtcccgctcctcaagtacgccaccatcgtcctgcgcgccgacgacagcggcgagggcggcacgttcgcgctctactccctcatctgccgccacgccaatgtcagcctcctccccaaccgccaggtcgccgacgaggagctctccacctacaggctggagcgcccgcgcgaggccgccgggaggtccggcctgctcagggcgtggctggagaagcacacgaggctgcacaccgcgctgctcgtcatggtcatgatcggcacctgcatggtcatcggcgacggcgtcctcacgccagccatctccgtgttctccgccgtctcagggctcgagctctccctgtccaaggatcagcatgaatatgccgtcatcccgataacctgcgccatactggtgttcctgttcgcgctgcagcactacggcacccaccgcgtggggttcctcttcgcgcccatcatcctcgcctggctgctctgcatgagcgccatcggcctgtacaacatcgtccgctggaacccccagatctaccaggcactcaaccccgtctacatgatcaggttcctcaggaagaccaagaagtccggctggatgtcactgggaggaattctgctgtgcatgacagggtcagaagcaatgttcgcggatcttggacacttctcctacagcgccatccagcttgctttcacttctctagtgtacccttcactgatcctgggttacatgggccaagctgcttatctgtcccagcaccataaccttgacgcaagctaccagatcgggttctacattgcagttcctgagtgtgtacggtggcctgtgctggtgctggccatcttggcgtccgtggtgggcagccaggccatcatcagcgggaccttctccatcatcaaccagagccagtctctgagctgcttccctagggtgaaagtcgtgcacacgtctgacaaagttcatggccagatatacatccctgaggtcaactggatcctcatgatcctctgcgttgctgtcactgttggtttccgtaacaccaagcacatggggaacgcgtctggcttggccgtgatcacggtgatgctggtgaccacgtgcctcatgcccctggtgatcatgctgtgctgggaccgctccccctggctggccctcgccttcttcctcttcttcggctccatcgaggcgctctacttctcggcgtcgctgatcaagttcctggacggcgcgtgggtgcccatcctcctggccctcatcctgctcgccgtcatgttcgtgtggcaccacaccaccatcaggaagtacgagtacgacatgcacaacaaggtgaccctggagtggctgctggcgctgggcgacaagctgggcatggtgcgcgtcccgggcatcggcctcgtctacaccgacctcacctccggcgtgcccgccaacttctcccgcttcgtcaccaacctgccggcgttccaccgggtgctggtcttcgtctgcgtcaagtcagtgccggtgccgcacgtgctccccgccgagcgctacctcgtcggccgcgtcggcccgccgggacaccgctcctaccgctgcatcgtgcgctacggctaccgcgacgtgcaccaggacgtggactccttcgagacggagctcgtcgagagcctcgccacgttcatcaagctggacgcgctgttccgctgcagcgacgccgccggcgaccagcagcgggacagcagctactacgagcgcgagaacgcgctcacggtcatcgggagcaacccgctgcggcgccacctggccctgggctacgacgactcccactcccacgacgacggcgcgtcgtcagctggctctgaccgcgtggacggcatagagctcgccgcggcggcgccggcgccggcggtcgttaagaagcaggtgaggttcgcggtggctccgcccaggagccccggtgtggacgagaccgtgctggaggagctgcacgagctgtgcgaggcgcgcgaggccggcacggcgttcatcctgggccactcgcacgtgaagaccaagcccgggtcgtcgatactcaagaggctggccgtcggcgtcggctacaacttcctgcgccggaactgccgcggcccggacgtggtgctgcgcgtgccgccggcgtcgctgctcgaggtgggaatggtgtacgtgctgtaaccagaacgtggcggtgatgggtgactgcgatctctgcgtccggttttcgctgcgtgaactacggatctctctgctgtctgatgtgctattagagcatctccaacaacgtgacctataaaaatgtcttataatttaaaaataagtaaattttatagaatttagggcaccaacaaagcaccccgctccaacagtaaagccccaaatctagattatagggcagcccactacggtgtagtatatttgaggcacttgagagagtggcctatagttttttgacaaaatttgttgaattgaggcactgttggagtggtttttcctgtgtagagccctatatttcaatttgaggcactagtttgaggcattgttggagatgctcttatgcacatctcgatttgcccatgtataaattgtaacgagatgcgatggtaacagaggatgccctgtcatttcccaatgatgagttgactaaggattataggccattttaactttatactaaatcaatcaatgcaaaattttgactacgtcttttaataaaaaacactgacacgtataagttcaaaaaaaaaataacatgtggtccttaaccttggcaaagggggaactgagctcagtggtaaaagctctatggtacaagctggccggtccaatttcctaccattatatggtggggagcctcttcctctgtgaaagtcaaaaaaaaaacttgccaaaggctcattggacaatgatatagttaagattttgtctcgtaattcacttatatagtcaccaaaatactgttgtttgcacttttttttgttgtgcagacaat

SEQ ID NO: 145119 - DNA, 3338 bp, Zea Mays
ttccaccacgcgctcgttgtctcttgtcgctgcagcctcgtcccgtccaatccttccaagtctctcttcttgctgcaggctgccccaagcccaggctcaatccggctggacgaggagacggcattgctcgcatcgcctgccctgccctgccccccatgcgtgttgtgcgcatgaacagaggctaggctaccaacaacgcatagcatagccatggatcccgagttcggcgtcggcacggcgccacaaaaggggcggcgggcgtggcggacgacgctgctgctggcgtaccagagcctcggggtggtgtacggcgacctcagcatctcgccgctgtacgtgtacaagagcaccttcgccgaggacatcacgcactcggagaccaaccaggagatcttcggcgcgctctccttcgtcttctggacgctcaccctcgtcccgctcctcaagtacgccaccatcgtcctgcgcgccgacgacagcggcgagggtcgccgacgaggagctctccacctacaggctggagcgcccgcgcgaggccgccgggaggtccggcctgctcagggcgtggctggagaagcacacgaggctgcacaccgcgctgctcgtcatggtcatgatcggcacctgcatggtcatcggcgacggcgtcctcacgccagccatctccgtgttctccgccgtctcagggctcgagctctccctgtccaaggatcagcatgaatatgccgtcatcccgataacctgcgccatactggtgttcctgttcgcgctgcagcactacggcacccaccgcgtggggttcctcttcgcgcccatcatcctcgcctggctgctctgcatgagcgccatcggcctgtacaacatcgtccgctggaacccccagatctaccaggcactcaaccccgtctacatgatcaggttcctcaggaagaccaagaagtccggctggatgtcactgggaggaattctgctgtgcatgacagggtcagaagcaatgttcgcggatcttggacacttctcctacagcgccatccagcttgctttcacttctctagtgtacccttcactgatcctgggttacatgggccaagctgcttatctgtcccagcaccataaccttgacgcaagctaccagatcgggttctacattgcagttcctgagtgtgtacggtggcctgtgctggtgctggccatcttggcgtccgtggtgggcagccaggccatcatcagcgggaccttctccatcatcaaccagagccagtctctgagctgcttccctagggtgaaagtcgtgcacacgtctgacaaagttcatggccagatatacatccctgaggtcaactggatcctcatgatcctctgcgttgctgtcactgttggtttccgtaacaccaagcacatggggaacgcgtctggcttggccgtgatcacggtgatgctggtgaccacgtgcctcatgcccctggtgatcatgctgtgctgggaccgctccccctggctggccctcgccttcttcctcttcttcggctccatcgaggcgctctacttctcggcgtcgctgatcaagttcctggacggcgcgtgggtgcccatcctcctggccctcatcctgctcgccgtcatgttcgtgtggcaccacaccaccatcaggaagtacgagtacgacatgcacaacaaggtgaccctggagtggctgctggcgctgggcgacaagctgggcatggtgcgcgtcccgggcatcggcctcgtctacaccgacctcacctccggcgtgcccgccaacttctcccgcttcgtcaccaacctgccggcgttccaccgggtgctggtcttcgtctgcgtcaagtcagtgccggtgccgcacgtgctccccgccgagcgctacctcgtcggccgcgtcggcccgccgggacaccgctcctaccgctgcatcgtgcgctacggctaccgcgacgtgcaccaggacgtggactccttcgagacggagctcgtcgagagcctcgccacgttcatcaagctggacgcgctgttccgctgcagcgacgccgccggcgaccagcagcgggacagcagctactacgagcgcgagaacgcgctcacggtcatcgggagcaacccgctgcggcgccacctggccctgggctacgacgactcccactcccacgacgacggcgcgtcgtcagctggctctgaccgcgtggacggcatagagctcgccgcggcggcgccggcgccggcggtcgttaagaagcaggtgaggttcgcggtggctccgcccaggagccccggtgtggacgagaccgtgctggaggagctgcacgagctgtgcgaggcgcgcgaggccggcacggcgttcatcctgggccactcgcacgtgaagaccaagcccgggtcgtcgatactcaagaggctggccgtcggcgtcggctacaacttcctgcgccggaactgccgcggcccggacgtggtgctgcgcgtgccgccggcgtcgctgctcgaggtgggaatggtgtacgtgctgtaaccagaacgtggcggtgatgggtgactgcgatctctgcgtccggttttcgctgcgtgaactacggatctctctgctgtctgatgtgctattagagcatctccaacaacgtgacctataaaaatgtcttataatttaaaaataagtaaattttatagaatttagggcaccaacaaagcaccccgctccaacagtaaagccccaaatctagattatagggcagcccactacggtgtagtatatttgaggcacttgagagagtggcctatagttttttgacaaaatttgttgaattgaggcactgttggagtggtttttcctgtgtagagccctatatttcaatttgaggcactagtttgaggcattgttggagatgctcttatgcacatctcgatttgcccatgtataaattgtaacgagatgcgatggtaacagaggatgccctgtcatttcccaatgatgagttgactaaggattataggccattttaactttatactaaatcaatcaatgcaaaattttgactacgtcttttaataaaaaacactgacacgtataagttcaaaaaaaaaataacatgtggtccttaaccttggcaaagggggaactgagctcagtggtaaaagctctatggtacaagctggccggtccaatttcctaccattatatggtggggagcctcttcctctgtgaaagtcaaaaaaaaaacttgccaaaggctcattggacaatgatatagttaagattttgtctcgtaattcacttatatagtcaccaaaatactgttgtttgcacttttttttgttgtgcagacaat

SEQ ID NO: 145120 - DNA, 3050 bp, Zea Mays
ttccaccacgcgctcgttgtctcttgtcgctgcagcctcgtcccgtccaatccttccaagtctctcttcttgctgcaggctgccccaagcccaggctcaatccggctggacgaggagacggcattgctcgcatcgcctgccctgccctgccccccatgcgtgttgtgcgcatgaacagaggctaggctaccaacaacgcatagcatagccatggatcccgagttcggcgtcggcacggcgccacaaaaggggcggcgggcgtggcggacgacgctgctgctggcgtaccagagcctcggggtggtgtacggcgacctcagcatctcgccgctgtacgtgtacaagagcaccttcgccgaggacatcacgcactcggagaccaaccaggagatcttcggcgcgctctccttcgtcttctggacgctcaccctcgtcccgctcctcaagtacgccaccatcgtcctgcgcgccgacgacagcggcgagggtcgccgacgaggagctctccacctacaggctggagcgcccgcgcgaggccgccgggaggtccggcctgctcagggcgtggctggagaagcacacgaggctgcacaccgcgctgctcgtcatggtcatgatcggcacctgcatggtcatcggcgacggcgtcctcacgccagccatctccgtgttctccgccgtctcagggctcgagctctccctgtccaaggatcagcatgaatatgccgtcatcccgataacctgcgccatactggtgttcctgttcgcgctgcagcactacggcacccaccgcgtggggttcctcttcgcgcccatcatcctcgcctggctgctctgcatgagcgccatcggcctgtacaacatcgtccgctggaacccccagatctaccaggcactcaaccccgtctacatgatcaggttcctcaggaagaccaagaagtccggctggatgtcactgggaggaattctgctgtgcatgacagggtcagaagcaatgttcgcggatcttggacacttctcctacagcgccatccagcttgctttcacttctctagtgtacccttcactgatcctgggttacatgggccaagctgcttatctgtcccagcaccataaccttgacgcaagctaccagatcgggttctacattgcagttcctgagtgtgtacggtggcctgtgctggtgctggccatcttggcgtccgtggtgggcagccaggccatcatcagcgggaccttctccatcatcaaccagagccagtctctgagctgcttccctagggtgaaagtcgtgcacacgtctgacaaagttcatggccagatatacatccctgaggtcaactggatcctcatgatcctctgcgttgctgtcactgttggtttccgtaacaccaagcacatggggaacgcgtctggcttggccgtgatcacggtgatgctggtgaccacgtgcctcatgcccctggtgatcatgctgtgctgggaccgctccccctggctggccctcgccttcttcctcttcttcggctccatcgaggcgctctacttctcggcgtcgctgatcaagttcctggacggcgcgtgggtgcccatcctcctggccctcatcctgctcgccgtcatgttcgtgtggcaccacaccaccatcaggaagtacgagtacgacatgcacaacaaggtgaccctggagtggctgctggcgctgggcgacaagctgggcatggtgcgcgtcccgggcatcggcctcgtctacaccgacctcacctccggcgtgcccgccaacttctcccgcttcgtcaccaacctgccggcgttccaccgggtgctggtcttcgtctgcgtcaagtcagtgccggtgccgcacgtgctccccgccgagcgctacctcgtcggccgcgtcggcccgccgggacaccgctcctaccgctgcatcgtgcgctacggctaccgcgacgtgcaccaggacgtggactccttcgagacggagctcgtcgagagcctcgccacgttcatcaagctggacgcgctgttccgctgcagcgacgccgccggcgaccagcagcgggacagcagctactacgagcgcgagaacgcgctcacggtcatcgggagcaacccgctgcggcgccacctggccctgggctacgacgactcccactcccacgacgacggcgcgtcgtcagctggctctgaccgcgtggacggcatagagctcgccgcggcggcgccggcgccggcggtcgttaagaagcaggtgaggttcgcggtggctccgcccaggagccccggtgtggacgagaccgtgctggaggagctgcacgagctgtgcgaggcgcgcgaggccggcacggcgttcatcctgggccactcgcacgtgaagaccaagcccgggtcgtcgatactcaagaggctggccgtcggcgtcggctacaacttcctgcgccggaactgccgcggcccggacgtggtgctgcgcgtgccgccggcgtcgctgctcgaggtgggaatggtgtacgtgctgtaaccagaacgtggcggtgatgggtgactgcgatctctgcgtccggttttcgctgcgtgaactacggatctctctgctgtctgatatgctcttatgcacatctcgatttgcccatgtataaattgtaacgagatgcgatggtaacagaggatgccctgtcatttcccaatgatgagttgactaaggattataggccattttaactttatactaaatcaatcaatgcaaaattttgactacgtcttttaataaaaaacactgacacgtataagttcaaaaaaaaaataacatgtggtccttaaccttggcaaagggggaactgagctcagtggtaaaagctctatggtacaagctggccggtccaatttcctaccattatatggtggggagcctcttcctctgtgaaagtcaaaaaaaaaacttgccaaaggctcattggacaatgatatagttaagattttgtctcgtaattcacttatatagtcaccaaaatactgttgtttgcacttttttttgttgtgcagacaat

SEQ ID NO: 145121 - DNA, 2790 bp, Zea Mays
ttccaccacgcgctcgttgtctcttgtcgctgcagcctcgtcccgtccaatccttccaagtctctcttcttgctgcaggctgccccaagcccaggctcaatccggctggacgaggagacggcattgctcgcatcgcctgccctgccctgccccccatgcgtgttgtgcgcatgaacagaggctaggctaccaacaacgcatagcatagccatggatcccgagttcggcgtcggcacggcgccacaaaaggtcagccagactcagacccagctcccaaatccagctcagaccgcagagctctttgattccagctgccgaaacgccggcgctgctgctgctctgattgactgcgtgcaggggcggcgggcgtggcggacgacgctgctgctggcgtaccagagcctcggggtggtgtacggcgacctcagcatctcgccgctgtacgtgtacaagagcaccttcgccgaggacatcacgcactcggagaccaaccaggagatcttcggcgcgctctccttcgtcttctggacgctcaccctcgtcccgctcctcaagtacgccaccatcgtcctgcgcgccgacgacagcggcgagggcggcacgttcgcgctctactccctcatctgccgccacgccaatgtcagcctcctccccaaccgccaggtcgccgacgaggagctctccacctacaggctggagcgcccgcgcgaggccgccgggaggtccggcctgctcagggcgtggctggagaagcacacgaggctgcacaccgcgctgctcgtcatggtcatgatcggcacctgcatggtcatcggcgacggcgtcctcacgccagccatctccgtgttctccgccgtctcagggctcgagctctccctgtccaaggatcagcatgaatatgccgtcatcccgataacctgcgccatactggtgttcctgttcgcgctgcagcactacggcacccaccgcgtggggttcctcttcgcgcccatcatcctcgcctggctgctctgcatgagcgccatcggcctgtacaacatcgtccgctggaacccccagatctaccaggcactcaaccccgtctacatgatcaggttcctcaggaagaccaagaagtccggctggatgtcactgggaggaattctgctgtgcatgacaggtaaaaatgaacagtcgctctgtaacaagcagaccatctcgttcgtctgcaactcgcaacaacagctgcagatgcagaagaggtggatggatgagcatgaacttaccctgtgtaacgtctatgtctgccattattcgttcaggcttgctttcacttctctagtgtacccttcactgatcctgggttacatgggccaagctgcttatctgtcccagcaccataaccttgacgcaagctaccagatcgggttctacattgcagttcctgagtgtgtacggtggcctgtgctggtgctggccatcttggcgtccgtggtgggcagccaggccatcatcagcgggaccttctccatcatcaaccagagccagtctctgagctgcttccctagggtgaaagtcgtgcacacgtctgacaaagttcatggccagatatacatccctgaggtcaactggatcctcatgatcctctgcgttgctgtcactgttggtttccgtaacaccaagcacatggggaacgcgtctggcttggccgtgatcacggtgatgctggtgaccacgtgcctcatgcccctggtgatcatgctgtgctgggaccgctccccctggctggccctcgccttcttcctcttcttcggctccatcgaggcgctctacttctcggcgtcgctgatcaagttcctggacggcgcgtgggtgcccatcctcctggccctcatcctgctcgccgtcatgttcgtgtggcaccacaccaccatcaggaagtacgagtacgacatgcacaacaaggtgaccctggagtggctgctggcgctgggcgacaagctgggcatggtgcgcgtcccgggcatcggcctcgtctacaccgacctcacctccggcgtgcccgccaacttctcccgcttcgtcaccaacctgccggcgttccaccgggtgctggtcttcgtctgcgtcaagtcagtgccggtgccgcacgtgctccccgccgagcgctacctcgtcggccgcgtcggcccgccgggacaccgctcctaccgctgcatcgtgcgctacggctaccgcgacgtgcaccaggacgtggactccttcgagacggagctcgtcgagagcctcgccacgttcatcaagctggacgcgctgttccgctgcagcgacgccgccggcgaccagcagcgggacagcagctactacgagcgcgagaacgcgctcacggtcatcgggagcaacccgctgcggcgccacctggccctgggctacgacgactcccactcccacgacgacggcgcgtcgtcagctggctctgaccgcgtggacggcatagagctcgccgcggcggcgccggcgccggcggtcgttaagaagcaggtgaggttcgcggtggctccgcccaggagccccggtgtggacgagaccgtgctggaggagctgcacgagctgtgcgaggcgcgcgaggccggcacggcgttcatcctgggccactcgcacgtgaagaccaagcccgggtcgtcgatactcaagaggctggccgtcggcgtcggctacaacttcctgcgccggaactgccgcggcccggacgtggtgctgcgcgtgccgccggcgtcgctgctcgaggtgggaatggtgtacgtgctgtaa

SEQ ID NO: 145122 - DNA, 654 bp, Zea Mays
atgccgttgtgctgcgtagagtgcaagccatgcaacggccagacgggccagtgcttgccgagggggctcttcaagagccggcgccccgcgcagcagctccgccgcgcgctgggcaagatgaaggcgggcggcacccgcaggcggcggggccaccggcccggaagcttcagctccgtccgcgcggtgttctggccgctgatgtccatgcgctccgaggccgacgcccgcccgccggcggacgcggactcccccgacggcaccgtgagcggcggcggggcgcgcgcattgccgccgccgccgtccgcgcaggacgacgggggcggtgcgacggtggccgccgcgcgggtgctcgcagcggcggcggcaggtgacgaggagaaagcgatggtgagggtggggcacgggcacggccacgacgacgtggaggcggcgtgcaggagcttcgagaggcacctgatggagacgctggtggaggagcgggaggtggtggacctgacggacgtggaggagctgctgtgctgctgggagaagctcaggtgcccggccctcgtgcgcctggtgggccgcttctacggcgagctctgcatggacctcttctccccggcccaggacgccgacgtgtggtcttcccactcgggggacacgagcatctga

SEQ ID NO: 145123 - DNA, 1313 bp, Zea Mays
cacaccctgctgcctgcatctcatcgatctcctcctctccgacgacgaccatggctgagacgaccctgctgacgaggaggtccaagcgcatcgctctgcgcgtttcccttgccggagccaaacccagctggcgtgactgggccggcctagcgccgctggcggtggagaagatcgccgaccgcctccgggacgaggacgtggcggacttcatgcggttccgcctggtgtgcaagctgtggatggacggcagcggcatcaggaagcctcgtgagctgggcgcacgcgttatcgaccacagcttccaccctcgccggtggatcctgctgacggatgagaagaaggaggctgatgaggcgacgcccacgcgccgcatgctgctcaacctcaccacccggaagaccatccaggtggatctgccggagctcgccgggcactccgtggtccccggacccgccgcggcgccggagggcatgctggtggtgcgcgacgagaggagtctcgtcgtgcgcctcctcaacccgctcacccgccacgtcgtcgacctcccgacgctgctgacgctgcggcctggaaaccgccgcaggggccccgttcccagctcgttcgccgaggaccacgaggtgacggcggccggcttcgccgacgcgtcgaccatcgtcgtgtacttgggcaacgccaaccagttggtcgtggccaggcccggagacgcgcgctggacgctggtaggtggcctcgaccccgagttcccgctgagatccacggccaccttccagagccgcttctactgcgtggatcgctgccagctcctggtggtggacatggagcgaggaccacgggcgcagctggtggtcgccgccaacctggagcggcggtaccgcacggtgggcatggtcgacgacggcggcaggctcatggcggtgtgcagccgggaccaggtcgtgcgtgccgatgcccgttggatgagctcgctggagacgcgcgtggagctattccatgtggatctgcaggaggagaagctgtcgcggatcgaggacctaggtgagcgggcggttttcgcagggttacgaggcgcggtgcttctgccgagtaccaagtactacttctcggtggaccgtggtacggtgttcttccgcttcggaagctcccaaaggcatttcggtatggatcgtcattgtgtctttaccaccctagatttcggagtggttgcatttttagtcaaagccttggatcggaacggttggagaaggaaagagccaaaatgttatgggagttgtaattatgttggatttttaacgggactgttaagggcttaa

SEQ ID NO: 145124 - DNA, 1472 bp, Zea Mays
cacaccctgctgcctgcatctcatcgatctcctcctctccgacgacgaccatggctgagacgaccctgctgacgaggaggtccaagcgcatcgctctgcgcgtttcccttgccggagccaaacccagctggcgtgactgggccggcctagcgccgctggcggtggagaagatcgccgaccgcctccgggacgaggacgtggcggacttcatgcggttccgcctggtgtgcaagctgtggatggacggcagcggcatcaggaagcctcgtgagctgggcgcacgcgttatcgaccacagcttccaccctcgccggtggatcctgctgacggatgagaagaaggaggctgatgaggcgacgcccacgcgccgcatgctgctcaacctcaccacccggaagaccatccaggtggatctgccggagctcgccgggcactccgtggtccccggacccgccgcggcgccggagggcatgctggtggtgcgcgacgagaggagtctcgtcgtgcgcctcctcaacccgctcacccgccacgtcgtcgacctcccgacgctgctgacgctgcggcctggaaaccgccgcaggggccccgttcccagctcgttcgccgaggaccacgaggtgacggcggccggcttcgccgacgcgtcgaccatcgtcgtgtacttgggcaacgccaaccagttggtcgtggccaggcccggagacgcgcgctggacgctggtaggtggcctcgaccccgagttcccgctgagatccacggccaccttccagagccgcttctactgcgtggatcgctgccagctcctggtggtggacatggagcgaggaccacgggcgcagctggtggtcgccgccaacctggagcggcggtaccgcacggtgggcatggtcgacgacggcggcaggctcatggcggtgtgcagccgggaccaggtcgtgcgtgccgatgcccgttggatgagctcgctggagacgcgcgtggagctattccatgtggatctgcaggaggagaagctgtcgcggatcgaggacctaggtgagcgggcggttttcgcagggttacgaggcgcggtgcttctgccgagtaccaagtactacttctcggtggaccgtggtacggtgttcttccgcttcggaagctcccaaaggcatttcggtgcgttccatgttcgtcgccgtcacacgtgctatatagcttcagtgtggggtaagcttccgcagcgtgtagcttcctatgtcaccaccctccgttatctctactagtccgatcctctccgcgcggccggccggtgctagctaaactgttgttgcagcatgcatcataataatttggtttcatatagccagggaataattcttcgacatatatcgcatgctgctgagtttcagtttgtattttcggttgctcaactagtttcttattaccttggactcagcataactaatgttattgcaacttcattcttgaaa

SEQ ID NO: 145125 - DNA, 3208 bp, Zea Mays
atggcgcacttgggcggccgcgtccagggagccgacggcgggtggttcgtgccctgcgccgactccgggcggtcgctcccgtgggcgaggggcggcgccggcgccggcgcgagcgaaacgctggcggcggtcatggcgaggagggcgccggcggcggcggcgatccggcgggacgcgctgcgcgccgcggaggcggccgccggcgaggtcgtgctgcgcgtccaccccacccgggaggcggagcgccgccgccaggacgtcatcgcctacctcaggcgactcatcggctcctgcctcggctgcgaggtctttgcgtttggatcagtgcctctgaggacgtatctccccgatggcgacgttgatataactgtactggggaacacatggttaaacagtacattcatcgatgatgtccgcagcatgctccagtcggagcaggaaaactgtgacgccgagttcaaactcacaggcttgcagttcatcaacgctgaggttaagcttataaaatgtgttatcgagaacattatagtggatgtctctttcaaccagattggaggggtgtccacgttctgctttcttgagctggttgaccgtcagattgggcagaaccatttgttcaaaaggagcattatgttaataaaggcctggtgctaccatgaaagtcgcatattaggagcacaccatggactgatatctacttatgccttggaaacacttgttctttacatattcaatatgttccacaagtctctgcatggtcctcttgaggcactttataggtttttggaatattttagcaagtttgactgggatcggtatggcattagcttaaatggtcaggttgatttgtcatcattaactgtggaacctacagatgtacaaggcgaatcattgcttggcaaagaattgcaacaaggctatttggataggcttgttgtaattccaaatgagtttgacggatgtggcacacaatttcgccagaagtttttaaacataatcgatccactcaaggcgaataataacctcggcagaagtgtcagcaaagcaaacttttatcgcatacggagtgctttctcatttggagcacagaagcttggtcaaattctcctgttaccatcagagtacattcgtgatgagatttatggatttttcgcaaacacactgaagagacacggaaatggtgaaagaccagacgttgacacttgtagttcattccatccctctcgtggtcccgagagtgcgcttactgaagacggatcgaagtttaaattttgttgcatgaatgagggtgaaaacggaagttcatgtcaatgccattcatcgaaactgcctgacaaggattcgagtgtgacagatgcgcataaaaattcaggtaagtatttgcctggtcttgttcaggatatttcttggaacaaaatctggttcatggaatatgcatctgatttcaaagaacatacatcaactttagcaagcttaagcagccactcaccctgttctcaagataatagtaatggaagcagtgatgagtgcttcgagaattatgcagcagaggaagatttacaccagaatgtgccgcagcagatttatccagagcatccatcacatatattgacaaactcgactagtgcaaatatcttggatttttccagttcttgttttggtgatgagtcagattggactgctccccgcgcaggaaaaaagctactcccacccttcttgctgtcaaatatgctggatctctcaggtgatctggagttgcacttagggtgccttcgcaaagttcagtaccacctggagtcattgtttgatgaactcctgcaggctgttgaagaagcatgtttagctgatgtgctagatgaggattctttcaagatgtcggacattatcttgaagttgaaaactagcactagatcctcaagcctgtcactagtttcatctactgatagcgagagaaggaaactatctcatgtgtattgttcccatagcacaggagacgatttacaactatcacatgctgaggttcaagtggatatggtttggcagcagaatgtgccattgtcccccaacggatcaacatttactccatctccttcaaacaattcagataactatcatgtttcttggttttgtttctctcctacatcgcatggaactggcacatacattcccaacatgagttatcatacatacagggaacgtatgatgcttgaaagagaaaccatacgagcaagaaaacaacgacagaggtttcctgatcgtcggtattactcagctgagcaaggatttgccgattcacaaactgaagacagcgtagctcaaagtggaacaaatcaatcgccgactaagcaaaacagtgcacaacagagtggttattcgagcaagagctcaatttcggatggagattttgttcgtttcaaggagcatgttgcaacaaatggtggaaccaaacaggcagtaggaagagattttgttgagaagggaagacacacaacgccaccatcatctccgccaatgacagtacttttacaaaatggacaaggaaaacctacctgtcagccttcctcacctgtcacagcagatttgttcaatgcggcgaaaagtttggagttcggatccttggggccattctcattgggacttccctcaacctcgacacagtttgaggaagaattcccagcgcttcctactagaaagagagccgaaggccccatttcagtggcgcccagcgctaaggctgttgaaaccaaaagcaggtcagaagagagtgaagagatgttccgactgagaaatgaatctgatttccctcccctccaagctggctgccgctgagactgacaggacgtcgagataatccatgctaatcgtagtggtagaagttaatgacgggacgaggctcggagatacagcaggatgtcggataggtgccccggcaggattttcgtccgacagtgtagcaagtttggatgcttggctactcacctttgtgatgtggtggcaatgtggtgtcgtgtaaaacaataataatcctcatctcacctttatttcattttattagatgaatccttagataaacaacacccagaagtcggagtgagcaatatagtttcgtctttagcatagacagtccaaaaaaattggataggggaagtagaaaatgttccccaaaaaaggaatcgtgattctgtagatttttttaagcttttgattt

SEQ ID NO: 145126 - DNA, 1727 bp, Zea Mays
cccaacgcactccactctctttcagaacccaacacgccactgtcgcggtaacagagcagctagccaagagtagtagccgcgtgcccgcgtgcgcttcccgaaccccgagtcccgaccagagagagatacggagaggagcagacctgcccgtcgcaatggcgatgccaccgaagcccggcgacccgccgcagcgctcgccggcacgtagcccaaacctcaatctcccctgcccgctgccgccggtcccgggcggggcgccgccaccgccgcagcagcagccgggcgccgggctgcccccgccgcgcgtgggccaccaccgccgcgccagatctgaggtggccttccgcttcccggacgacctgcccggcggcgggggcggcggcttcgacgagatcggctccgaggacgacctcttctccaccttcatggacatggacaagatcgccggcgccgaccgcgaccgcgccgccgagacctcctcgccgccgcgcccagccaagcaccgccacagcgtctcctttgacggcttcgggatgggggctgccgccggcggcccgggcggccagcaggacggcggtggaggcatgttcggagaggtgatggaggccaagaaggccatgtcttccgagcagctctccgagctcgccgccatcgatcccaagcgcgccaaaagaattattgcaaacaggcaatctgcagcacggtcaaaggaaagaaaagctcgatatataacagaattggagcggaaggttcaaactcttcagacagaggctactactctttcagcacagctgacactattccagagagacacaactggactttcagcagaaaatgctgagctcaagataaggttgcaggccatggagcagcaggcccaactgcgtgacgctctaaatgatgcactgaggcaagaagtggagaggcttaagatagcaacgggcgagatgtcgaagtccaataacgagcatttcaatatgggaatgcagcacgtttcctacagcccttcattcttccagctctcggagcaacacacagtgcagcagcatggaaacattcagctgccgcaccatttccaacagcctccgctgaatgtcccgagccaccagatgctatcccaccccaactccctctcgaacatggtgcagcaagactctcttgggcgtctccaggggctggacattgggaaaggctccatggctgtgaagtcggaggctgaggtcgtggtgaagtcagagggcagctctatatctgcgggtgaaagcaacaccaccttctagctatacaatacgtctgccttccaagaagcctttgtttggtttagagttcttcttttgttcatagtctgacatccttgaactgcttcctccttccctgtagtttttttttattccattcgttatatctagttaccattgatcggttgtgtcgatcgttgttgttgtcgtggtggctgattctatagggacattggtgtgctggtttcgagtttgttatgtgtgtggtatggttggttgtttcgagctagtgactgaaagggcaccgagtgattttttggcagaatttcttttctccacctgttttagttttgttatagaacaaccatgatttctccttctggaaatgtgtacattgtgttgctatgctaatttctagtaataattttgatgatcccaactgtaccctgctgtgcatgtgcgtgaagtgtgttgtttcaggctatcttt

SEQ ID NO: 145127 - DNA, 1079 bp, Zea Mays
ggggctcgggtcgctcactgaagggtctgaaacgcatggacctgtgcccttggactctagcaagtagcaaccacatgaaagatccatcgagccaccatccccgaactccccatcctcttcttttcagccattcagagtcagcggacaagctcatagccagagagacacaactggactttcagcagaaaatgctgagctcaagataaggttgcaggccatggagcagcaggcccaactgcgtgacgctctaaatgatgcactgaggcaagaagtggagaggcttaagatagcaacgggcgagatgtcgaagtccaataacgagcatttcaatatgggaatgcagcacgtttcctacagcccttcattcttccagctctcggagcaacacacagtgcagcagcatggaaacattcagctgccgcaccatttccaacagcctccgctgaatgtcccgagccaccagatgctatcccaccccaactccctctcgaacatggtgcagcaagactctcttgggcgtctccaggggctggacattgggaaaggctccatggctgtgaagtcggaggctgaggtcgtggtgaagtcagagggcagctctatatctgcgggtgaaagcaacaccaccttctagctatacaatacgtctgccttccaagaagcctttgtttggtttagagttcttcttttgttcatagtctgacatccttgaactgcttcctccttccctgtagtttttttttattccattcgttatatctagttaccattgatcggttgtgtcgatcgttgttgttgtcgtggtggctgattctatagggacattggtgtgctggtttcgagtttgttatgtgtgtggtatggttggttgtttcgagctagtgactgaaagggcaccgagtgattttttggcagaatttcttttctccacctgttttagttttgttatagaacaaccatgatttctccttctggaaatgtgtacattgtgttgctatgctaatttctagtaataattttgatgatcccaactgtaccctgctgtgcatgtgcgtgaagtgtgttgtttcaggctatct

SEQ ID NO: 145128 - DNA, 480 bp, Zea Mays
atgaggctcctaaggaagaaggatgtaccttattacaaggagggtgaatctgcttgtgcaataacaggtgtagttaagaaaggattaccttctactaggggtgaagacatgcaaattaagtgtttgcttgaaatgtatgggctaaagaagaaagtgcgatctgatatcagtgcagaatattggctacataaggaatgtgcatatcgagagaggcaactttttgatttttgggggctgatgtggatacgacatcctttgtccatgtatggaataggatacatcctttcaatggatgctgatgatgttcaccgcaaaaagagatttacagagaggatgtcaagactcgaagaggaagaaaaaaatcaggcaaatatcaggaagaggaagttctttgcagaaattctaaatgcttctagggagcaacaggtgcaattaggcactacattcaagcaaataaagcagagaaatgatgaagtttag

SEQ ID NO: 145129 - DNA, 3523 bp, Zea Mays
cccgcatccgcatgcaccaatcgccaccagcgaccgccccgcggctgtgcctgtgggtgcgcgcgttcgttgtcccctccacgtccaccggaaagctacgcctcccccaccgcctcctctagcgtctcggcccgtctccctctcactctctctcgctctcgctctctctctccgtgggtgatgcgctcagccgacctcttctgaccggcggagtggctgcgctcgccggtcacccatggctatggcgggcgccggcgcggcggcggcggcggccaagaggtgcatgaacccggcctgcggcgcgctgccggcgtcatctgtggtggtcggggcgggaggggactggaggaagggctggccgctgcgatccggaggcttcgccctgctctgcgacaagtgtgggttggcatatgaacagttcgtgttttgtgatatatttcaccaaaaggaatcaggatggagagactgctcattttgtggcaagcgcctccattgtggatgtgttgcttcaaagaactcttatgatctacttgacagtggaggaattcaatgtgtcacttgcatgaaaaattcagcagctcagtctgcttctggacaagtggttccaaagctctttccatgtccaaacaatctgctgttttttggtaaaagcgacgagttattgtcaagcagaaaatttgaacaaccaccctctcttatgttggattccagaaatgatgatattgctattgtaaataagagtagtcacctgttcatggtaagcggcatagaggctggacagagcagtaacatcttgagacaaaaagagatagagaatggtccaaggcagattaaatgggaacaaccaacccttaatattggggacatgggaagacctttactaactaggtctcaaagtgcattagagtcacctcagtgtactcgaagagatgacaataaggatccaactacagatagcacaacaagtgaatcgtttccagaggcatgtctgagcatgaacctaggtattgcaaacaatggaaacaggatggaggctacttcaacagcggaaagacctatgctatcgccaacgacagccattgctgaaggaagagaacttaccactgcactgtccccctttcagcacgcacaaagggctcggcatttcctgaccagaccaccaagggttggtgagggtgcagcttttgatccaactagagacatgtttccgcatcttcgtgttgctaggccacctgctgaaggaaggggccgcaatcaattacttcctcggtattggccaagaataacagaccaagagctgcaacaaatatctggagattcaaattccacaatcgttccattgttcgagaaggtcctgagtgcgagtgatgcaggccgcatagggcgccttgttcttccaaaagcttgtgccgaggcatattttcccccaatttctcaaccagaaggacgccccttgacaattcaagatgcaagaggaaaagaatggcattttcagtttaggttttggccaaataataacagcagaatgtatgtcttggagggtgttacaccatgcatacaatcattgcaattacaagctggcgatacagtgacctttagtcgtatagatcctggagggaaacttgttatgggctttcggaaggccacaaatactgtcagtctgccagactcacagatttcagctattgcgaatggttcccttctcagtgagacactcttttctactgcaaatgaaagcataggagtagtaagtggttatcctggatttcttcactcaataaagggagctgcagatttccatccaagctctctatatgatcatcatattaactcagctgacggggatgtcagttggaataaggcagataaatttggcagcaggccagatgaggggtctttgcaatttctacaaaaacgaagtcgcaatattggttccaaaagcaggaggttcttaatcgacgctgaagatgccatggaactaaagcttacctgggaagaagctcaagagttgttgcgccctgctcccactgcaaaaccaactgttgtgatgattgaggactatgaatttgaagaatatgatgaaccccctgtctttgcaaagagatcaatttttaccatccgtgcaacaggggaacaagaccagtggattcaatgtgacgagtgctcaaaatggcgccggttgcctcttaatgttattgttgcatccaaatggacatgcaccgacaactcatgggacccaaaatgctgctcctgctctgcgcctgaagagttgaccccaaaagagttgcaaagtgttatgcagcagtatgaagaaatgaggaggcgaaagggcagctatggtctgaagctgaatgtcgctgaaatggatgcatccagctttgacgccttggccacgggtgcagtattcggtgaagtcgggaaccaaggtacggcttcagtcgcgacgaccacaaggcaccccaggcatcgccccggctgcacatgcatcgtgtgcatccagccacccagtggcaagggcccgaagcacaaccctgcgtgcacctgcaacgtgtgcatgacggtgaggcgccggttcaagacactgatgatgaggaagaagcagcggcagtcggagcgagaggaggcggaggcaagcaagaagatcgcgtgggtgaacagagacgagcccgaggggagcagcctgtcgagatccccgcagacgctggacacgacccgagacagcagcgatgtcaccatgttcgacaaggtggccgccgacgtgaacaaggggcacatcgacctcaacttccaccctgcagcccctgccgtccgtggcgctggcgaccagggacagaatggcgcgcagcagccccgggcggtgagcatgatgggcctcctggaagtggcgagccggccccttgataactacatgaagcagaacggcctgacgagcctggcgggggagcaaggaggtggcagctccagcacggccacggtcccgccggctccagtggagagtgaggaccggacgtccgatgagggccgtgtcgcgtcagcagagcgggaagcagacgccatggccatcgacgaggccggcgagaaccagcaggacaagcctgccgactctgccgctgccgctgctacttgacggcgtgcgtctgttgtgaaagtgactgatgggtgttgtcagcgtgctttgatgtgcgtatcttatcggctcctcttggtttttttttcttttctttcaggaatagctggtgagtttttgatgtgaaagttctaaactaaatttctgtagggtttcaaggtgttgctcctggaggctggagttacttacgtgtacgtatgaggctgtgcaaccaacccccaggttgtatgttgtagaagttctgtaaaccacgatgctcttgtgttggttgctgctgtaatctaaaaacgcttagacctttggattcaataactcaccacatacttgatctgtactgtacatctcatctaagacatcttttggaaaacaggaatttcacaggagtcacggacggac

SEQ ID NO: 145130 - DNA, 3426 bp, Zea Mays
cccgcatccgcatgcaccaatcgccaccagcgaccgccccgcggctgtgcctgtgggtgcgcgcgttcgttgtcccctccacgtccaccggaaagctacgcctcccccaccgcctcctctagcgtctcggcccgtctccctctcactctctctcgctctcgctctctctctccgtgggtgatgcgctcagccgacctcttctgaccggcggagtggctgcgctcgccggtcacccatggctatggcgggcgccggcgcggcggcggcggcggccaagaggtgcatgaacccggcctgcggcgcgctgccggcgtcatctgtggtggtcggggcgggaggggactggaggaagggctggccgctgcgatccggaggcttcgccctgctctgcgacaagtgtgggttggcatatgaacagttcgtgttttgtgatatatttcaccaaaaggaatcaggatggagagactgctcattttgtggcaagcgcctccattgtggatgtgttgcttcaaagaactcttatgatctacttgacagtggaggaattcaatgtgtcacttgcatgaaaaattcagcagctcagtctgcttctggacaagtggttccaaagctctttccatgtccaaacaatctgctgttttttggtaaaagcgacgagttattgtcaagcagaaaatttgaacaaccaccctctcttatgttggattccagaaatgatgatattgctattgtaaataagagtagtcacctgttcatggtaagcggcatagaggctggacagagcagtaacatcttgagacaaaaagagatagagaatggtccaaggcagattaaatgggaacaaccaacccttaatattggggacatgggaagacctttactaactaggtctcaaagtgcattagagtcacctcagtgtactcgaagagatgacaataaggatccaactacagatagcacaacaagtgaatcgtttccagaggcatgtctgagcatgaacctaggtattgcaaacaatggaaacaggatggaggctacttcaacagcggaaagacctatgctatcgccaacgacagccattgctgaaggaagagaacttaccactgcactgtccccctttcagcacgcacaaagggctcggcatttcctgaccagaccaccaagggttggtgagggtgcagcttttgatccaactagagacatgtttccgcatcttcgtgttgctaggccacctgctgaaggaaggggccgcaatcaattacttcctcggtattggccaagaataacagaccaagagctgcaacaaatatctggagattcaaattccacaatcgttccattgttcgagaaggtcctgagtgcgagtgatgcaggccgcatagggcgccttgttcttccaaaagcttgtgccgaggcatattttcccccaatttctcaaccagaaggacgccccttgacaattcaagatgcaagaggaaaagaatggcattttcagtttaggttttggccaaataataacagcagaatgtatgtcttggagggtgttacaccatgcatacaatcattgcaattacaagctggcgatacagtgacctttagtcgtatagatcctggagggaaacttgttatgggctttcggaaggccacaaatactgtcagtctgccagactcacagatttcagctattgcgaatggttcccttctcagtgagacactcttttctactgcaaatgaaagcataggagtagtaagtggttatcctggatttcttcactcaataaagggagctgcagatttccatccaagctctctatatgatcatcatattaactcagctgacggggatgtcagttggaataaggcagataaatttggcagcaggccagatgaggggtctttgcaatttctacaaaaacgaagtcgcaatattggttccaaaagcaggaggttcttaatcgacgctgaagatgccatggaactaaagcttacctgggaagaagctcaagagttgttgcgccctgctcccactgcaaaaccaactgttgtgatgattgaggactatgaatttgaagaatatgatgaaccccctgtctttgcaaagagatcaatttttaccatccgtgcaacaggggaacaagaccagtggattcaatgtgacgagtgctcaaaatggcgccggttgcctcttaatgttattgttgcatccaaatggacatgcaccgacaactcatgggacccaaaatgctgctcctgctctgcgcctgaagagttgaccccaaaagagttgcaaagtgttatgcagcagtatgaagaaatgaggaggcgaaagggcagctatggtctgaagctgaatgtcgctgaaatggatgcatccagctttgacgccttggccacgggtgcagtattcggtgaagtcgggaaccaaggtacggcttcagtcgcgacgaccacaaggcaccccaggcatcgccccggctgcacatgcatcgtgtgcatccagccacccagtggcaagggcccgaagcacaaccctgcgtgcacctgcaacgtgtgcatgacggtgaggcgccggttcaagacactgatgatgaggaagaagcagcggcagtcggagcgagaggaggcggaggcaagcaagaagatcgcgtgggtgaacagagacgagcccgaggggagcagcctgtcgagatccccgcagacgctggacacgacccgagacagcagcgatgtcaccatgttcgacaaggtggccgccgacgtgaacaaggggcacatcgacctcaacttccaccctgcagcccctgccgtccgtggcgctggcgaccagggacagaatggcgcgcagcagccccgggcggtgagcatgatgggcctcctggaagtggcgagccggccccttgataactacatgaagcagaacggcctgacgagcctggcgggggagcaaggaggtggcagctccagcacggccacggtcccgccggctccagtggagagtgaggaccggacgtccgatgagggccgtgtcgcgtcagcagagcgggaagcagacgccatggccatcgacgaggccggcgagaaccagcaggacaagcctgccgactctgccgctgccgctgctacttgacggcgtgcgtctgttgtgaaagtgactgatgggtgttgtcagcgtgctttgatggtttcaaggtgttgctcctggaggctggagttacttacgtgtacgtatgaggctgtgcaaccaacccccaggttgtatgttgtagaagttctgtaaaccacgatgctcttgtgttggttgctgctgtaatctaaaaacgcttagacctttggattcaataactcaccacatacttgatctgtactgtacatctcatctaagacatcttttggaaaacaggaatttcacaggagtcacggacggac

SEQ ID NO: 145131 - DNA, 2563 bp, Zea Mays
gtccacggccgggtctgcctgcccagccttgcaagttggaagcgccacgtctcccggtcccgaccgccggcccagtcaaaagcaaaccctccggacacggccgcacggggcgcaggtccctctgttgccccgcttggtcgttgctcccgcgcccccgcccgcaaatgcctctcctctcgcgcgccttttcttgtcctgaagccacccaagccgtgcctgcccctcgctcgatctacccccctccttcctcggctagctccaagaacccgtcccacttctccacttcttggcaggtcgatcggccgtgaacgatttcggatcctgtcgcgcgcgcgtgtccatggcgtcgacggcggccaggcggctgcttctgccgctgctgctggtggcgctcatcgcggcgcaccgggcggcggcgcggttcgtggtggagaagaacagcctgcgggtcacgtccccggccgtgctccggggcgtctacgagtgcgccatcggcaactttggcatgccgcagtacggcggcaccatgcacggcgttgtcgtctaccccaaggccgacgccaaagcctgcaggcccttcgccgactccggcctctccttcaagcccaggtccggcggcctgcccgtcttcctgctcgtcgatcgcggagattgctacttcacaaccaagggatggaacgcacagaacgccggagctgcagcagttcttgtggccgacgacagagtggagcctctgatcacgatggactccccagaatccagcggcacggagcacatagagaacatcacgatcccatcggcgctcgtgaccaagagattcggcgaggacctgaggaaagcgctgcagagcggggacatggtgaacgtcctcctggactggagggagtccctgccccaccccgacgagcgcgtggagtacgagctctggacgaacagcaacgacgagtgcggcgccaagtgcgacatgcagatgagcttcgtgaggagcttcaggggcatcgcgcaggctctcgagaagagggggtacacccagttcaccccgcactacatcacgtggtactgccccgaagccttcgtcctcagcaagcagtgcaggtcgcagtgcatcaaccacgggaggtactgcgcgccggacccggagcaggatttcagcaccggttacgacggcagggatgtcgtgctccagaacctggtccagatctgcgtgttcagggtcgccaatgggactcgcaggccgtggatgtggtgggactacgtgcacgacttcgctgtgaggtgcccgatgaaggagaagaagtacacgcgtgagtgtgcgaatggtgttatcaattcacttggactggacatcgagaaaatcaacaagtgtgttggagatccagaagctgataaagaaaatccagtccttaaggcagagcaggacgctcagattgggcatggttctcgcggcgatgtaactatactgcctactcttgtcgtcaacaacagacagtacagaggtaaactggaaaaaacatctgtgttaaaagcagtatgctctgggtttgaggagacaactgaacctgatgtctgtttgcgcgaagatatcgagacaaatgaatgtttggagaacaatggtggttgctggttagacaaggctaccaatgtttctgcgtgcaaggataccttccgtggtcgtgtctgcgaatgccctattgtgaatggtgtgaagtttatcggtgatgggtacaaccactgtgaagcttctggccttggtaggtgccagatcaacaatgggggctgctggaatgagactaggaacgggaagagtgtgtctgcctgctcaaaccaagaagctaaaggctgcaagtgcccagcaggtttcaagggcgacggagccaacagctgcgaagatgtggatgagtgcaaggagaagcttttctgccagtgcaaggactgcgcttgcgagaacacgtggggaagctacgagtgcagctgcggcggcggcaactcgctgtacatcagagagcatgacacttgcatcagcaaacattccagctcgacgccgagctggggcttcctgtgggtggttttcttgggccttgccttggccggagcaggagcgtacgccgtgtacaaatacaggctacggagctacatggattcagagatccgcgcgatcatggcccagtacatgcccctggagagccaagacatgccgagccaacaacaccacctcgtccccgtcgaccgtgcagacgtctgaaacggctaggcttgtttgcatgacatggatcccatcgcatcgtcggcagagaagagaagtcggcggcaccggcatcttcctcccttggtgcgcagaatatggatgctgaaaattcacagtttcacggagcagattaggatctctctccgcagtttagagcccgtttgtcaggtttagagctcgcagtcgtgctgtgccgtgcgtaaaagtaatcgtcgagtgttctgtaaatattcctgttgagacccaacgctgaagcgcgcgtctgttgctgtgctgccctgaataaaagtacagaggatgagaggaatatgtttcttt

SEQ ID NO: 145132 - DNA, 607 bp, Zea Mays
aaaacttagcaatccgtacattccgctcatattcctcaccggtgaccttcctcacctgcgtcagacagagaaagccgagattagcggcggcggcgatggcactcccggcgtcaagctccggcctcttccgcttcgtctccccccgcagccgtccccagtccactgacatcgtggccgctgcctcctggggagtcttcgccggcaccgccggcctttacctcgtccagccatttgactggattaagaagactttcttccagaaacctgaaccagaggcatgagtctccaggcagaaaaatgctgcaaatctgcaactttggtacaccacttttgtccgggatgattcctgatgataactcagcaaataatatgagaccccctcgtctttccttgtttgattttattcagatgtaggcattcctcttgcatgtaatattcacgaggggagtgtgatcatttgacttgtttttcatcacacagagaaactgcttggttcaaccgtgttatatggtcttgatggcatttctaaaatattggtccaagatgcatgtgtttaaaacctgtggcctgattattgtatttgttgcagtcactgtgtccgtataaa

SEQ ID NO: 145133 - DNA, 1017 bp, Zea Mays
atggcgtcttccgctggcggcggcctgcgttcaccggctgctacggcggcgccacgggtggtgatggacagcctgatcgaggtgcgcgagggcgcgaccaggctccagaccatgctgctggaggagtcgcccacgccttcgatcgctgcggcggcggcggcggcgggggccaccagtgaggtcagacagacgcttgacgggatgatgagcagcctgtcaagcgccatgtcggctctggacaccaccggcggcggcggcggcggtcagggacagcagggccggaggaggaagcgaggcggcgcggcggcggccaggtctgggccgctgcggcggagcagcaacaggagaagatcgcacagcccgttcgtgaacacggtcactgctagcacgctcgacgatggcaactcatggcgaaaatacgggcaaaaacgtatccaagagtcccctaatccgaggagctactacaggtgcacgcacagggcagaccaagggtgcagggcgacaaggcaggtccaggcctccgatgccaacccgtcgtcggagttcatcatcagctacttcggccagcacacctgccgggacccctccaccatcccgctcgtcatcccggacgacaccgctccgccgccgccggactgcgcaaacctcatcagcttcggaggatccaccgtcgtcggcggaggcgcatccccgagcgcaaacactactacaactgttccgacgacgatgttgtctcgcttcggctacagctcctctctgccgacgcagacgcaggcgcaggcgcagctcgccgcagccgtggtgggacctccggggacgacgatgactgcctcgtgggctacggtggggtccgcgccggcggagtactggccgggagggacgaccagcgacatggcttgtggccctgctggcacggccagcttcccgtcgtctcctagcagcctcggattcatgaccggctcgccgtttggaaacgccggcgatgacgacctgtttctgtttggcttcgatccctga

SEQ ID NO: 145134 - DNA, 1938 bp, Zea Mays
ttcacctggcattcaaagggatattgatccatttatgcgttgtctatttgttatatatatatttttaatactgccgatgtttacaggtctataggcatccttctagaaccgagactgcattaagggttatctggaatcactcaaagacagtattgggaaagcaatattccacaatggctaaaaaacatttacttctttttgaggctatgcgcaaggaatttcctcaagcaaggtttctgtcaattgctcaaacacaattattgcgtgctcatgatgagatcaagatgtccatctcaagacttcagctcaaagagaaagaggatgatcctagcgctgccaatattgtaactagagaggaactcataccatataatgttcagtttacaagtgaaaaattcatgtcactctcatctttagcccgtgtaagaggtcaactccggtacttaaagggattggcggtatgtaacaagaaaacacataaccagcatgatgaatcactggctaaagcaggcgatgctgttgatacagctacttcatgttcagccacagggcaaactgtttctgattttcgtaatgaaccatgcccgatatgccaggagaaggtttttgaccagaaaatggttttccagtgtggtcattttgtatgctgcaagtgttgtctttacatgacagaacaaactgcagcacaattcggaaagcgtaaacaatggattatgtgccccacatgccgccagcgaacagatattgagaacattgcttttgtagttgagaaaccttgggacaaacatgaaaagagcattgaagatttggctgaaagcactatttctgtccaaggttcatatggaacaaagtttgaagctgtcacaagaagaatcttgagaatcacttcaactgatggaacagctaaagttcttgttttctcaagttggaatgatgtactggacgtactagagcactcccttgctgctaacaacatttcatatgttcggatgaaaggaggaagaaaatcacaggcagcactctcccaattcaagggtcaggagagcaatataaatgtagataaagtgaacagggcagcctgcaaaatgcagcctgttcaagtacttctgatgcttatacagcatggagcaaacggtcttaatctactagaggcacagcatgttattctagtggagccattactaaatcctgctgctgaggcacaagctatcagcaggatccatagagttggacaagacaaaagcacatttgttcaccgttttatagtgaagaaaacaatagaagagagcatctacaaattgaacaggagcagagctgtctgctctactataaaccgtaaatccaaaaacttcaaagatgagcctgttttgacgctgaaggatgtggagtcgctattcccgatggcaggacctgatgaacccctagaacaggcagatcaaaattacggcgatagcttgaggagtttgcctccatctgttgccgctgggttagctgctgaaagaaggcgactaatggagcaataagttaatggagtttgcctccatctgttgccgctgggttagctgctgaaagaaggcgactaatcaagggacctccatccatcgttgtggcagttgtgctaattttacttgatcagaatttctcttcgcagcacagtaacgacagtaggagaatgatgctccttagttatgaagcacccccatcatgagaatcaggctatttacgttgtaactttaggattttttttttatgtacctgtaggccttttagactcttgtacataagcttctagttttagttcgtttatacggcccatcctgtagttttgatgtagcagctctcagctctgccactgctacaccaacttatggcatgtataagtgtactaatacatggtcatcagcatgatacattctttagatgcttggtcaatttttt

SEQ ID NO: 145135 - DNA, 2898 bp, Zea Mays
atggacttgtttgcaatttcaccgcggttctattacacgcaaagacctcctggccgaccaatcgtggatgaacgacccagattgaataaccgaaccaattcaaatgctttgctaaatgtttacctctccaatgacgacattgccaagctcctagtcccactgctgaaacttcggcaggcatgttgccacccacaagtggggagttctggtctctgctccctgcagcataaccctttgtcaatggatgaaattttacaggttcttattggtaaagcaaaaattgaaggagaggaagagctcaggaaaattgtagttgccctgaatggtcttgctggattagctgttattgaacaaaggaaccaagaagccatttctttatacaaagaagcactagcattggctcatgaaaatattaatgatttccgtgttgaccctctgttgaatcttcatatcaactacaatcttgcagaactgcttagaattagttctgagtatttacaagaatgcccattaaaaaatccggcttttgaagttgcaatcagccgaaaaagaaaggaaatagatactgttgagacaaatgtacttagtgtaaaacgaaataaaatatgtgaaaacagtgttttgagtttgacagctaatgggctagaaatatctgaagataaaaacactattggacaaacatgcatgactagagatgtggatgtggagaatgtcactgggtgccactcatcatttgaatgttttgctgatgactgcttgaggaagacttgcaatacaatcacagaaaaatacctgtcaacttttacttcaaggctggtagtagcgcagaaggattttaatgcatcattcacagaggtcttgaatatcactaaagagctacagagtgagtatatgaattggtggctgtatgctttggactgcattgaagagaacaacatttctgctgacgatctgatcaagaagattgataattcttctagtaagagcaccactggtttgggttcatggggaatatcttccaggtctgcagcaaacttgttttaatattctccatgggttaaaagtattgctggcttaaaatatgcaattcaagctgatattgattctctacaaagttcgaggcaacatcttatggatagacttctggaagttgacaaaacaatggctaacccaagggatgaggacattgagggccagcgatattgtccaaactgctatgatggcactggttctctatgtatccagtgtgagctagatgaactctttcagaggtatgaatcacgcctgtttcttgttaagaaatcgaacaatggttctgtcattgattcagtagaagaagcacatgatctactgaggcgaaaatatgagctcaatcacttcttccgtaatagaaaatccaaggagggacctgaacctgactatgacaataacaaccctaggtcagctcgagaaaacatacaggtctataggcatccttctagaaccgagactgcattaagggttatctggaatcactcaaagacagtattgggaaagcaatattccacaatggctaaaaaacatttacttctttttgaggctatgcgcaaggaatttcctcaagcaaggtttctgtcaattgctcaaacacaattattgcgtgctcatgatgagatcaagatgtccatctcaagacttcagctcaaagagaaagaggatgatcctagcgctgccaatattgtaactagagaggaactcataccatataatgttcagtttacaagtgaaaaattcatgtcactctcatctttagcccgtgtaagaggtcaactccggtacttaaagggattggcggtatgtaacaagaaaacacataaccagcatgatgaatcactggctaaagcaggcgatgctgttgatacagctacttcatgttcagccacagggcaaactgtttctgattttcgtaatgaaccatgcccgatatgccaggagaaggtttttgaccagaaaatggttttccagtgtggtcattttgtatgctgcaagtgttgtctttacatgacagaacaaactgcagcacaattcggaaagcgtaaacaatggattatgtgccccacatgccgccagcgaacagatattgagaacattgcttttgtagttgagaaaccttgggacaaacatgaaaagagcattgaagatttggctgaaagcactatttctgtccaaggttcatatggaacaaagtttgaagctgtcacaagaagaatcttgagaatcacttcaactgatggaacagctaaagttcttgttttctcaagttggaatgatgtactggacgtactagagcactcccttgctgctaacaacatttcatatgttcggatgaaaggaggaagaaaatcacaggcagcactctcccaattcaagggtcaggagagcaatataaatgtagataaagtgaacagggcagcctgcaaaatgcagcctgttcaagtacttctgatgcttatacagcatggagcaaacggtcttaatctactagaggcacagcatgttattctagtggagccattactaaatcctgctgctgaggcacaagctatcagcaggatccatagagttggacaagacaaaagcacatttgttcaccgttttatagtgaagaaaacaatagaagagagcatctacaaattgaacaggagcagagctgtctgctctactataaaccgtaaatccaaaaacttcaaagatgagcctgttttgacgctgaaggatgtggagtcgctattcccgatggcaggacctgatgaacccctagaacaggcagatcaaaattacggcgatagcttgaggagtttgcctccatctgttgccgctgggttagctgctgaaagaaggcgactaatggagcaataa

SEQ ID NO: 145136 - DNA, 1794 bp, Zea Mays
atggggaggaagaaatcgagaccggttcgagctgcgggcgccgcctttgcggcggctgaggccgacccctgtgcgccgagccctagcggcagcacgaagcgtaggaccaagggcgaggcgaggagagacgtctgcgtggaggtggataggagcacgtggggtcacgccgacatcgagcaccgcgacgtcgccgaggtggtcctccgcgacgtgagcgtctacggcgacggggatggggaaggtgcgttggaggaggcattcggggcgtcgacgttctcgttgcgtctgcgggtgcgcgacgcgccggaggaggggttcaggatgggccagtggcccgttgtagagtcggattgcgtgctcctggagtatgtcgtccacgggggccgtgaagggaagcacgcagaatatgtggtctcaggatgttttgatggtcctgatgaaggtgtatcgggtctcgtccatttggtgagcttgagattcatcacgctccgggtccaatcgttcagagcatttcagcatatgggtgaggtgagagttgagtcgtttagggttagagtggaggtgatggaacaggctttcagtgcgtgcggttcgctgctggaggtggctagacatccatggaggaagagtttgatgaatgtgattgcttggctgcgtcctgaggtcacgacatcagctgcgatatatgggttggataaccttggtgtgccaatggatgatggtggtaatgctgatttggtacctaagagtgattcacagtttgatcttgctgctttttatgaggccattaagccttcggctaatgcaggacagttggaaagggaccttcctgatttaattcctcagctcagaccatatcaacttcgcgcagcgcattggatggttcaacgtgaaaacggaaatacgctccatcaagaatacgctaattctgcaccatattgtgttccttttgattttgttcacaagaattccaggatgttctacaatccgttcaacggaaatatttcatcgcaaccagagccttctccaccttacatctctgggggcattttggctgatgaaatgggcttggggaaaactgtcgagcttttagcgtgcatttttgctcatcgtagaccaatttcattagacttttctgtcttccagaacaaaaccgaaatggatcaaattaagaggcagaaagtagaaagggttgagtgcatctgtggtgctgcgagtgaaagttctgcatacacgggtctatgggtccaatgtgacatttgtgatgcttggcaacatgctgattgtgttggttactcacccaagaggaatatactttttgctgataccactgaagatgtagtatcaacaaacaaaaaaagcaccatgaagtctggatttagaaggaaaaagaaacccaggtgttctattgttgagacagaagacaaatacatttgtgcactgtgcttggagcttattgaagcaactcaaactaatatactcagccatgctacattgatagtatgtcccgcaccaatattggcacaatggcactctgaaattacccgacacacaaggccaggatctctgaaagtttgcatttatgaaggtgcaaggaacttggatccttctaccatccaaaaaaatgatatgactgaaataattactgctgatgttgtcttgacaacatatgatgtcttgaaagaagatctatcacatgattttgatcgtcatgatggcgatcgccgtttcttgagatttcaaaagaggcaagtcatgtttagttttcacttttcacaacgaaggttaacatga

SEQ ID NO: 145137 - DNA, 2826 bp, Zea Mays
atggcctcaccctccgctccgccgcccctcttcattttctattgctcccccggtgccggccccggtctccacccacgtatccgcggaggcggaggagctgccgctcagcgaactcgacgcgcccatcccgtctcccccctggcgattcattcggccgcccaaacccacagggagtcggagccggaggagggaggcgttctggagtccgtccaaggagcagttggcgacgacggaaggcgcagcacacgagcaacgtacgagggaaaggggaaacaaagagccttctccgatcgtcgccagctagctacccacctgtcctccggatgtcctggagttctgcatgcccatggaaaattcagttcgccgcgtgagatgcccgaggtgccacagcgttctcgaggagcccagcgcgccggtgtaccagtgcggcggatgcggcactagccttcgagcaaagaaccgtaccggcaccggcaccggcagcacgggagacgcggccggggcgtcgccggcgcggagctggctgcctcctcagagcaggcacctggacgccagcgacgtcgcgagcaccagcaggtccagcaccccgacccctcctcgtgtcgccagcaccagcaggtccggcaccccgacccctcctgacgtcgggaccagctggcaccgagacaccgacgcgacaggcacccggcatggttccggtgatctcgctctcgtgtcggccgggacgcgtgggtccggtgacgtcgcgagcaccagcagtactcctgttgccaccgcgagaagcaggcgccgccaaggcaccgacgcgacgagccgtggctccggcgacgttgccagcaccagcagtactcctgacaccaccgcgagaatcaggcgccaagacaccgacgcgacgacccgtggctccggcgacgttgccagcaccagcagcacacctgacgccagtgccgacacgacgagacggggcgagtccggtggtcccgtgccggcgaggaatcgtgtccctgagcaagcggcagcggcactgatcgagaaaagagggcgcgaacagagcgcggccggtcaggaagtccgtgacgactctgaaggccgcggaacacgagatgccagtggtgcggagtccggcgtcggtggtgtcggcttctccggaggaaacagagatgccactcctgaattgcaggatgacacggagaaggggatgaaacgccatgacgaatctaacgatgctgcgagaaaggaacgtcgtggtgaagctgcagagcagccgcgttacgaccatgaccgacgccaagaacttgcaccgaaatcatcggctcaacccgcggctgctcagcttgcacgcgaagatgaagctgctactgccggagaaaaggcgccgagcccttctcgccacgaggttcaagaggaacatctgcggcccctgcggaagaagattctgaagacggtggatgagctgaaaggcgatctctctgaacttttcagcaagtcccccgagctcaacgcgccacgcgcgcgccctcctcgtcttcccaggcaagaagcctacgtgtcccacgcggtggcgggggcggcctcgggcctccctgccagagctcgccacgtcgcttctgctgccgaaggtcaccgtggcagcgtagctcgtgcggcgaagccccgtccagccgcggctcctccccgtggcttgccatcccggcgctaccgccagtgcagagcgcacccgtgctgccatgacgtggatccgaggccgtgccatcacgggcacggctgctgcggccaccacggcaaaccggagtgcagcagctgccgaggatactgctgcaggcccagagcgctggagccgtccgcgccgcggaagcccccggcagccaaggagcccaagcggcggctgccgccccgcaaccactgccggccagtactgaagggcgcgccgttcatcgtgtgctccagctgcttcaagctggtgcaggtgcccgccgacttcgccgtctcgaccaggatggtgcgcaggatgcggtgcggctcctgctccaccgtcctctcctactcctacagggacccggccaggaagaaagcctaccaggactcggtcaatcggtgcagcacagacggctccgagctgcacggcggcacaggcgaccaacggtcggacccgttcgcgccgttcatcgatggcttcggcctcagcagctactcgacggaggacgagcggcggctgcccgtctcgaggaacacgtcgttcgacaccctcgacgggacgaaaggcgtgggacggctgcaccggctgatggggtacgggtcagctagcgagctgctgcggcactcccctgacctgtacgagagcttcagtgagcgaacgacgcctgacgtgagacagcacgacacgaaagggaaaggcgtttgcatcgacgatgacgactacgactacgacttggatgacactgacgatgaagacattggtgcgctgaagagatcagcgaggaaagggtccggctggacgctcccatggattcccggcaagcggcaaggggactcgggagccatcaggatcaagtaaatagcaggaaaggcctgtgtatattgcaggaataggttcgggttttggaattcgaattggaatttatttcatagttttgctattccttttaggcgcactattggatttataggctgtttgtttgccattttttgaagcgtgaaaaatgctgttcaatgaaatgtaaatatcctgcgatgagtctcagaaagaataacattatggactttttaaggaacaagaaaaatcgaggtgcctagtgaagaaacagacgttctaatgcaatattgcaa

SEQ ID NO: 145138 - DNA, 192 bp, Zea Mays
gtcttcgtccagcactcgtcgaagttggcgatacaggtaagcccggcgacgttcggccgaaagctcggctggatctgccgggcctccagcttcctccagttgattggcttgaaccacttgtggttttttatctcgttgctgcctccggggcagctgcccagccgcttgttgggttccttgtgtagcagctaa

SEQ ID NO: 145139 - DNA, 1406 bp, Zea Mays
ggtagacgtttttccgttgcattaccgagacgatctccgaggagtatatagaaatggaaaagataaggcgaacgatgtccacctagaaaccctagttcgaacgcgccgccgtcaccgtcgtcgctcgcgctctccgcccggatcggagcgagagtaggggcgtgtcggcggtgaaagcgactgcgtcagccatggcggacgaggagcattcggagaggagagaggaggcctccgagcttgcccccttcgacccgaccaagaagaagaaaaagaagaaggttgtcatccaagaaccttctgatgaagtggacaagcttgcagagaagacagaaacactggcagtcgcagaacccgctgaacttaacttcactggaatgaagaagaaaaagaagaagccggtggatcttgattcaactcttgatgagcttggagatggggaggacactcaagatgatcaagctgtagaggaacaaggggaaggcattgtgctgggaagtgtccctacatacccttgggagggaactgatcgggattataaatatgaagagctgctggacagggtgttcaacattctacgtgagaacaacccagatcttgctggggataggcgtaggaccgttatgaggccaccacaagttcttagggagggaacaaagaagacagtttttgttaactttatggatttgtgtaaaacgatgcataggcaacctgagcatgtgatgatgtttttacttgctgaaatgggaacaagcgggtcacttgatgggcagcaaaggttggtgatcaaaggaagatttgcccccaaaaactttgaagcaatcctgaggagatacatcaatgagtacgtcatctgcaatggatgcaagagccctgataccattctgtccaaggaaaatcgtctgttcttccttcgctgcgaacagtgtggatcttcaaggtccgttgctccaatcaaagctggattcgttgctcaagtcggtcgtcggaaggcatgagcatctatatgtggatggtgttggggtcaataccaactcaacaatagttgattatttgttgactagagattctgcggcgcaatgttgagcaagatatatcaacgatgccctttgtctgcattcaaaggattcatctattgatgtcacaagcctatgaaaactggcgagtgtgaatcctgatctacgactccctgcgatcataatcctgtgactgctggttagtgtcaaatgcagtctgttaaacttcttgatgcggtcactaatacaagttcatcaaagttttgtccgaatgccataattctgtcataaaatttactttctctgtaatacacaatgaatctaagtgtttacttcattattcgatccttggaattcagctgattcattcaaacaaacattctctttagcttc

SEQ ID NO: 145140 - DNA, 1461 bp, Zea Mays
ggtagacgtttttccgttgcattaccgagacgatctccgaggagtatatagaaatggaaaagataaggcgaacgatgtccacctagaaaccctagttcgaacgcgccgccgtcaccgtcgtcgctcgcgctctccgcccgtgagtctcgcgtcgatccagtggaaccagcgccccgctctggatctaaccggcttcgtgccgtcgcagggatcggagcgagagtaggggcgtgtcggcggtgaaagcgactgcgtcagccatggcggacgaggagcattcggagaggagagaggaggcctccgagcttgcccccttcgacccgaccaagaagaagaaaaagaagaaggttgtcatccaagaaccttctgatgaagtggacaagcttgcagagaagacagaaacactggcagtcgcagaacccgctgaacttaacttcactggaatgaagaagaaaaagaagaagccggtggatcttgattcaactcttgatgagcttggagatggggaggacactcaagatgatcaagctgtagaggaacaaggggaaggcattgtgctgggaagtgtccctacatacccttgggagggaactgatcgggattataaatatgaagagctgctggacagggtgttcaacattctacgtgagaacaacccagatcttgctggggataggcgtaggaccgttatgaggccaccacaagttcttagggagggaacaaagaagacagtttttgttaactttatggatttgtgtaaaacgatgcataggcaacctgagcatgtgatgatgtttttacttgctgaaatgggaacaagcgggtcacttgatgggcagcaaaggttggtgatcaaaggaagatttgcccccaaaaactttgaagcaatcctgaggagatacatcaatgagtacgtcatctgcaatggatgcaagagccctgataccattctgtccaaggaaaatcgtctgttcttccttcgctgcgaacagtgtggatcttcaaggtccgttgctccaatcaaagctggattcgttgctcaagtcggtcgtcggaaggcatgagcatctatatgtggatggtgttggggtcaataccaactcaacaatagttgattatttgttgactagagattctgcggcgcaatgttgagcaagatatatcaacgatgccctttgtctgcattcaaaggattcatctattgatgtcacaagcctatgaaaactggcgagtgtgaatcctgatctacgactccctgcgatcataatcctgtgactgctggttagtgtcaaatgcagtctgttaaacttcttgatgcggtcactaatacaagttcatcaaagttttgtccgaatgccataattctgtcataaaatttactttctctgtaatacacaatgaatctaagtgtttacttcattattcgatccttggaattcagctgattcattcaaacaaaca

SEQ ID NO: 145141 - DNA, 2494 bp, Zea Mays
tgggaaccaccccgtctcccgtctccgtctgccgtgccgtccccactcccctccgccccaacaacaaagcctctgcctgcccaccagcagcactgaaccagcaccagcgcaaatcctcgcccctgccgacacgggcgcgccacgcccgagccctaagcccgcacgcgcattcgccgggctcccgctgcgccccgccccgccctccgctctgtaccggcgccaatcgccggcggagggttgcttaccttgactgatataggcaattgagtatgctgctactttaatttgcccgtggaaattcatcagatggattgtctcaaccttaggacatctttccgtgttctgctctcgatacagttgctgctatcatcgttcagtcccttgattgtagcgaacttatcttcggagaagcaagcccttcttgactttgtctctgcagtctatcatggaaacaagctcaactgggataaacatacctcagtttgttcatggcatggcgtaaaatgctcagaagatcagtcacaagtttttgaattgagggtaccggctgctggtcttatcggagtaatttctccaaacactcttggcaagctttattctcttcaagtactgagcctgcggtctaatcgattgaccggaagtcttccagctgatgtggcctcccttccgtctttacgttccatatacctacagcacaatgaactttcaggagggttgccttcttccttcagtcctaacctcagtgtaatagatttctcctacaattccttcacaggagaagtacctgcaagtttacaaaacctcactcagttaaccgttcttaatttgcaagataactctttctctggatccatccctgacctcaagcttcacagtctgaaactattaaatctgagcaacaatgaactgaaaggctcaattcctcgatctctccagaaatttccaaagggttcattttcaaggaatcctggactgtgtgggctacctctagctgaatgctcacatccttcaccagcacgctcacctgaatcatctccatcgcctcaatctccacctttgacacatcatgataagaaactaggcacgggtttcatagttgcagttgctgttggtgggtttgcattgctgacgctaatcgtggttgtgtgcttttcaaagaggaaaggcaaggacgagattgatgtggaatccaaaggaaagggtactgccaccaggagcgagaagccgaagcaagaattcagtagcggcggccaaattgctgagaagaataagttggtgttcttggagggttgcacctatagctttgacctggaggatctactgagggcttctgcagaagtccttggcaagggtagttatggaactgcttacaaagctgtactcgaagatggtactgtcgtggtagtgaagagattaaaagatgttgtggcagggaaaagagagtttgagcagcagatggagctcatcgagaggttgggcaaacatgcaaacctactcccactacgcgcctactactattccaaagacgagaagctcatcgtctatgattatattgacactggaagtgtttcggccatgttgcatggtatccggggcgttaccgcgaagacaccgttagattggaactccagaatgaagatcatccttggaacagcatatggaattgcacatatacattcagaagggggcgcgaagctcacccatggcaatgtcaagtcaaccaacgtactcgtagaccaagatcacaatccttccgtctcggactatggcctcagcgctctgacgagtgtgccggtcaacgcatctcgcgtcgtggtcggctaccgtgctccagagatagtcgagaaccgcaagatcacccagaagtccgacgtctacagcttcggcgtcctcctcatggagatgctcacagggaaggccccgctccagacgcaggggaacgacgacgtcgtcgacctgccgagatgggtgcactcggtggtccgggaggagtggacggccgaggtgtttgacgtggagctgatgaagcaccagaacatcgaggaggagctggtacagatgctgcagatagccatggtgtgcactgccaagtcgccagaccggcgcccgacgatggaggaggtgatcaggatgattgaggggctccgccagtccacctcggagagccgcgcgtcttctgatgagaaatccaaggagtcgaaccctccatcggtgtaaatcctgcgcagctcccttcgtccgcttgatcggttgttgttgccagttgcacctcatttgatttgttagctaatttatttatgattgagtttcttgtaaaccgtggttagcatctgctgcatttagcctcagatagaaagaactgagctttcttattgatagtctgaaactctgtttcatggcgagcgtagaattcttccgctggaaaattgaaattgttagcctgctcgattgcaaatcctttttatacagttgcatctatcagaccatttgacaa

SEQ ID NO: 145142 - DNA, 2930 bp, Zea Mays
atggacgcctacgaagccaccaaggtggtgttctcgcggatccaggcgctggacccggaccacgccgccaagatcatgggcttcctgctcatccaggaccacggcgagaaggagatgatacgcctcgccttcggccccgaggcgctgctgcacaccgtcatggccaaggcgcgcaaggacctgggcctgctcccgtcgccaggcccggggacgcccacatccgtcaccgccgccgcaacgcactcgccgttcctcctctcgcgccagaactccgggcgctgcggcgccggcaccgcgccgtcgccgctctcggtgtcgtcgccctcgtcgtgggcgccgccgccccacttctccaggaccaacagcgtcgtcagcaatggcgcgccggcggaggccttggccgccgacctcatgagcccggccgccgccgggaacgcgccgccgtcgcccttctttgccgccggggaaccgctcctcgacgagctccagctgcaggagcagctcgcgttcctcagcgacgccgccgccggcggccaccagctgcccctgttcgacgccagcgagtgccggagccccggctcaggagacgccgccgggttcttcccgtacggcgccctcgggtgggccaacggcggcccggggcaccgccggagctcgtcggtcagcgagctctgcctcggcggggccgacgggctcggctggaagccctgcctgtactacgcccgcgggtactgcaagaacggcagcgcttgccggttcgtgcacggcggcctcaccgacgacgccaccgctaagatggacaccgccaccttggagcagcagtgccaggacatcctgctccgctccaagtcccagcgccttgccgccttcccctactccccgaccggctcggtcccgggctccccgtccgcggccaccaagtgcctgagcttgctcttgcaccagcagcagcagcagaacgagaaccagagggtggcagctgcagcggccgccgcggcgctgatgctgggcggcgacgacgcgcacaagttcattgggcggccgcggctggaccgcgccgacttggcgagcttggtgaacccgggctcgcgccagatttacctcaccttcccggcagacagcaccttccgcgaggaggacgtgtccaactacttcagcatctacggccccgtccacgacgtgcgcatcccgtaccagcagaagcgcatgttcgggttcgtcaccttcgtgtacccggagacggtgaagctgatcctggccaagggcaacccgcacttcatctgcgacgcgcgcgtgctcgtgaagccctacaaggagaagggcaaggtccccgacaagtacaggcacgcctcccccttccttttttcaattcgctctacctacgatcgacatcatgtcatgaccgatcgctccgctgctgctgctctgcaggaagcagcagctgcaaggcgagagggcggtggatttcttctccaacgggttagacggcagagaaaaccacttggatctgcaccagctgggtgcgaggatgctccagcactcgcacagcgcgaacgagatgctgctgaggaggaagctggaggagcagcagcaggccgctgctgccgagctgcagcaggccatggagctccagagccgccgcctgatgaggctgcagctgctggacctgaagccgcgcgcgtcgccgagccccatcggcagcatgcccctgggccccacccaaagggccgtcgactcgccgcccgattccggcagggaggagtcgtccgccggcgacgcgagcccgaacgcggacagcgaccaaaggtggaattagcggctaagcatgcgtcgttatcgccatcatttgttgcgtccgtgtcgcgttttgctgtcgtccagcagcgcagcgaagcaacatctcaccaactgattctccatggggggactccatgcagcgccgagcacaacctgccggacagcccgttcgcgtcgccgacgaggtccgcggccttggctcgcgaccctttcgcggccatcgaccgggagatggctgcctcgcccggtcgtcgaaacggcgccggttccttcgctggcatcagcagcagcagcggcgtcctcgccggccatctgaggccgtcggctctggacatcccttcgccgttcttccccatgtcgatgaccaggctgtcctccgatcacggcgccggcgcgatcgggatgtaaagttatatagtcctcgctgctacttgcctaatcatagaatacttaactagaagcaaaggaaagaagatatagtagtgggagtagtataggagaaacaaaacatcgcagcgtagttcctttttttttactttgtttgtttgtttgtttttttaccatgaaaccaaaggtcagcagatggcagcagcaagcaacagattatagcgcttgctctcctattacattacattacatgatgcatttagcactaattagtagtagttactattaccagcccatctaggtagctgctcctccatgaccatgatatgcacagcagtactaggggggaggaggggtgtgtgatgcacaagaagatgctgctgctacccacatgggactacactggatgcagacagacgtgacagaccagctggtccagcgtgaagatctcacaggattagaagaaacaaacgagtcccggtcccaccagtgtaggtgtcattgaaggaggaccggcccacagcctgctgctgctgctgtgcaaatcattgttggctgcgtcccttcagccctctagcactagcagtagcagcgccggatgcagctcactacaaacaaacaaaaaagttgtgttttttcctgttctttgaattttacttttgcctctgtcgaatgaaatctctactctagttgatacaaagaaatgaaagtggaagatatggaaataatttgctctggtgcttttc

SEQ ID NO: 145143 - DNA, 3385 bp, Zea Mays
aaggggaaggggggcggtggacatggtgactgacagaggcctgtgctgtgtggatcgagtttattataaactggggggccacggcgatctagatctatccgctgccctgccatgccatccctcctcgaccaagaaaaacaaagcgaaatgcgcttggaaatgctccgacccagcagaccttgcttccttccaggaaccactccggaggaaaccggaattcgcgcgcggggtccctcgtcccctccacggggcccggccatccatgccgtcccgagaaagcacaaggaacagtgaagaaagcatcagggtcagggttatagatagatagcgatgcgcgcagcgcgaggtgcgcactcagagctgctccgctccctaccccctactccccttgtagagtagagtagcgtagcgtagcttgcccgacgccgcgacctccgggggcttggctttgggaaatggaccagccgctcactgcccccagtcagtggccgcgcgccgcaccaagtgagctagctactctctaggcggagtgaagcgaagctagcttagctgcctcgagcttgagctgagcttgctcactcttctcccctcttcttctagtaccggcacacacaccgcagctgcgaaaaaggaagctctctctctctggtggtgccggtgcgccgtgcttgcttgcttgcttgcggctgcatccatggacgcctacgaagccaccaaggtggtgttctcgcggatccaggcgctggacccggaccacgccgccaagatcatgggcttcctgctcatccaggaccacggcgagaaggagatgatacgcctcgccttcggccccgaggcgctgctgcacaccgtcatggccaaggcgcgcaaggacctgggcctgctcccgtcgccaggcccggggacgcccacatccgtcaccgccgccgcaacgcactcgccgttcctcctctcgcgccagaactccgggcgctgcggcgccggcaccgcgccgtcgccgctctcggtgtcgtcgccctcgtcgtgggcgccgccgccccacttctccaggaccaacagcgtcgtcagcaatggcgcgccggcggaggccttggccgccgacctcatgagcccggccgccgccgggaacgcgccgccgtcgcccttctttgccgccggggaaccgctcctcgacgagctccagctgcaggagcagctcgcgttcctcagcgacgccgccgccggcggccaccagctgcccctgttcgacgccagcgagtgccggagccccggctcaggagacgccgccgggttcttcccgtacggcgccctcgggtgggccaacggcggcccggggcaccgccggagctcgtcggtcagcgagctctgcctcggcggggccgacgggctcggctggaagccctgcctgtactacgcccgcgggtactgcaagaacggcagcgcttgccggttcgtgcacggcggcctcaccgacgacgccaccgctaagatggacaccgccaccttggagcagcagtgccaggacatcctgctccgctccaagtcccagcgccttgccgccttcccctactccccgaccggctcggtcccgggctccccgtccgcggccaccaagtgcctgagcttgctcttgcaccagcagcagcagcagaacgagaaccagagggtggcagctgcagcggccgccgcggcgctgatgctgggcggcgacgacgcgcacaagttcattgggcggccgcggctggaccgcgccgacttggcgagcttggtgaacccgggctcgcgccagatttacctcaccttcccggcagacagcaccttccgcgaggaggacgtgtccaactacttcagcatctacggccccgtccacgacgtgcgcatcccgtaccagcagaagcgcatgttcgggttcgtcaccttcgtgtacccggagacggtgaagctgatcctggccaagggcaacccgcacttcatctgcgacgcgcgcgtgctcgtgaagccctacaaggagaagggcaaggtccccgacaagtacaggaagcagcagctgcaaggcgagagggcggtggatttcttctccaacgggttagacggcagagaaaaccacttggatctgcaccagctgggtgcgaggatgctccagcactcgcacagcgcgaacgagatgctgctgaggaggaagctggaggagcagcagcaggccgctgctgccgagctgcagcaggccatggagctccagagccgccgcctgatgaggctgcagctgctggacctgaagccgcgcgcgtcgccgagccccatcggcagcatgcccctgggccccacccaaagggccgtcgactcgccgcccgattccggcagggaggagtcgtccgccggcgacgcgagcccgaacgcggacagcgaccaaagcgccgagcacaacctgccggacagcccgttcgcgtcgccgacgaggtccgcggccttggctcgcgaccctttcgcggccatcgaccgggagatggctgcctcgcccggtcgtcgaaacggcgccggttccttcgctggcatcagcagcagcagcggcgtcctcgccggccatctgaggccgtcggctctggacatcccttcgccgttcttccccatgtcgatgaccaggctgtcctccgatcacggcgccggcgcgatcgggatgtaaagttatatagtcctcgctgctacttgcctaatcatagaatacttaactagaagcaaaggaaagaagatatagtagtgggagtagtataggagaaacaaaacatcgcagcgtagttcctttttttttactttgtttgtttgtttgtttttttaccatgaaaccaaaggtcagcagatggcagcagcaagcaacagattatagcgcttgctctcctattacattacattacatgatgcatttagcactaattagtagtagttactattaccagcccatctaggtagctgctcctccatgaccatgatatgcacagcagtactaggggggaggaggggtgtgtgatgcacaagaagatgctgctgctacccacatgggactacactggatgcagacagacgtgacagaccagctggtccagcgtgaagatctcacaggattagaagaaacaaacgagtcccggtcccaccagtgtaggtgtcattgaaggaggaccggcccacagcctgctgctgctgctgtgcaaatcattgttggctgcgtcccttcagccctctagcactagcagtagcagcgccggatgcagctcactacaaacaaacaaaaaagttgtgttttttcctgttctttgaattttacttttgcctctgtcgaatgaaatctctactctagttgatacaaagaaatgaaagtggaagatatggaaat

SEQ ID NO: 145144 - DNA, 2957 bp, Zea Mays
aaggggaaggggggcggtggacatggtgactgacagaggcctgtgctgtgtggatcgagtttattataaactggggggccacggcgatctagatctatccgctgccctgccatgccatccctcctcgaccaagaaaaacaaagcgaaatgcgcttggaaatgctccgacccagcagaccttgcttccttccaggaaccactccggaggaaaccggaattcgcgcgcggggtccctcgtcccctccacggggcccggccatccatgccgtcccgagaaagcacaaggaacagtgaagaaagcatcagggtcagggttatagatagatagcgatgcgcgcagcgcgaggtgcgcactcagagctgctccgctccctaccccctactccccttgtagagtagagtagcgtagcgtagcttgcccgacgccgcgacctccgggggcttggctttgggaaatggaccagccgctcactgcccccagtcagtggccgcgcgccgcaccaagtgagctagctactctctaggcggagtgaagcgaagctagcttagctgcctcgagcttgagctgagcttgctcactcttctcccctcttcttctagtaccggcacacacaccgcagctgcgaaaaaggaagctctctctctctggtggtgccggtgcgccgtgcttgcttgcttgcttgcggctgcatccatggacgcctacgaagccaccaaggtggtgttctcgcggatccaggcgctggacccggaccacgccgccaagatcatgggcttcctgctcatccaggaccacggcgagaaggagatgatacgcctcgccttcggccccgaggcgctgctgcacaccgtcatggccaaggcgcgcaaggacctgggcctgctcccgtcgccaggcccggggacgcccacatccgtcaccgccgccgcaacgcactcgccgttcctcctctcgcgccagaactccgggcgctgcggcgccggcaccgcgccgtcgccgctctcggtgtcgtcgccctcgtcgtgggcgccgccgccccacttctccaggaccaacagcgtcgtcagcaatggcgcgccggcggaggccttggccgccgacctcatgagcccggccgccgccgggaacgcgccgccgtcgcccttctttgccgccggggaaccgctcctcgacgagctccagctgcaggagcagctcgcgttcctcagcgacgccgccgccggcggccaccagctgcccctgttcgacgccagcgagtgccggagccccggctcaggagacgccgccgggttcttcccgtacggcgccctcgggtgggccaacggcggcccggggcaccgccggagctcgtcggtcagcgagctctgcctcggcggggccgacgggctcggctggaagccctgcctgtactacgcccgcgggtactgcaagaacggcagcgcttgccggttcgtgcacggcggcctcaccgacgacgccaccgctaagatggacaccgccaccttggagcagcagtgccaggacatcctgctccgctccaagtcccagcgccttgccgccttcccctactccccgaccggctcggtcccgggctccccgtccgcggccaccaagtgcctgagcttgctcttgcaccagcagcagcagcagaacgagaaccagagggtggcagctgcagcggccgccgcggcgctgatgctgggcggcgacgacgcgcacaagttcattgggcggccgcggctggaccgcgccgacttggcgagcttggtgaacccgggctcgcgccagatttacctcaccttcccggcagacagcaccttccgcgaggaggacgtgtccaactacttcagcatctacggccccgtccacgacgtgcgcatcccgtaccagcagaagcgcatgttcgggttcgtcaccttcgtgtacccggagacggtgaagctgatcctggccaagggcaacccgcacttcatctgcgacgcgcgcgtgctcgtgaagccctacaaggagaagggcaaggtccccgacaagtacaggaagcagcagctgcaaggcgagagggcggtggatttcttctccaacgggttagacggcagagaaaaccacttggatctgcaccagctgggtaaggcattatcatctgttgcaaaatgacgatggagtgtttgaggactgatgctcgccgccgtcaggtgcgaggatgctccagcactcgcacagcgcgaacgagatgctgctgaggaggaagctggaggagcagcagcaggccgctgctgccgagctgcagcaggccatggagctccagagccgccgcctgatgaggctgcagctgctggacctgaagccgcgcgcgtcgccgagccccatcggcagcatgcccctgggccccacccaaagggccgtcgactcgccgcccgattccggcagggaggagtcgtccgccggcgacgcgagcccgaacgcggacagcgaccaaagcgccgagcacaacctgccggacagcccgttcgcgtcgccgacgaggtccgcggccttggctcgcgaccctttcgcggccatcgaccgggagatggctgcctcgcccggtcgtcgaaacggcgccggttccttcgctggcatcagcagcagcagcggcgtcctcgccggccatctgaggccgtcggctctggacatcccttcgccgttcttccccatgtcgatgaccaggtatgttatgtaatgcaaacaacagggtgcccgcagatcgcgcggccgtgtgtgctctccatgatttatttgctcagaggctgtcaatccggtggcaggctgtcctccgatcacggcgccggcgcgatcgggatgtaaagttatatagtcctcgctgctacttgcctaatcatagtaagcacttggtcgtcgtctcccttttgtgagagaaagccatgcatggttatggtgttcttactttggtttcggt

SEQ ID NO: 145145 - DNA, 790 bp, Zea Mays
tttggaccacaggcacctgtacaagacaactcaagttcaacaggacaaccaactgaaccaagagatttctgcagggatgctcttagtacctcaagaataggctatgacacggaagacgataatttggcagatatttctcctcagcaagtaaacaaactggatattctttctctaggtttgcctaggctaaccacagaactgtctgatgatgatataagggaaacaacttatgaggtccttcctgcttctctatttggcagtggaaaagtagacttctctgaagggaaaacggaaaagaaacgtaatttcttgaagggacgaagaactaagactgaaggatcaaagccatcacctcaagtggaagatggctatgcccacattcttgatctgatccgagtacaaatggaggactgggttgtgactgttcctgagggccgtgtcgaggtcttgactatcaccgaaagatacaacacaaaactttgttcactgatgaagtctgacattaaagatgagacctaccattggacccataattatcattttaattttaggttatatgagaagttactttgcagtgtgtttgatattctcgaagatgggcaacttgtagagttttgtttttctttattcactacatatcattgtatcttctctggtatgctttaaaaggatcacaccctgctaccacatagctgatttgttcatggacatcagtgttctatcacgagttcttgaatgtactatctaatttgactaccaggaggctgatgagatactggaaataacaaag

SEQ ID NO: 145146 - DNA, 198 bp, Zea Mays
atgatgaagatgccacctcgatggcactgccaagaggccatgcggcttcgacatatgcaccactgtaggggaccttctttaccaaggtcatctcatggtctggatcaacgccgaatccgtgcacaagtaatgtgtactgataaacaaggtccatgcagatatatggaatgttatccttttggacaccaggaaaggtag

SEQ ID NO: 145147 - DNA, 1699 bp, Zea Mays
caccgtcaccgggtgagtcatcatccaggtagccgttggcgttgggtggtggcctggtgggcgccgctcgctagtagagtagagcctactagccttttgtcctataaaacgcggcggcgggggcagcgcctcttcctcgcaccaccaccgtcactcaacacagcacaggcagctcgagagagagagagagagaaagatgtcgtggttcgggcaccaccaccacaaccagccggctcccccggcgtcgggccccaaccaggtgttcaagatcttctgccgcgccaacgagaactactgcctggccgtccgcgacggcgccgtcgtgctggccccggtcaaccccaaggacgaccaccagcactggtacaaggacatgcgcttcagcacccgggtcaaggacgaggaaggcatgccggcgttcgcgctcgtcaacaaggccacggggctcgcaatcaagcactccctcggccagtcccacccggtgagctacaactacttctgctgctgcctgctgcgtccgtgccttctcttcgtcgccaactctccctcatcatcaagcactccctcggcatgcaggtcaagctcgcgcctttcagcccggaccaggaggacgcgtcggtgctgtggacggagagcaaggacgtgggcaagggcttccgctgcatccgcatggtcaacaacacccgcctcaacttcgacgccttccacggcgacaaggaccacggcggcgtgcacgacggcaccgccgtcgtgctctgggagtggtgcaagggcgagaaccagagctggaagatcctgccgtggggtcccgaggccaactcctccgcggcccacgcgggaggcccgcacgccgtgcgcgtcttctgcaaggccggcggcgaggactacagcctcacggtgcgcaacggcacggcgtgcctggcgcccaccaacccgcgggacgagtaccagcactgggtcaaggacatgcgccacagcacccgggtgcgggacgaggagggctacccggccttcgcgctcgtcaacaaggtcaccggcgaggcgctcaagcactccacggggcagggccaccccgtcaagctcgtgccctacaacccggactaccaggacgagtccgtgctctggaccgagagccgcgacgtcggcaacggcttccgctgcgtccgcatggtcaacaacatctacctcaacttcgacgccttccacggcgacaaggcccacggcggcgtccatgacggtaccgagatcgtgctctggaagtggtgcgagggcgacaaccagcgctggaagatcctcccttggtgaacgaacgaaagaaactactagctggtaccctaataataattctgctggctgcggcgatcccaaaataaaagaggccgggtgcgatgcatctcggacttctcgagtggtgtttgcgtcagacagccagccactgtggggctagtgttccaacatttgtcagcctgcttgcgcgaggaaggggggtcactgactcaagagaagggcctggtcataggctgctgcattatgaatttctgatgatgtcttatgtctgtactctgaatcaactatgtatgagatctcatctcctttctcctactgaatgaatgaatcattattggctttgctttgcttcacctgcttgaaagcaatgcattgtatggattacaaagatatgaccttttcgttgagcgag

SEQ ID NO: 145148 - DNA, 1604 bp, Zea Mays
caccgtcaccgggtgagtcatcatccaggtagccgttggcgttgggtggtggcctggtgggcgccgctcgctagtagagtagagcctactagccttttgtcctataaaacgcggcggcgggggcagcgcctcttcctcgcaccaccaccgtcactcaacacagcacaggcagctcgagagagagagagagagaaagatgtcgtggttcgggcaccaccaccacaaccagccggctcccccggcgtcgggccccaaccaggtgttcaagatcttctgccgcgccaacgagaactactgcctggccgtccgcgacggcgccgtcgtgctggccccggtcaaccccaaggacgaccaccagcactggtacaaggacatgcgcttcagcacccgggtcaaggacgaggaaggcatgccggcgttcgcgctcgtcaacaaggccacggggctcgcaatcaagcactccctcggccagtcccacccggtcaagctcgcgcctttcagcccggaccaggaggacgcgtcggtgctgtggacggagagcaaggacgtgggcaagggcttccgctgcatccgcatggtcaacaacacccgcctcaacttcgacgccttccacggcgacaaggaccacggcggcgtgcacgacggcaccgccgtcgtgctctgggagtggtgcaagggcgagaaccagagctggaagatcctgccgtggggtcccgaggccaactcctccgcggcccacgcgggaggcccgcacgccgtgcgcgtcttctgcaaggccggcggcgaggactacagcctcacggtgcgcaacggcacggcgtgcctggcgcccaccaacccgcgggacgagtaccagcactgggtcaaggacatgcgccacagcacccgggtgcgggacgaggagggctacccggccttcgcgctcgtcaacaaggtcaccggcgaggcgctcaagcactccacggggcagggccaccccgtcaagctcgtgccctacaacccggactaccaggacgagtccgtgctctggaccgagagccgcgacgtcggcaacggcttccgctgcgtccgcatggtcaacaacatctacctcaacttcgacgccttccacggcgacaaggcccacggcggcgtccatgacggtaccgagatcgtgctctggaagtggtgcgagggcgacaaccagcgctggaagatcctcccttggtgaacgaacgaaagaaactactagctggtaccctaataataattctgctggctgcggcgatcccaaaataaaagaggccgggtgcgatgcatctcggacttctcgagtggtgtttgcgtcagacagccagccactgtggggctagtgttccaacatttgtcagcctgcttgcgcgaggaaggggggtcactgactcaagagaagggcctggtcataggctgctgcattatgaatttctgatgatgtcttatgtctgtactctgaatcaactatgtatgagatctcatctcctttctcctactgaatgaatgaatcattattggctttgctttgcttcacctgcttgaaagcaatgcattgtatggattacaaagatatgaccttttcgttgagcgag

SEQ ID NO: 145149 - DNA, 1596 bp, Zea Mays
gggtggtggcctggtgggcgccgctcgctagtagagtagagcctactagccttttgtcctataaaacgcggcggcgggggcagcgcctcttcctcgcaccaccaccgtcactcaacacagcacaggcagctcgagagagagagagagagaaagatgtcgtggttcgggcaccaccaccacaaccagccggctcccccggcgtcgggccccaaccaggtgttcaagatcttctgccgcgccaacgagaactactgcctggccgtccgcgacggcgccgtcgtgctggccccggtcaaccccaaggacgaccaccagcactggtacaaggacatgcgcttcagcacccgggtcaaggacgaggaaggcatgccggcgttcgcgctcgtcaacaaggccacggggctcgcaatcaagcactccctcggccagtcccacccggtgagctacaactacttctgctgctgcctgctgcgtccgtgccttctcttcgtcgccaactctccctcatcatcaagcactccctcggcatgcaggtcaagctcgcgcctttcagcccggaccaggaggacgcgtcggtgctgtggacggagagcaaggacgtgggcaagggcttccgctgcatccgcatggtcaacaacacccgcctcaacttcgacgccttccacggcgacaaggaccacggcggcgtgcacgacggcaccgccgtcgtgctctgggagtggtgcaagggcgagaaccagagctggaagatcctgccgtggggtcccgaggccaactcctccgcggcccacgcgggaggcccgcacgccgtgcgcgtcttctgcaaggccggcggcgaggactacagcctcacggtgcgcaacggcacggcgtgcctggcgcccaccaacccgcgggacgagtaccagcactgggtcaaggacatgcgccacagcacccgggtgcgggacgaggagggctacccggccttcgcgctcgtcaacaaggtcaccggcgaggcgctcaagcactccacggggcagggccaccccgtcaagctcgtgccctacaacccggactaccaggacgagtccgtgctctggaccgagagccgcgacgtcggcaacggcttccgctgcgtccgcatggtcaacaacatctacctcaacttcgacgccttccacggcgacaaggcccacggcggcgtccatgacggtaccgagatcgtgctctggaagtggtgcgagggcgacaaccagcgctggaagatcctcccttggtgtaagaacgaacgaaagaaactactagctggtaccctaataataattctgctggctgcggcgatcccaaaataaaagaggccgggtgcgatgcatctcggacttctcgagtggtgtttgcgtcagacagccagccactgtggggctagtgttccaacatttgtcagcctgcttgcgcgaggaaggggggtcactgactcaagagaagggcctggtcataggctgctgcattatgaatttctgatgatgtcttatgtctgtactctgaatcaactatgtatgagatctcatctcctttctcctactgaatgaatgaatcattattggctttgctttg

SEQ ID NO: 145150 - DNA, 1781 bp, Zea Mays
aaccaaccaattaatcaacagcatatatagtatgtttcatccatttttctcatcactcaacgacgacgacgacgactcctacctattattatgtacacaatgcgtgcttcaatcctgtcgaccagaggcaacgacacgcgcgcggttacacactactgctagctgttctaattactcagtacgtagctagctactgaagattagccaactaaccaatcatcacaaaccacaccgccggcgaggtctcgacacatcttcgtcagacagacctcgtccatgccaatcggcgcggccggcctttccttccactcttctgcgtctaataacaggttaatatatccaatcaaccaactaatcaatccatccgcccggcaaaccgatggacccaaattaaatagggactaaatggaactaattacgtatagtactagtgtccggccggccggtcgatcccagcctaactagaccttccacatgttcatgttgtagtagtcctccatgaagccgccgtccagctggagcagctcgtccacatgctggagctggaacatgtccgcgcccggcgtctcgcgcgacgggctcagcaccatcgccggcgccggcgcctccgccttgcagtgcctccgtatggcctgctgctggtgctggtacgggctgttgctcggcgcgggcagctgcggctgcggctccgccttggtggcttgttggtacccgccgctgtcgtcgttcgtcgtcgtggtcgtccccgccgcggcgaagagggagccggcggcgtacgttgtcgagtcgacgagcgggggcaggtcgtcggcgttgtcgagcaccaggtcgtcgaggaaggccagcgagtcgctgcgctccatgcccacggacacggcgtgcggcggcggcgccatttgttgttgcccagccttgcccgccaagtctttgttgatcaccttacacacagcccattcgtcctgcacgcgacgcaaacacaacactgcacgttgaaaacaacctccatggctccatccatccatccatccatccatccatcacgggttacctcaccttggccccgcggtggaggttgtgcggcaggctgccctcgaggcggtactcgtgcatgacccacggcgtcttgcctccgcgcggcgcgcggcccgtgtagaagacgagcgtcttcttcatgccgacgagcacgcggcggggactactgctactgccgcggaagatctccttgtccttccccgtggccttccagtacccgctggcggtggcgcggttggtgcgcatccccgtcgggtacttgcggtccttgtggcagaagaagaaccactccttctcgcccatcttagccttgcctgcatgcagaggagaggcggaggagcatattatatgaaccaaccacgcacggagcggaggaggtagaggtaggctgctagcagctagcttagcttagcttacttgggagatcccacggctcgatcttgttgaggtcggcgtcggcgatgacgacgcaggagaagcggctgtccagcgccttgtgggtcaggtagtgcgacaccacctcctcgtcggtggggtggaagcggaaccccggcgggagatccagccgcgacgacgatgccatctggctctgcctccaaccaaccaaagaacttgtcacttgcgcaagcttagcttagcttagcttagcttagcacggcgtggccacagccactgacggaggaggaggaggagagaggcaggcggcggcgaccaattccttccttctccgccggcggtacgtgtgaatg

SEQ ID NO: 145151 - DNA, 1437 bp, Zea Mays
atgagtgtcaccggcgaaaagccatgcacacatcgggaatcagatgttggtcagacaaatagttgtagccttaacaattccagtgagtgtgagaatcatacacccagcaacgacgaaatatcggaaccagagtccaatttggagatggccaagactgatcagggcggcgatgtgccgagcggagagaaggtcctgaagaagccagacaagatcctgccgtgccctcgctgcaacagcatggacacgaagttctgctactacaacaactacaacatcaagcagccaaggcatttctgcaagagctgtcagaggtactggaccgcaggcggaagcatgagaaacatccccgttggtgctgggaggcgcaagagcaagagctccagcgcgagttgccgcagcgtgttgattcccgttccaggcagcagtagtgtagctaatcctggcggagaggcttccctgtttccgttgtccgtaaaagcaaaccaagcagcagttagcttcgggcctgattcccccctctgcacctccatggcctccgtgctgaagatcggaggaggaggagagcaggttaagagctgcagccctgcctcagcagcagcacagcccaggaacggagaaacccagacccagacgtgcgcaccttcttctgctgctacaacaccatcagatggtccagggaatggattgcagaaaggagcagagagcgcacaccaaaaccaaaaccaaaaccaaaacggaatcattgggcacagcaacggagtcactccagtgcatcctataccgttcttccccggaccgcctttcgtgtacccctggagtccagcatggaacggcattcccgccatggcagcggcggtgtgcgcagccccagcgacagccgaagcagcgatttcatcagaacacggcaccgcgagcagcaccgtccagtggaacgtgccaccagcgatcgtgcccgtgctgccaccgggattctgcggcccgatcccagtcccggtaatcccgccgccttccgtctggccactgatcactccctggcccaacgcagcatggagcgcgccgtggctcgggcctagcgctagcgtgccgccggggtcatctcggagcagcggcagcagcacgtgctccgacagcggctgcggctccggctcccccgtcctgggaaagcactcgagggagtcgaggccgcagggcgacgagaaggcggaacgacggtgcctgtggatccccaagacgctccggatcgacgaccctgtcgaggccgccaagagctcgatctggacgacgctcgggatcgagcctggcgaccggggcatgttcaggccgttccagtcgaagcatggacggcagcaggagctgcaagcgtccggcgccgctcgcgccctgcaggccaacccggcggctctgtcgcgctcgcagtcttttcaggagacgacgtga

SEQ ID NO: 145152 - DNA, 1104 bp, Zea Mays
atgtatcatcagcaacagctccacacccataaccagcacctgtcctcgtcaaggccaggcttacctcctgagaagcagttcctcctgcacggagcaggcggcggcggcggcggcggagatgcagggctcgtcctctccaccgatgctaagcctcgcctgaaatggacacccgagctgcacgagcgttttgttgaggcggtgcatcagctcggaggcccagacaaggccacgccgaaaaccatcatgaggctcatggggatccctggactcaccctgtaccatctcaagagccatctccagaaatacagactcagcaagaacctccaggcccaagctcatactgccagcgcaaagaatgcgttggtaggctgccggacgggagcagacaacgccctatgccaagggagtgcttcaccgccgccaccaccgccgccgccgcacctgaacctagaaccgccgcagataaacaggtcaatgcacataagtgaagccctccagatgcagatcgaagtccagagacggctgcatgagcagctagaggttcagagacacctgcagctgcggatcgaagcgcagggcaagtacttgcagtccgtgctggagaaggcgcaggaggcgctggccaagcagagcggcggcgctgacgagacgacgacgacgacgcagcagcagcagcagttgctgctgccggatctcatctcgagagccacggcgacgaggcgcggcaatgtccagcaggagcacctccaccagcagcaccacctcggaggcgacgggtcggtggacagctgcctgaccgcgtgcgaggggtctcggtgccagagggagagggaccaggacctgctgtccatcggcctctcgtccgctccgcctcccactcccactcccagcagaggctacaacgacagaggaggcggcggcagcgccagctgcgaggagttcctgcagtttcttgacgagcccagcagaagaggagcaggaggaggagggtcctcggatgagcagcaggagcttgacctcagcatcagcggcggcaggagcaatccaaggcctcgcggcagccaaagccaaaggatcgacctcaacggatccagctggaactga

SEQ ID NO: 145153 - DNA, 5208 bp, Zea Mays
atgggggcgccgcgcgagctcgagctctccgacgaggtggagggcgaggaggacggcaccaccgactttgttttccgccttgccggtgaccccatcccgctcctcccgaccgactccaacccgctcccgctcttcgacctgctgtcccctcccgcgcgcccgctcgccgtctccgaccgacacgccaccgtcttcctcgcccaccccagcgggtttatagctgtgaggaccaaggagttaatcgaagccagcaaggaggcgcgcgagaagggcaagtcgagcactcgctgcgcgcaggactgctgcgtcgccgacgtgcccctccccggtgtatcccttatcgcgctctcccatgatgagtccgtgttagccgcctgcacacatactgagatccagttcttctcgctggcgtctctgctcacacataaggacgtggtaccatcctcatcatgtagcctggaacgagctgtcactgtgaaagatttcaagtggttaaatcatgcctctgcagcatatattgtactctcaaatggtgggttgctgtgtcatgggaatttgggtgaaggcctgaaagatgtgatggaaaacgtcgatgcagttgactgttgcaaagaaggaaatcatattgctgttgcaagagggaacaaacttaccatattatcaccagattttacggaaacatgctccatgtccctcttgttccagttgtggtctgacggaagtgattcaaagggcactaccatcaaagtggattctattggctgggtacatggtgatagtattgttattgggtgtgttcgattaaacgaagatgacaatgaagaaggataccttgttcaagttataaggactgaagaaagcacattttgtgagagcccaggcaagacagatgtttatacctataacgattttttccatggcattatggatgatgttttaccacccggagctggacctaatcttcttttgggttatctgcatcgctggggtctcatggtggcttccaataaaaagagcgtcgatgaacacattgcccttcttaagtggccatctgcacatgatgatgaaaaaactgtaacatatcttgaaatgttggaggataaatacagtcctaggattgacttgcaagagaatggcgatgacaatgtcatactagggtttggtgttgagaatgtttcattatttcaaaagatcactgtaccagttggacctgaacaaaaggaggttgcccctcaacatattctcctatgtttgactggtgagggcaaagtagctgtatattacctcgccaggatttcggacccttctgatttacctcatgctactgtgtctaccaatgaggactatggtgaaaaacatatttcacctgcaactgtatctgaaaaggagttgactccaagtgttgcaggctcagtatataagagtactctcacagaacatggtgctgagccatctagtgcgcaaacaggtagcaaccagcaggaatcaataaatgtgaaaaacagtagctcagcttcaaaagaacaggaaacaactgacaattcattgtttatctcttccaataagaagcccttagacaccaagcaagtgaatgtgactggtccacctgcagccttgcgtagcttagcgttaacaggaaacacaaaacctacaatattttccagcttttctactgaaggcatgaatccaacaggaggcaatgcacctaatgaattagcttcttccttgcaaccaagcagcagaagttttggaaacaaccaaactggtaaagaaggcctggattcagttcaatcagtgggaatatttggtggatctcaaaactccaataaagatggcaatgtctatggtttcaagtcttcattattcacctctagtggatctgtccctgccaagatcggagaaaggaatgaggttggttttggagttccttcgctgcaaaccagttacaccgctgatagaaaagtttttggtgctccagttgccttaagctctgtaccttcatcatctatatctccggctaaaccttccccaattggatattcatcaagtggatttcggacagcaaactctgaagcacctcaatcattgcgtggatcacctccgtcacagcaatctatgggcaaatcacataacagcaggacacaagcaccggcagaatattctagaaactccaagaagggcacaggattcgattctgaacaagacttgtctaaaaaattttacagtataaatgaaatgacgaaggagttagatgccctactagcatatatagaaaaggatggtggttttagagatgcctgcataaccatccaacagcgtcctctttctatgtttgaggatggcttacaaaactttttgcagctgttgcaggtcttcaagggcaaagtagaggagcaatgttcaaaaattgaagatctgaggaacaacatgtttcaagtttctgctaggcaaacttacatgaaaggaattgttagccagtcttcagataatcagtactgggatatatggaaccgtcagaaattgagtccagaattcgaagtgaagagacaaaatattctcagagctaaccaggatttgacaaatcagctggttgagctggagaggcacttcaataatctggagatgaacagatccagtgaaacaggaagagtggcttctaatcgaagagctgtttattctaacaagacaagttcgagtcagacacaattatccagtgtatatagtgcactgaactcgcagttggcagctgctgagcagctatctgaatgcctttcaaagcagatatctgtgttaaatattggttctcctagtaggaagcaggggatggtgaccaaaaagttgtttgagtcaattggtttagcccacacaactgatgcaaccaaattttcaggcagcactcctaagccagttaagcggtttccatcagtgaatgagcattcaaagggaatattagggtcttccaagggtggtgagcctgagactgctcgaaggaggagggaatcactggatatgagcctggctagtttggaacctcagaaaacaactgttaaaagaataacacagcaacaacgcctcaagatcagcagtgatctaccattcaggtcaaacaagaaaatatttgattctcaaatggcagcaatatcacaggaaaagtcaagcgatagctccaattcatctatagtagaatcatatgtaagcagactgcgttctctgagtgaagatgtaaacgataaactgtcaggaccccaacagaaccctttgttcaaatgggtaaaggaatcaactgggtcatctcaaacctcagagcaaaagcatttcgagttaccagggcaaatgaaaagtactgcacagtcttcaaaactgacaccatcttcaccaccatcattcagttacacacgtatgggtgcacaagatagtatcaacccatccagtgttccatcctttggaacaaaacatactgtgtctaagccaaatactctaaccttcaaaaccactataagccctaaaagtaatgccaacacagagccaaatatattaccttctataacagctccaaaaacttctctaagtccactgtctgtaaaaactgctggggagtctggagatttgcctacattaactatgaagaacagacaggatggtcagtcaatgccatctttggggaacataaaaggaccgggtgcttctctgcagaacaagggtggcatatttagagatctcgacaaatcgtcttttaattctgaacattccaagcctgctgcattacatgagaagactgaccagctaagtggggttggcgatgctgtgcagaacactgtgaaagatacctccaaaatggcacctcaaccttctgctttcttgccagctcctgttactcagaccaattcatactccttaaggccgactgtttcttcttcagccacatcaggtgcgaaaacttcagatgttttatctagctcaatgcagaaagtttctccaatagtacctgggggtactgtgtctagctcagtccctactcctgctaaggattcatcaactggattgagtcaaaatgcttccaaacctgaaacgctaatatcaaaggtaactagtaccatagtttctgcaagttcgacttctgtcatatcagtcactgaaagcaaaccttcagtgcctccaacaactggcgccagcttgccttctactcatgtctctgctcctcaaacagcaccaacaacatcggaatcagttttcacttccacaggaaaaaatgtaggaccaaacactgacaccatctcaaccgatgaagatgacatggaagaggaggcaccttctgcaagtgccgaactgaacttgggagcccttggtggattcggccttgggtcccagccttcttcaagtcctcaaaagtctaatccttttggtgcctcctttggtacatctggcaataaaagttcaggcacaccatttactttgacaaccagtccaggacagcttttccggccagcgtcgctaagcattccttcagctcagccagcccaaccatctcaatcaactagttctagttctttttctaattcgttctcaagtgggcttactggatttggacagcctgcacaaattggatctggccagcagtcagcttttgggaagcctgcacagattggagctggccagcatgcaggatttgggcagactgcccaaattcaatctggttttggccagcctgcccaaattcaatctggttttggccagtcagcacaaatcggaactgggcaacagtcaggatttgggaagcctgcacaaattggggctgtccagtcaggatttgggcagcctgcacagtttgctgctcaacagacacttggatcagtgctgggttcttttggacaacctccccagttaggaggcataggttctggaggatttggtggattttcaagtgcttctacatctgctggttttagttctttatcttcaggtaatgctggatttgctggtgctgcatcaggtgggggcttttcagcaccaactgcttctgcaggtggtggttttgctgctgctgctactggtggaggttttgctgctcttgcttccaaaagtggtggttttgttggtgcagcttcatctggtggtggttttggaggtgcctcccagggaggtggctttggcagtggtgagatctctgaagtcgtgttctgttttgaacaaatacttacttttggataa

SEQ ID NO: 145154 - DNA, 2029 bp, Zea Mays
acctctaagcgcggcgcaataatgggaggaggagggacgctgatgctggaccagcgcttggcggcggatgacaaggtcctcttcgggttcccggcaggcgagtgcttctttggagagggtgacctcgccaacccggcgccggcgaccgaggagatgactatgagcttcctccccttggatgcggacgagatgatgatgagtgacgacgacgatgtggacggcgtcgaggagctggagcgccgcatgtggcgcgaccgcgtgcggctgaggcgcctcaaggagcagcagcagcagagcggccgcccttccggcggcaagcacgaggccagccgcagcaggcagcggcagtcgcaggagcaggcgcggcgcaagaagatgtcgcgcgcgcaggacgggatcctcaagtacatgctcaagatgatggaggtctgcaacgcgcagggcttcgtgtacggcatcatcccggagaacggcaagcccgtcaccggcgcctccgacaacctccgcgcctggtggaaggagaaggtccgcttcgaccgcaacgggcccgccgccgccgccaagtaccaggcagacaccgccgccgcgggaggcggggccgcggacgggtgcggaggcgccgacgcggaaggccagcatcactccctgcacgagctgcaggacaccacgctgggctcgctgctctccgcgctcatgcagcactgcgacccgccccagcgccggttcccgctcgagaagggcgtgccgccgccgtggtggccgctggccgccgtgcccggggacctcggcccaccgccgtacaagaagccgcacgacctcaagaaggcgtggaaggtggccgtgctcacggccgtcatcaagcacatgtcgcccgacgtcgacaaggcgcgccgcctcgtccggcagtccaagtgcctgcaggacaagatgaccgccagggagatcgtcgcgtggctcgccgtgctcaggcaggaggaggagctctacatccagctgcaccctggcgcccgcccggcgccgtcctccgccgccatgttccccttctgcgccagctccggcgagtacgatgtcgacggtgaagacgacaccggccggaaccagcagccaacctccaaccccgccgccgcagcattcctggacctttcgtcgtcgttcatggacgatgcgggccacaacaaattcgtcgtggccgagcccgcgccgccgattaagcaggaggccgccgacgccgtgttcttccagaaaagaagcgcgccggccgccgccgtggagccggagctgatgctgggcggcagcttccgccgcgcctacacatgcggcaacgtgcagtgctcgcacagcagcagcgcgcatgggttcctggaccgcaacacgcgcaacgcgcaccagtactcgtgcatgttcaacaacagcgtcggccagacggcggcgcttggcggcttggacttggatttgcccctggacggccagaggtcgctcggggagctgatggacatgtacgaggccaacgtgggcaacgtggacacggccgcccccggccccgaagtgcagctgcccggtccgttcccgacgccgtgccgatttggcgacatcatcagcaatgtgatacagcagagcgcagcggcggcggtctacgtccgtgacgacgacgcgcagttcggaggcgacatcgccgccgcgtcaccggggctgaggttcggctcaggcctggacgtggcgggaggcggcgggttgcagcagccgcacaagtccacgggatccaacggcagttggttctactgactgcgcatgcggcagaatcatggatggaatggacaatggaggttggatattagaattcacgagtagacgacgagatcgtcgtgagttttctccagtctcgtatttaagtatttgtataagcctgcaaatataatgggcaatggctgatgccgccgtccagacccagccatgaaccacaaaatcgtaatgggagcttccatcttgctcaacctattagaactaaataaaaagtctcataaaatactaa

SEQ ID NO: 145155 - DNA, 1297 bp, Zea Mays
cgccaataatgctgcgccgcaacccaacccgcatcgagctcacctcctccgaccgcgacgagctcgaagaccacctccgcgccgccgcggcagccaccaccaccaaggatccttccggttacaccactccgtctccagtccttggcccgcagacctccaatcccctgctccaattcctccacccgaagcccggcgccgtgccatccaagtcccaacgcatcggcatcggcctctccaccccgccggctccggccccgaacccgcgaccaccccatccaccccatggaggttgagatcaagctccgcctccccgacgccgccgcgcaccgccgcctgtccgcgttcctcgcgccccgcctccgccgcacccacgcccagcggaacctcttcttcgacgacgccgcgcgcacgctcggagccgccaccgccgcgctccgcgtccgcctctacgacgggcccgacgaccgcggcccctcgcgcgccgtcctcgcgctcaagcgccgcccgcggatcgaggccggcgtcagccgcgtcgaggagatcgaggagcccctcgagcccgcgctcgccgtcgcctgcgccgacgaccccgcccgcctcggcggcctcgactcgccgatcatccgcctcgtcgccgccgagtacggcgtcggcggggacgccgcccccttcctctgcctcggcggcttcgggaacacgcgcgctgtctacgagtacgagcttgaggacggcggcggcggcctcgtgctggagctcgacgagacgcggttcgactttgggaccaggtacgagctcgagtgcgagacggcggagcctgaccgggtcaaggaggtgctggagcgactgctcacggtggccggcgtgccctacgagtactgtcggaacagcaagttcgcctgcttcatgacagggaagctgcttccttgactaggcatagccttgtccgttcttggtatttcccttcttcgtgccattaagctgcatttgaacaacttgaatggaatgtcagtgacgctttgaataatgacaaaaataagtgtggcttctcatatttggttagtgtatggttttggttttgtggcaacggaacataatcctgagtctggtcaaatccaatttctcccaaaatctatgggacaacagccctaccagcttggtatttcagtactgtaccttcgttcagtattgttaccttgttcgggcaaatttacatagcatatcttcatgaacaacaaacattatattggtccgatgctgataatcatggtcatggaccgagacagacagacagttgcag

SEQ ID NO: 145156 - DNA, 1977 bp, Zea Mays
ggaaatctctctgcagtgtctgcactgcacccatccgcttctcctctcccgccggctatccagagccccaaaccctacccttcttgttcgcgccgctccctccgccgccgcctgcggggtgcccacttcttcctcccccagccccgatcgtcatacagctccagccccaccccagcttgctcgcggaggtggatcatcgccgcagcagttctctcgtgcagttcttgaaggatgagggggccgttttgtcgccggaggatgaaaataagagggagaaggtgatccgagagctcaagaagatagtgatgcattgggccaacgcggtggcttatgagcagagtgtgccccaggggctggccacagctaccgtcctgacatacggttcttacacattaggggctcatggacctgaatctgacattgatttactttgtcttggaccttgtattgcaacactgcagtaccatttctttgttgttttgagacaaattcttcagggcagaccagaagtatcagaagtacacactgttgagaaggctaaggttcccttgatgcgatttagattcactgggattgcagttgatttgacatatgcccaactccctgttattgatgcattaaaggctataaatacgtttagccctcaactactacagaaaatagacacacggagctggaggagtttatctggagttcgtgtcaatgaacaaattgttcagctagtaccaaatgcggagttttgttttactggaaatacaatgcagaagtttcaaactctgttgcgatgcatcaaactatgggctaggaaaagaggacttcattgccattatcttggcttctttgctgggattcatttagcaatccttgcggcatatgtctgtcggaaatttccagatgccagtgtcagtggtttgttcgcagtgttctttcagacgtttgctcactggccttggcaagttccagtaagtctgcatgatgagctaactacatgcttgcattcggagggacgtctcatgcctatagtgatgccttgtaccccgccagagttttgtgcgtccactgtgacaaaaggcagcttaaaaaaaataagagaggaacttacacgtggttatgttttgacaagggatccattgaggcatgatttccagtggagctggctttttgaacccttcccatatgatcagaaatatcagcagtttctccgcattgctttacgtgcgccaactattgctgaactaggagactgggctggatgggtgaaatctcgattccgtttcctgattctgaagctggaaagggctgggattgagtgtgatccatgcccctcggaggaagttgatcatacagacaatgaccccaacgtggtcttctactggggccttatccctaaaagaatcattcaggtcgacactagctccctgaaaggagatttcatggaagacctcaccaatgatgtgtacggcacggtgaagtgcacgcattcagatgtgacaatatctgtggttgggctgccacagctgcctaagagcatgtgcagccgggtctatccaccggcagtacatgcagcactgtatgatgggctacgagggcacagatgaaggccagatcgagcgcaggttcgttagatcatactaccacgaccgatgctccagtcttccggggcaaccgtgtacagaattgatgagttttttcatcccatagcacagggattcaaggtactggaccgggtattcttttgagctgggaggagtgcttgtgtgcgcaagaatatgggaggactactgaccggtagaagagcaaagaaaatgtgtatagcagaggcatgtaaaaacttaggccctgtcggcataggcagtgtacacttcttttgtgttctaagtgctgctggatcctgattcattcaaattttgcaatgaacaagatggcaagatgtgtatatagttggttctattggctgggtggatgttgattttgagt

SEQ ID NO: 145157 - DNA, 1994 bp, Zea Mays
ggaaatctctctgcagtgtctgcactgcacccatccgcttctcctctcccgccggctatccagagccccaaaccctacccttcttgttcgcgccgctccctccgccgccgcctgcggggtgcccacttcttcctcccccagccccgatcgtcatacagctccagccccaccccagcttgctcgcggaggtggatcatcgccgcagcagttctctcgtgcagttcttgaaggatgagggggccgttttgtcgccggaggatgaaaataagagggagaaggtgatccgagagctcaagaagatagtgatgcattgggccaacgcggtggcttatgagcagagtgtgccccaggggctggccacagctaccgtcctgacatacggttcttacacattaggggctcatggacctgaatctgacattgatttactttgtcttggaccttgtattgcaacactgcagtaccatttctttgttgttttgagacaaattcttcagggcagaccagaagtatcagaagtacacactgttgagaaggctaaggttcccttgatgcgatttagattcactgggattgcagttgatttgacatatgcccaactccctgttattgatgcattaaaggctataaatacgtttagccctcaactactacagaaaatagacacacggagctggaggagtttatctggagttcgtgtcaatgaacaaattgttcagctagtaccaaatgcggagttttgttttactggaaatacaatgcagaagtttcaaactctgttgcgatgcatcaaactatgggctaggaaaagaggacttcattgccatgtatgtggtttaattttctctgctgactgttcagctttagtccagctatatgaacatgaggtcatcattttggtctaacaatgtttttcttgtgccatgacattcagtatcttggcttctttgctgggattcatttagcaatccttgcggcatatgtctgtcggaaatttccagatgccagtgtcagtggtttgttcgcagtgttctttcagacgtttgctcactggccttggcaagttccagtaagtctgcatgatgagctaactacatgcttgcattcggagggacgtctcatgcctatagtgatgccttgtaccccgccagagttttgtgcgtccactgtgacaaaaggcagcttaaaaaaaataagagaggaacttacacgtggttatgttttgacaagggatccattgaggcatgatttccagtggagctggctttttgaacccttcccatatgatcagaaatatcagcagtttctccgcattgctttacgtgcgccaactattgctgaactaggagactgggctggatgggtgaaatctcgattccgtttcctgattctgaagctggaaagggctgggattgagtgtgatccatgcccctcggaggaagttgatcatacagacaatgaccccaacgtggtcttctactggggccttatccctaaaagaatcattcaggtcgacactagctccctgaaaggagatttcatggaagacctcaccaatgatgtgtacggcacggtgaagtgcacgcattcagatgtgacaatatctgtggttgggctgccacagctgcctaagagcatgtgcagccgggtctatccaccggcagtacatgcagcactgtatgatgggctacgagggcacagatgaaggccagatcgagcgcagggattcaaggtactggaccgggtattcttttgagctgggaggagtgcttgtgtgcgcaagaatatgggaggactactgaccggtagaagagcaaagaaaatgtgtatagcagaggcatgtaaaaacttaggccctgtcggcataggcagtgtacacttcttttgtgttctaagtgctgctggatcctgattcattcaaattttgcaatgaacaagatggcaagatgtgtatatagttggttctattggctgggtggatgttgattttgagt

SEQ ID NO: 145158 - DNA, 1887 bp, Zea Mays
ctctctgcagtgtctgcactgcacccatccgcttctcctcgtccgccgcggccgtcgccggcgacgagcatggcgtacatgacagctgtcgcgcccgtcccctggtggccgcctcccccggagctggcgcatgcgggcctcctcgtcgcgtcctctcccgccggctatccagagccccaaaccctacccttcttgttcgcgccgctccctccgccgccgcctgcggggtgcccacttcttcctcccccagccccgatcgtcatacagctccagccccaccccagcttgctcgcggaggtggatcatcgccgcagcagttctctcgtgcagttcttgaaggatgagggggccgttttgtcgccggaggatgaaaataagagggagaaggtgatccgagagctcaagaagatagtgatgcattgggccaacgcggtggcttatgagcagagtgtgccccaggggctggccacagctaccgtcctgacatacggttcttacacattaggggctcatggacctgaatctgacattgatttactttgtcttggaccttgtattgcaacactgcagtaccatttctttgttgttttgagacaaattcttcagggcagaccagaagtatcagaagtacacactgttgagaaggctaaggttcccttgatgcgatttagattcactgggattgcagttgatttgacatatgcccaactccctgttattgatgcattaaaggctataaatacgtttagccctcaactactacagaaaatagacacacggagctggaggagtttatctggagttcgtgtcaatgaacaaattgttcagctagtaccaaatgcggagaagtttcaaactctgttgcgatgcatcaaactatgggctaggaaaagaggacttcattgccattatcttggcttctttgctgggattcatttagcaatccttgcggcatatgtctgtcggaaatttccagatgccagtgtcagtggtttgttcgcagtgttctttcagacgtttgctcactggccttggcaagttccagatccattgaggcatgatttccagtggagctggctttttgaacccttcccatatgatcagaaatatcagcagtttctccgcattgctttacgtgcgccaactattgctgaactaggagactgggctggatgggtgaaatctcgattccgtttcctgattctgaagctggaaagggctgggattgagtgtgatccatgcccctcggaggaagttgatcatacagacaatgaccccaacgtggtcttctactggggccttatccctaaaagaatcattcaggtcgacactagctccctgaaaggagatttcatggaagacctcaccaatgatgtgtacggcacggtgaagtgcacgcattcagatgtgacaatatctgtggttgggctgccacagctgcctaagagcatgtgcagccgggtctatccaccggcagtacatgcagcactgtatgatgggctacgagggcacagatgaaggccagatcgagcgcaggttcgttagatcatactaccacgaccgatgctccagtcttccggggcaaccgtgtacagaattgatgagttttttcatcccatagcacagggattcaaggtactggaccgggtattcttttgagctgggaggagtgcttgtgtgcgcaagaatatgggaggactactgaccggtagaagagcaaagaaaatgtgtatagcagaggcatgtaaaaacttaggccctgtcggcataggcagtgtacacttcttttgtgttctaagtgctgctggatcctgattcattcaaattttgcaatgaacaagatggcaagatgtgtatatagttggttctattggctgggtggatgtt

SEQ ID NO: 145159 - DNA, 2074 bp, Zea Mays
ggaaatctctctgcagtgtctgcactgcacccatccgcttctcctctcccgccggctatccagagccccaaaccctacccttcttgttcgcgccgctccctccgccgccgcctgcggggtgcccacttcttcctcccccagccccgatcgtcatacagctccagccccaccccagcttgctcgcggaggtggatcatcgccgcagcagttctctcgtgcagttcttgaaggatgagggggccgttttgtcgccggaggatgaaaataagagggagaaggtgatccgagagctcaagaagatagtgatgcattgggccaacgcggtggcttatgagcagagtgtgccccaggggctggccacagctaccgtcctgacatacggttcttacacattaggggctcatggacctgaatctgacattgatttactttgtcttggaccttgtattgcaacactgcagtaccatttctttgttgttttgagacaaattcttcagggcagaccagaagtatcagaagtacacactgttgagaaggctaaggttcccttgatgcgatttagattcactgggattgcagttgatttgacatatgcccaactccctgttattgatgcattaaaggctataaatacgtttagccctcaactactacagaaaatagacacacggagctggaggagtttatctggagttcgtgtcaatgaacaaattgttcagctagtaccaaatgcggagttttgttttactggaaatacaatgcagaagtttcaaactctgttgcgatgcatcaaactatgggctaggaaaagaggacttcattgccatgtatgtggtttaattttctctgctgactgttcagctttagtccagctatatgaacatgaggtcatcattttggtctaacaatgtttttcttgtgccatgacattcagtatcttggcttctttgctgggattcatttagcaatccttgcggcatatgtctgtcggaaatttccagatgccagtgtcagtggtttgttcgcagtgttctttcagacgtttgctcactggccttggcaagttccagtaagtctgcatgatgagctaactacatgcttgcattcggagggacgtctcatgcctatagtgatgccttgtaccccgccagagttttgtgcgtccactgtgacaaaaggcagcttaaaaaaaataagagaggaacttacacgtggttatgttttgacaagggatccattgaggcatgatttccagtggagctggctttttgaacccttcccatatgatcagaaatatcagcagtttctccgcattgctttacgtgcgccaactattgctgaactaggagactgggctggatgggtgaaatctcgattccgtttcctgattctgaagctggaaagggctgggattgagtgtgatccatgcccctcggaggaagttgatcatacagacaatgaccccaacgtggtcttctactggggccttatccctaaaagaatcattcaggtcgacactagctccctgaaaggagatttcatggaagacctcaccaatgatgtgtacggcacggtgaagtgcacgcattcagatgtgacaatatctgtggttgggctgccacagctgcctaagagcatgtgcagccgggtctatccaccggcagtacatgcagcactgtatgatgggctacgagggcacagatgaaggccagatcgagcgcaggttcgttagatcatactaccacgaccgatgctccagtcttccggggcaaccgtgtacagaattgatgagttttttcatcccatagcacagggattcaaggtactggaccgggtattcttttgagctgggaggagtgcttgtgtgcgcaagaatatgggaggactactgaccggtagaagagcaaagaaaatgtgtatagcagaggcatgtaaaaacttaggccctgtcggcataggcagtgtacacttcttttgtgttctaagtgctgctggatcctgattcattcaaattttgcaatgaacaagatggcaagatgtgtatatagttggttctattggctgggtggatgtt

SEQ ID NO: 145160 - DNA, 1793 bp, Zea Mays
ctctctgcagtgtctgcactgcacccatccgcttctcctcgtccgccgcggccgtcgccggcgacgagcatggcgtacatgacagctgtcgcgcccgtcccctggtggccgcctcccccggagctggcgcatgcgggcctcctcgtcgcgtcctctcccgccggctatccagagccccaaaccctacccttcttgttcgcgccgctccctccgccgccgcctgcggggtgcccacttcttcctcccccagccccgatcgtcatacagctccagccccaccccagcttgctcgcggaggtggatcatcgccgcagcagttctctcgtgcagttcttgaaggatgagggggccgttttgtcgccggaggatgaaaataagagggagaaggtgatccgagagctcaagaagatagtgatgcattgggccaacgcggtggcttatgagcagagtgtgccccaggggctggccacagctaccgtcctgacatacggttcttacacattaggggctcatggacctgaatctgacattgatttactttgtcttggaccttgtattgcaacactgcagtaccatttctttgttgttttgagacaaattcttcagggcagaccagaagtatcagaagtacacactgttgagaaggctaaggttcccttgatgcgatttagattcactgggattgcagttgatttgacatatgcccaactccctgttattgatgcattaaaggctataaatacgtttagccctcaactactacagaaaatagacacacggagctggaggagtttatctggagttcgtgtcaatgaacaaattgttcagctagtaccaaatgcggagaagtttcaaactctgttgcgatgcatcaaactatgggctaggaaaagaggacttcattgccattatcttggcttctttgctgggattcatttagcaatccttgcggcatatgtctgtcggaaatttccagatgccagtgtcagtggtttgttcgcagtgttctttcagacgtttgctcactggccttggcaagttccagatccattgaggcatgatttccagtggagctggctttttgaacccttcccatatgatcagaaatatcagcagtttctccgcattgctttacgtgcgccaactattgctgaactaggagactgggctggatgggtgaaatctcgattccgtttcctgattctgaagctggaaagggctgggattgagtgtgatccatgcccctcggaggaagttgatcatacagacaatgaccccaacgtggtcttctactggggccttatccctaaaagaatcattcaggtcgacactagctccctgaaaggagatttcatggaagacctcaccaatgatgtgtacggcacggtgaagtgcacgcattcagatgtgacaatatctgtggttgggctgccacagctgcctaagagcatgtgcagccgggtctatccaccggcagtacatgcagcactgtatgatgggctacgagggcacagatgaaggccagatcgagcgcagggattcaaggtactggaccgggtattcttttgagctgggaggagtgcttgtgtgcgcaagaatatgggaggactactgaccggtagaagagcaaagaaaatgtgtatagcagaggcatgtaaaaacttaggccctgtcggcataggcagtgtacacttcttttgtgttctaagtgctgctggatcctgattcattcaaattttgcaatgaacaagatggcaagatgtgtatatagttggttctattggctgggtgga

SEQ ID NO: 145161 - DNA, 2029 bp, Zea Mays
tgcacccatccgcttctcctcgtccgccgcggccgtcgccggcgacgagcatggcgtacatgacagctgtcgcgcccgtcccctggtggccgcctcccccggagctggcgcatgcgggcctcctcgtcgcgtcctctcccgccggctatccagagccccaaaccctacccttcttgttcgcgccgctccctccgccgccgcctgcggggtgcccacttcttcctcccccagccccgatcgtcatacagctccagccccaccccagcttgctcgcggaggtggatcatcgccgcagcagttctctcgtgcagttcttgaaggatgagggggccgttttgtcgccggaggatgaaaataagagggagaaggtgatccgagagctcaagaagatagtgatgcattgggccaacgcggtggcttatgagcagagtgtgccccaggggctggccacagctaccgtcctgacatacggttcttacacattaggggctcatggacctgaatctgacattgatttactttgtcttggaccttgtattgcaacactgcagtaccatttctttgttgttttgagacaaattcttcagggcagaccagaagtatcagaagtacacactgttgagaaggctaaggttcccttgatgcgatttagattcactgggattgcagttgatttgacatatgcccaactccctgttattgatgcattaaaggctataaatacgtttagccctcaactactacagaaaatagacacacggagctggaggagtttatctggagttcgtgtcaatgaacaaattgttcagctagtaccaaatgcggagttttgttttactggaaatacaatgcagaagtttcaaactctgttgcgatgcatcaaactatgggctaggaaaagaggacttcattgccattatcttggcttctttgctgggattcatttagcaatccttgcggcatatgtctgtcggaaatttccagatgccagtgtcagtggtttgttcgcagtgttctttcagacgtttgctcactggccttggcaagttccagtaagtctgcatgatgagctaactacatgcttgcattcggagggacgtctcatgcctatagtgatgccttgtaccccgccagagttttgtgcgtccactgtgacaaaaggcagcttaaaaaaaataagagaggaacttacacgtggttatgttttgacaagggatccattgaggcatgatttccagtggagctggctttttgaacccttcccatatgatcagaaatatcagcagtttctccgcattgctttacgtgcgccaactattgctgaactaggagactgggctggatgggtgaaatctcgattccgtttcctgattctgaagctggaaagggctgggattgagtgtgatccatgcccctcggaggaagttgatcatacagacaatgaccccaacgtggtcttctactggggccttatccctaaaagaatcattcaggtcgacactagctccctgaaaggagatttcatggaagacctcaccaatgatgtgtacggcacggtgaagtgcacgcattcagatgtgacaatatctgtggttgggctgccacagctgcctaagagcatgtgcagccgggtctatccaccggcagtacatgcagcactgtatgatgggctacgagggcacagatgaaggccagatcgagcgcaggttcgttagatcatactaccacgaccgatgctccagtcttccggggcaaccgtgtacagaattgatgagttttttcatcccatagcacagggattcaaggtactggaccgggtattcttttgagctgggaggagtgcttgtgtgcgcaagaatatgggaggactactgaccggtagaagagcaaagaaaatgtgtatagcagaggcatgtaaaaacttaggccctgtcggcataggcagtgtacacttcttttgtgttctaagtgctgctggatcctgattcattcaaattttgcaatgaacaagatggcaagatgtgtatat

SEQ ID NO: 145162 - DNA, 1191 bp, Zea Mays
ccgtattctgactagaaaatctggcttctattacaattacaagttccgttcctaatgaaactactcaaataaaaaagtacgtgtacaatacagaattgttatatgggaagtttactattggatataacatgagaagagcaagcggagaacctgtgccctttatcataggtcatgctatttctctttggaagattcaagtgggaatgctgcgcccaacatggatgtctatgctattattgagaaaaaatgaatcaaaaaagcagcagaatacgagaaggatttcttttctgaaagggtgtatacattagagtgtacctgcttggtaggcatgaaatcactgacaaagagttgcctagctccgatgaaattgcaagcataatttggaatttaatagaagcgggcatagctaggggtgaaccacgagaagttagagcaagagctccgggtaggtatcgtaaacatcctgagtgtatcacggcattgaagcagaagaaacagaaatgttttcctttcattgtagccgatatagagactgttatactaaataatgtgcttgtaccttatgctgcggggctcttagtggtgaatccgggggatgatgtggctgccatggatgatcaaatagacacatatttttttgaagattacaatttgataataccttcccttgaagaaaggagtactaaaatgttggtagattttatagagcgtatagccaaactgggatctactcacaagggcgtgaaaacagtttacttttcgaatctaatttctcgatccgatcgacttaatgaagtttttagccagtcatatggtcgagtacaccatcaaaccgctgatgaggaacaagaagctttaccagttatcaatttataggaaaaaagggggaataagaaattggtgttccatctacgagattcatacactcaactccctaatagtctagaaacattggctaagactttatgtccgcacttaggttcaaaaggctcaatagcacatgacgaagttcaagtgtcttctcttcaggagaatagagcccaattgttggattatatggagctggatatcagtcttttaggtgatgtgatgcttcgggctaaatcaatttattggactagatacaatgtggatatcggggtatgtttgacattgtcatcgctagctaaaaaaatatatcgaatgaagtat

SEQ ID NO: 145163 - DNA, 1724 bp, Zea Mays
gtccgtctctccgtcctctcctccccaccctcgccctgccctcgcgcccgccgccgcgcacacgccagatccgtctagactgactccgattggtttcggcttcttcgcttctccttctcggtcatatgattgcaatgaatcctgacatggtactactgtcttggaaacaacttccaccaacggtcgatcctgtgaaacactaagacacccgttgccactggaaaggagagagcaaagtgatttgctgtctcctggcgatcgttgctcgtgaggcctagtgatggcagatgctagctcaaggactgacacctcaattgttttagacgacaacgacaagaatcataggatggagaatggaagtggtgcggttgtaccttctaattcttcagataggtccgacaggtctgataaacctttggaccaaaagacaatgcgacggcttgcccaaaatcgtgaggcagcaagaaaaagtcggctgaggaaaaaggcatatgtgcagcagctggagagcagtaagctgaaacttgcacaactggaacaggaactccagaaagctcgccagcagggaatcttcatttctagctctggagaccaaacccatgccatgagtggaaatggagctttgacttttgacatagaatatgctagatggctagaggaccaaaataagcagataaatgagttgaggactgcagtgaatgctcatgcaagtgatagtgatctacgacttattgtagatggcataatggcacactatgatgaaatattcaaggtcaaaggtgttgctgcaaaggctgatgtgtttcatatactttcaggcatgtggaagacacctgctgaaaggtgcttcctatggcttgggggttttcgtccatctgagcttttaaagctcctagcgaatcacctcgagcctctaactgagcagcaaatgctgggtttgaccaacctccagcaatcttcccaacaagcagaggatgcgttgtcacagggcatggaagcactgcagcaatctttggcagagactttggctggatctctcggtccagcaggttcttcaggaaatgtggcaaactacatgggtcagatggccatggccatgggcaaactcgggacgctagagaattttcttcgccaagccgacaacctgcgacagcagacgttgcatcaaatgcaacgtatcctaacgatccgacaggcttctcgtgctcttcttgcaatccacgactatttttcacgattgcgcgctttaagttctctgtggcttgctaggccacgtgaataacgaagggccgtcagtattttgagttccctctgccttacggtgctgctgcgtcgttcgcagcgatgcatcacagatctttggtggtactgtttttgttgtacaattacttttggccgctgcttggtccaaattgtactcaggtgggtgtacaagtaggtcaatataatcctgtaagttatggtgatttatgggtgtgttagcaatgcaataataattagagagggcaggatcagggtttctgttgtttgtactggttagagatttagtcctaatgtaacttcctgggacatggggggcggaatgggaagagagtaacaagaatcttcctttggttactgtagtatatgttggtattgttgcatcccattttctcattttgctgttaggagaatgattattctgtccatttgtgtactttttgattaatgttgtttgtagcccc

SEQ ID NO: 145164 - DNA, 2016 bp, Zea Mays
gaacaggtcagcgttggcgggctgcccgcttcccagccgttcgatgcagcttcgacggccgcgatctccccaacggacggctactgttgcacgcacggggtcgcccagtcagagatcagaggagaggacagttgccgaggccaaggcagcccaccccgcccgccgcgccgcttcttcattcccccaccacacgccatcccttgtccgtctctccgtcctctcctccccaccctcgccctgccctcgcgcccgccgccgcgcacacgccaggttctccttccgccgttaacaagcacgctccatttccaactaattctctcttacccttccgcctcgctcttggggccgctgcaagtgcagatccgtctagactgactccgattggtttcggcttcttcgcttctccttctcggtcatatgattgcaatgaatcctgacatggtactactgtcttggaaacaacttccaccaacggtcgatcctgtgaaacactaagacacccgttgccactggaaaggagagagcaaagtgatttgctgtctcctggcgatcgttgctcgtgaggcctagtgatggcagatgctagctcaaggactgacacctcaattgttttagacgacaacgacaagaatcataggatggagaatggaagtggtgcggttgtaccttctaattcttcagataggtccgacaggtctgataaacctttggaccaaaagacaatgcgacggcttgcccaaaatcgtgaggcagcaagaaaaagtcggctgaggaaaaaggcatatgtgcagcagctggagagcagtaagctgaaacttgcacaactggaacaggaactccagaaagctcgccagcagggaatcttcatttctagctctggagaccaaacccatgccatgagtggaaatggagctttgacttttgacatagaatatgctagatggctagaggaccaaaataagcagataaatgagttgaggactgcagtgaatgctcatgcaagtgatagtgatctacgacttattgtagatggcataatggcacactatgatgaaatattcaaggtcaaaggtgttgctgcaaaggctgatgtgtttcatatactttcaggcatgtggaagacacctgctgaaaggtgcttcctatggcttgggggttttcgtccatctgagcttttaaagctcctagcgaatcacctcgagcctctaactgagcagcaaatgctgggtttgaccaacctccagcaatcttcccaacaagcagaggatgcgttgtcacagggcatggaagcactgcagcaatctttggcagagactttggctggatctctcggtccagcaggttcttcaggaaatgtggcaaactacatgggtcagatggccatggccatgggcaaactcgggacgctagagaattttcttcgccaagccgacaacctgcgacagcagacgttgcatcaaatgcaacgtatcctaacgatccgacaggcttctcgtgctcttcttgcaatccacgactatttttcacgattgcgcgctttaagttctctgtggcttgctaggccacgtgaataacgaagggccgtcagtattttgagttccctctgccttacggtgctgctgcgtcgttcgcagcgatgcatcacagatctttggtggtactgtttttgttgtacaattacttttggccgctgcttggtccaaattgtactcaggtgggtgtacaagtaggtcaatataatcctgtaagttatggtgatttatgggtgtgttagcaatgcaataataattagagagggcaggatcagggtttctgttgtttgtactggttagagatttagtcctaatgtaacttcctgggacatggggggcggaatgggaagagagtaacaagaatcttcctttggttactgtagtatatgttggtattgttgcatcccattttctcattttgctgttaggagaatgattattctgtccatttgtgtactttttgattaatgttgtttgtagcccc

SEQ ID NO: 145165 - DNA, 1728 bp, Zea Mays
gaacaggtcagcgttggcgggctgcccgcttcccagccgttcgatgcagcttcgacggccgcgatctccccaacggacggctactgttgcacgcacggggtcgcccagtcagagatcagaggagaggacagttgccgaggccaaggcagcccaccccgcccgccgcgccgcttcttcattcccccaccacacgccatcccttgtccgtctctccgtcctctcctccccaccctcgccctgccctcgcgcccgccgccgcgcacacgccaggttctccttccgccgttaacaagcacgctccatttccaactaattctctcttacccttccgcctcgctcttggggccgctgcaagtgcagatccgtctagactgactccgattggtttcggcttcttcgcttctccttctcggtcatatgattgcaatgaatcctgacatggtactactgtcttggaaacaaatggagaatggaagtggtgcggttgtaccttctaattcttcagataggtccgacaggtctgataaacctttggaccaaaagacaatgcgacggcttgcccaaaatcgtgaggcagcaagaaaaagtcggctgaggaaaaaggcatatgtgcagcagctggagagcagtaagctgaaacttgcacaactggaacaggaactccagaaagctcgccagcagggaatcttcatttctagctctggagaccaaacccatgccatgagtggaaatggagctttgacttttgacatagaatatgctagatggctagaggaccaaaataagcagataaatgagttgaggactgcagtgaatgctcatgcatgtggaagacacctgctgaaaggtgcttcctatggcttgggggttttcgtccatctgagcttttaaagctcctagcgaatcacctcgagcctctaactgagcagcaaatgctgggtttgaccaacctccagcaatcttcccaacaagcagaggatgcgttgtcacagggcatggaagcactgcagcaatctttggcagagactttggctggatctctcggtccagcaggttcttcaggaaatgtggcaaactacatgggtcagatggccatggccatgggcaaactcgggacgctagagaattttcttcgccaagccgacaacctgcgacagcagacgttgcatcaaatgcaacgtatcctaacgatccgacaggcttctcgtgctcttcttgcaatccacgactatttttcacgattgcgcgctttaagttctctgtggcttgctaggccacgtgaataacgaagggccgtcagtattttgagttccctctgccttacggtgctgctgcgtcgttcgcagcgatgcatcacagatctttggtggtactgtttttgttgtacaattacttttggccgctgcttggtccaaattgtactcaggtgggtgtacaagtaggtcaatataatcctgtaagttatggtgatttatgggtgtgttagcaatgcaataataattagagagggcaggatcagggtttctgttgtttgtactggttagagatttagtcctaatgtaacttcctgggacatggggggcggaatgggaagagagtaacaagaatcttcctttggttactgtagtatatgttggtattgttgcatcccattttctcattttgctgttaggagaatgattattctgtccatttgtgtactttttgattaatgttgtttgtagcccc

SEQ ID NO: 145166 - DNA, 2033 bp, Zea Mays
gacccacctactaatccagccagccaatgagtcccccgtttcatcacgcaacgccaacccacaccaacgccaaccggacccacccacccctcccgtccgtcgcataccatcccatcccacccccgtgcgccgagttcacggccgccaccaccaccaccaccacaaccgattacacaaggccacgcggcttctggaagcttcccttgccttgccttccctctcaacccaaatcgccacggctccctccgcccgcaagcgccctcggcacgaccgccggattcgcctctgggtggggttggttttgtctcccccaccacccacccacccctctcctctcctctcctccaaggcttggcttgcctcgtgtcgtgtgtccctccaccgcccgccatgccgacgaggcttgccccccaccgccgatcgcacacggtcatatgattgcaatgaatcctgacatggtactactgtcttggaaacaacttccaccaacggtcgatcctgtgaaacactaagacacccgttgccactggaaaggagagagcaaagtgatttgctgtctcctggcgatcgttgctcgtgaggcctagtgatggcagatgctagctcaaggactgacacctcaattgttttagacgacaacgacaagaatcataggatggagaatggaagtggtgcggttgtaccttctaattcttcagataggtccgacaggtctgataaacctttggaccaaaagacaatgcgacggcttgcccaaaatcgtgaggcagcaagaaaaagtcggctgaggaaaaaggcatatgtgcagcagctggagagcagtaagctgaaacttgcacaactggaacaggaactccagaaagctcgccagcagggaatcttcatttctagctctggagaccaaacccatgccatgagtggaaatggagctttgacttttgacatagaatatgctagatggctagaggaccaaaataagcagataaatgagttgaggactgcagtgaatgctcatgcaagtgatagtgatctacgacttattgtagatggcataatggcacactatgatgaaatattcaaggtcaaaggtgttgctgcaaaggctgatgtgtttcatatactttcaggcatgtggaagacacctgctgaaaggtgcttcctatggcttgggggttttcgtccatctgagcttttaaagctcctagcgaatcacctcgagcctctaactgagcagcaaatgctgggtttgaccaacctccagcaatcttcccaacaagcagaggatgcgttgtcacagggcatggaagcactgcagcaatctttggcagagactttggctggatctctcggtccagcaggttcttcaggaaatgtggcaaactacatgggtcagatggccatggccatgggcaaactcgggacgctagagaattttcttcgccaagccgacaacctgcgacagcagacgttgcatcaaatgcaacgtatcctaacgatccgacaggcttctcgtgctcttcttgcaatccacgactatttttcacgattgcgcgctttaagttctctgtggcttgctaggccacgtgaataacgaagggccgtcagtattttgagttccctctgccttacggtgctgctgcgtcgttcgcagcgatgcatcacagatctttggtggtactgtttttgttgtacaattacttttggccgctgcttggtccaaattgtactcaggtgggtgtacaagtaggtcaatataatcctgtaagttatggtgatttatgggtgtgttagcaatgcaataataattagagagggcaggatcagggtttctgttgtttgtactggttagagatttagtcctaatgtaacttcctgggacatggggggcggaatgggaagagagtaacaagaatcttcctttggttactgtagtatatgttggtattgttgcatcccattttctcattttgctgttaggagaatgattattctgtccatttgtgtactttttgattaatgttgtttgtagcccc

SEQ ID NO: 145167 - DNA, 1807 bp, Zea Mays
gacccacctactaatccagccagccaatgagtcccccgtttcatcacgcaacgccaacccacaccaacgccaaccggacccacccacccctcccgtccgtcgcataccatcccatcccacccccgtgcgccgagttcacggccgccaccaccaccaccaccacaaccgattacacaaggccacgcggcttctggaagcttcccttgccttgccttccctctcaacccaaatcgccacggctccctccgcccgcaagcgccctcggcacgaccgccggattcgcctctgggtggggttggttttgtctcccccaccacccacccacccctctcctctcctctcctccaaggcttggcttgcctcgtgtcgtgtgtccctccaccgcccgccatgccgacgaggcttgccccccaccgccgatcgcacacgatggagaatggaagtggtgcggttgtaccttctaattcttcagataggtccgacaggtctgataaacctttggaccaaaagacaatgcgacggcttgcccaaaatcgtgaggcagcaagaaaaagtcggctgaggaaaaaggcatatgtgcagcagctggagagcagtaagctgaaacttgcacaactggaacaggaactccagaaagctcgccagcagggaatcttcatttctagctctggagaccaaacccatgccatgagtggaaatggagctttgacttttgacatagaatatgctagatggctagaggaccaaaataagcagataaatgagttgaggactgcagtgaatgctcatgcaagtgatagtgatctacgacttattgtagatggcataatggcacactatgatgaaatattcaaggtcaaaggtgttgctgcaaaggctgatgtgtttcatatactttcaggcatgtggaagacacctgctgaaaggtgcttcctatggcttgggggttttcgtccatctgagcttttaaagctcctagcgaatcacctcgagcctctaactgagcagcaaatgctgggtttgaccaacctccagcaatcttcccaacaagcagaggatgcgttgtcacagggcatggaagcactgcagcaatctttggcagagactttggctggatctctcggtccagcaggttcttcaggaaatgtggcaaactacatgggtcagatggccatggccatgggcaaactcgggacgctagagaattttcttcgccaagccgacaacctgcgacagcagacgttgcatcaaatgcaacgtatcctaacgatccgacaggcttctcgtgctcttcttgcaatccacgactatttttcacgattgcgcgctttaagttctctgtggcttgctaggccacgtgaataacgaagggccgtcagtattttgagttccctctgccttacggtgctgctgcgtcgttcgcagcgatgcatcacagatctttggtggtactgtttttgttgtacaattacttttggccgctgcttggtccaaattgtactcaggtgggtgtacaagtaggtcaatataatcctgtaagttatggtgatttatgggtgtgttagcaatgcaataataattagagagggcaggatcagggtttctgttgtttgtactggttagagatttagtcctaatgtaacttcctgggacatggggggcggaatgggaagagagtaacaagaatcttcctttggttactgtagtatatgttggtattgttgcatcccattttctcattttgctgttaggagaatgattattctgtccatttgtgtactttttgattaatgttgtttgtagcccc

SEQ ID NO: 145168 - DNA, 1786 bp, Zea Mays
cgcggtgccccacgtctcgccgcgcaggcagtgactgccactggtgtggtagctgtagcatcgcgatacttgctgtgtgcccctccgcggcttcgtatccacacgagtacaccaacgtgcacgcgtgctttttttgtacgcatgtgttaactttggaatcgtacttaagtttcctaatatagaagggcccctcctttttctcctgcaggtcatatgattgcaatgaatcctgacatggtactactgtcttggaaacaacttccaccaacggtcgatcctgtgaaacactaagacacccgttgccactggaaaggagagagcaaagtgatttgctgtctcctggcgatcgttgctcgtgaggcctagtgatggcagatgctagctcaaggactgacacctcaattgttttagacgacaacgacaagaatcataggatggagaatggaagtggtgcggttgtaccttctaattcttcagataggtccgacaggtctgataaacctttggaccaaaagacaatgcgacggcttgcccaaaatcgtgaggcagcaagaaaaagtcggctgaggaaaaaggcatatgtgcagcagctggagagcagtaagctgaaacttgcacaactggaacaggaactccagaaagctcgccagcagggaatcttcatttctagctctggagaccaaacccatgccatgagtggaaatggagctttgacttttgacatagaatatgctagatggctagaggaccaaaataagcagataaatgagttgaggactgcagtgaatgctcatgcaagtgatagtgatctacgacttattgtagatggcataatggcacactatgatgaaatattcaaggtcaaaggtgttgctgcaaaggctgatgtgtttcatatactttcaggcatgtggaagacacctgctgaaaggtgcttcctatggcttgggggttttcgtccatctgagcttttaaagctcctagcgaatcacctcgagcctctaactgagcagcaaatgctgggtttgaccaacctccagcaatcttcccaacaagcagaggatgcgttgtcacagggcatggaagcactgcagcaatctttggcagagactttggctggatctctcggtccagcaggttcttcaggaaatgtggcaaactacatgggtcagatggccatggccatgggcaaactcgggacgctagagaattttcttcgccaagccgacaacctgcgacagcagacgttgcatcaaatgcaacgtatcctaacgatccgacaggcttctcgtgctcttcttgcaatccacgactatttttcacgattgcgcgctttaagttctctgtggcttgctaggccacgtgaataacgaagggccgtcagtattttgagttccctctgccttacggtgctgctgcgtcgttcgcagcgatgcatcacagatctttggtggtactgtttttgttgtacaattacttttggccgctgcttggtccaaattgtactcaggtgggtgtacaagtaggtcaatataatcctgtaagttatggtgatttatgggtgtgttagcaatgcaataataattagagagggcaggatcagggtttctgttgtttgtactggttagagatttagtcctaatgtaacttcctgggacatggggggcggaatgggaagagagtaacaagaatcttcctttggttactgtagtatatgttggtattgttgcatcccattttctcattttgctgttaggagaatgattattctgtccatttgtgtact

SEQ ID NO: 145169 - DNA, 755 bp, Zea Mays
cttttcttcaattagtgctacccctagcctatcagatggagaatggaagtggtgcggttgtaccttctaattcttcagataggtccgacaggtctgataaacctttggaccaaaagacaatgcgacggcttgcccaaaatcgtgaggcagcaagaaaaagtcggctgaggaaaaaggcatatgtgcagcagctggagagcagtaagctgaaacttgcacaactggaacaggaactccagaaagctcgccagcagggaatcttcatttctagctctggagaccaaacccatgccatgagtggaaatggagctttgacttttgacatagaatatgctagatggctagaggaccaaaataagcagataaatgagttgaggactgcagtgaatgctcatgcaagtgatagtgatctacgacttattgtagatggcataatggcacactatgatgaaatattcaaggtcaaaggtgttgctgcaaaggctgatgtgtttcatatactttcaggcatgtggaagacacctgctgaaaggtgcttcctatggcttgggggttttcgtccatctgagcttttaaagcaatcttcccaacaagcagaggatgcgttgtcacagggcatggaagcactgcagcaatctttggcagagactttggctggatctctcggtccagcaggttcttcaggaaatgtggcaaactacatgggtcagatggccatggccatgggcaaactcgggacgctagagaattttctt

SEQ ID NO: 145170 - DNA, 1424 bp, Zea Mays
gtgagtctctctcctcctcctctgcttccttcccttcaccgcccttcttccctttttggaccctcctcctctcttcaacctcttgcggctgtgccaatccccccctgttctctgattgatccatcgatctggtccctcctcgtccccccttcccctccccttgcttgcttgcttgctcaggtaaaaaaaaaggagcaggaggagctgctgcactgcacaagcagaacccctcccctctctttgttcgcaagattctccctttcttgtcatatgccccgcaaaggttttgtttccactgtcgccgctccggccgagcaaagcacctgctgttcttgccacttccgatctctgcgtgcgcccgcccgccctctttcacgcccccccaacccccacccccacgggcgcatttgatttctttgcaggtgcagccgtgcaggtgaggtgatcgcgcgtggatgggagttcagacaatgtcgtcccactcccacggcgacgacggccgccgcggcctcccgcggcagggctcggtctacggcctcacgctgaccgaggtggagacgcagctgggcgagccgctgcggaccatgaacctggacgacctcctgcgcaccgtgctcccggcggcggcggccgtcagccctccatgggcgagatgacgctggaggacttcctctcccgcgccggcgtcgccgtcgatgccgccccgcattggatgcaccagtacccgcagcagcagcagtacgcgctgccgcggcccctaccgcttcccggcccggctctggacgccgcgtaccacggcgaccggccaggtgttttcctctcgcactcgcaggtggccgggcggaagcgcgccgccacgggggccgtggccggggacggcgtcgtggagaggacggtggagcggcggcagaagcgcatgatcaagaaccgcgagtccgcggcgaggtcccgggccaggaagcaggcgtacaccaaacgagctggagaacaaggtggcccggctggaggaggagaacaagcgtctcattgagctcaaggtgctgaaaccactggagccactggagccgccaccggcggagcagaacaagaagcagccgccgccgcaaccgaagaggaagcagccgcagccaccgccaccgcctccgccgccgattcagcagctgccgccgaagcaccgccacgacctccggcgaacgaattccgccactttctgatgacgagggcacgggggggggctctctctagggcgtctacgggggggtactgtactgtactgtacttgggatgctttgagatgtgaatgaacaaaaccctgctctgcttgcagagactctggtggtctgtggatgggtgcgtgcgtgccgccgttgcagtgaaagctagcagtgttgatgtgcattaatcgtgttgttcgttgttccatc

SEQ ID NO: 145171 - DNA, 1566 bp, Zea Mays
tccttcgcttgcatctcgcagactcgcactcccagtcggccagtgagtctctctcctcctcctctgcttccttcccttcaccgcccttcttccctttttggaccctcctcctctcttcaacctcttgcggctgtgccaatccccccctgttctctgattgatccatcgatctggtccctcctcgtccccccttcccctccccttgcttgcttgcttgctcaggtaaaaaaaaaggagcaggaggagctgctgcactgcacaagcagaacccctcccctctctttgttcgcaagattctccctttcttgtcatatgccccgcaaaggttttgtttccactgtcgccgctccggccgagcaaagcacctgctgttcttgccacttccgatctctgcgtgcgcccgcccgccctctttcacgcccccccaacccccacccccacgggcgcatttgatttctttgcaggtgcagccgtgcaggtgaggtgatcgcgcgtggatgggagttcagacaatgtcgtcccactcccacggcgacgacggccgccgcggcctcccgcggcagggctcggtctacggcctcacgctgaccgaggtggagacgcagctgggcgagccgctgcggaccatgaacctggacgacctcctgcgcaccgtgctcccggcctccgccgccgccgccgcaggcccgcccccgcccccggccccggcggccaagaagacggtggacgaggtgtggcgcgacatccagagcgccggcggcggcggcggcggccgtcagccctccatgggcgagatgacgctggaggacttcctctcccgcgccggcgtcgccgtcgatgccgccccgcattggatgcaccagtacccgcagcagcagcagtacgcgctgccgcggcccctaccgcttcccggcccggctctggacgccgcgtaccacggcgaccggccaggtgttttcctctcgcactcgcaggtggccgggcggaagcgcgccgccacgggggccgtggccggggacggcgtcgtggagaggacggtggagcggcggcagaagcgcatgatcaagaaccgcgagtccgcggcgaggtcccgggccaggaagcaggcgtacaccaaacgagctggagaacaaggtggcccggctggaggaggagaacaagcgtctcattgagctcaaggtgctgaaaccactggagccactggagccgccaccggcggagcagaacaagaagcagccgccgccgcaaccgaagaggaagcagccgcagccaccgccaccgcctccgccgccgattcagcagctgccgccgaagcaccgccacgacctccggcgaacgaattccgccactttctgatgacgagggcacgggggggggctctctctagggcgtctacgggggggtactgtactgtactgtacttgggatgctttgagatgtgaatgaacaaaaccctgctctgcttgcagagactctggtggtctgtggatgggtgcgtgcgtgccgccgttgcagtgaaagctagcagtgttgatgtgcattaatcgtgttgttcgttgttccatc

SEQ ID NO: 145172 - DNA, 1356 bp, Zea Mays
tccttcgcttgcatctcgcagactcgcactcccagtcggccagtgagtctctctcctcctcctctgcttccttcccttcaccgcccttcttccctttttggaccctcctcctctcttcaacctcttgcggctgtgccaatccccccctgttctctgattgatccatcgatctggtccctcctcgtccccccttcccctccccttgcttgcttgcttgctcaggtaaaaaaaaaggagcaggaggagctgctgcactgcacaagcagaacccctcccctctctttgttcgcaagattctccctttcttgtcatatgccccgcaaaggttttgtttccactgtcgccgctccggccgagcaaagcacctgctgttcttgccacttccgatctctgcgtgcgcccgcccgccctctttcacgcccccccaacccccacccccacgggcgcatttgatttctttgcaggtgcagccgtgcaggtgaggtgatcgcgcgtggatgggagttcagacaatgtcgtcccactcccacggcgacgacggccgccgcggcctcccgcggcagggctcggtctacggcctcacgctgaccgaggtggagacgcagctgggcgagccgctgcggaccatgaacctggacgacctcctgcgcaccgtgctcccggcctccgccgccgccgccgcaggcccgcccccgcccccggccccggcggccaagaagacggtggacgaggtgtggcgcgacatccagagcgccggcggcggcggcggcggccgtcagccctccatgggcgagatgacgctggaggacttcctctcccgcgccggcgtcgccgtcgatgccgccccgcattggatgcaccagtacccgcagcagcagcagtacgcgctgccgcggcccctaccgcttcccggcccggctctggacgccgcgtaccacggcgaccggccaggtgttttcctctcgcactcgcaggtggccgggcggaagcgcgccgccacgggggccgtggccggggacggcgtcgtggagaggacggtggagcggcggcagaagcgcatgatcaagaaccgcgagtccgcggcgaggtcccgggccaggaagcaggcgtacaccaaacgagctggagaacaaggtggcccggctggaggaggagaacaagcgtctcattgagctcaaggtgctgaaaccactggagccactggagccgccaccggcggagcagaacaagaagcagccgccgccgcaaccgaagaggaagcagccgcagccaccgccaccgcctccgccgccgattcagcagctgccgccgaagcaccgccacgacctccggcgaacgaattccgccactttctga

SEQ ID NO: 145173 - DNA, 1954 bp, Zea Mays
ttcccgctccgatcgacctgctccctccccaccaccgagcccatggcggaccagctcaccgacgaccagatcgccgagttcaaggaggccttcagcctcttcgacaaggacggggatggttgcatcacgaccaaggagctgggcactgtcatgcgctcgctggggcaaaatcctacagaggctgagctccaggacatgatcaacgaggtcgatgctgatggcaacggcaccatcgatttcccagagtttctcaaccttatggctcgcaagatgaaggacaccgactctgaggaagagctcaaggaggccttccgtgtgtttgacaaggaccagaacggcttcatctcggccgccgagctccgccatgtcatgacaaatcttggtgagaagctaactgatgaggaggtggacgagatgatccgtgaggctgatgtcgatggtgatggccagatcaactacgaggagtttgtcaaggtcatgatggccaaagttgagctcatggagcaggacaagagagccaaggtgctgtgcctgcacggcttccgcacaagcgggagttttttgaagaaacagatcagcaaatggcacccttccatatttcagcagtttgagatggtcttccctgatggcctcttcccagctggtggaaagtcagagatagagggcatatttccaccaccatacttcgagtggttccagttcaataaggaattcactgaatacacaaatctggacgagtgcatttcatatctatgtgattacatggtgaaaaatgggccttttgatggcctgctcggattctcccagggcgcaacactttcggcccttttgataggctaccaagcacaggtaatttttactcctaaattctgtaatatttgctgtaatacttgtgttctaaattatagaggtagcacaaagtacaacaaacagaccaccttttaccatgcaataaagctcttatttagggcaagttgctgagcaatcatccaccaattaagttcatggtctcaatatctgggagcaagttcagagacccaatcatctgtgatgtcgcttacaaagacccgatcaaggtgaaatcagtgcacttcattggagaaaaggactggctcaaggtaccttccgaggagctggcttctgcctttgatgagcctctcatcataaggcatcctcagggtcacactgtccctaggcttgacgacgtgtctgtgaaacagctttctgaatggagctcacacgtcctggaagacctcaagagtgcagatgttcctgaggccttagattcaggcaaaccatctgataaggaggctgctggtgcggaattcacagaaaacctggtgaaagcttgaggcatgctcactagtcacttcagccttgttcgattatttctatctcacatggattgacatcgaaacgaacaatcccttccatggcatggctgcatctgggacttgtaccgtttttactatgatctgagtagtgcgtggaacttgtttgatcgcgtgtgtattgcatttggcaaagcaataaatcgttatttagagctacaactgaaataaatggatccaaacaactttttttttttgcgagcgaagtttcaccaaccaacaaatactctattctagaatgctatggagaaaattgaaccaatgaatatgaatagctcaacaccatattcagtgtttcactacaaacaaccagccttctgttctgtttccatctacctcttcattcaccccagaccatcattagcaggtctttgtctagcgaagcctataatatgtacactgggcacaaaacttgtcctttggaacgaacaagagctatatgtacagcgaaactgacaatgtattcctcatctcgcaactgtttcatggcgaggagcttctgtcctggacctcatcatcacgcgcccaaacgacgtccttcagctccgtggacagagttttgt

SEQ ID NO: 145174 - DNA, 1835 bp, Zea Mays
ttcccgctccgatcgacctgctccctccccaccaccgagcccatggcggaccagctcaccgacgaccagatcgccgagttcaaggaggccttcagcctcttcgacaaggacggggatggttgcatcacgaccaaggagctgggcactgtcatgcgctcgctggggcaaaatcctacagaggctgagctccaggacatgatcaacgaggtcgatgctgatggcaacggcaccatcgatttcccagagtttctcaaccttatggctcgcaagatgaaggacaccgactctgaggaagagctcaaggaggccttccgtgtgtttgacaaggaccagaacggcttcatctcggccgccgagctccgccatgtcatgacaaatcttggtgagaagctaactgatgaggaggtggacgagatgatccgtgaggctgatgtcgatggtgatggccagatcaactacgaggagtttgtcaaggtcatgatggccaaagttgagctcatggagcaggacaagagagccaaggtgctgtgcctgcacggcttccgcacaagcgggagttttttgaagaaacagatcagcaaatggcacccttccatatttcagcagtttgagatggtcttccctgatggcctcttcccagctggtggaaagtcagagatagagggcatatttccaccaccatacttcgagtggttccagttcaataaggaattcactgaatacacaaatctggacgagtgcatttcatatctatgtgattacatggtgaaaaatgggccttttgatggcctgctcggattctcccagggcgcaacactttcggcccttttgataggctaccaagcacagggcaagttgctgagcaatcatccaccaattaagttcatggtctcaatatctgggagcaagttcagagacccaatcatctgtgatgtcgcttacaaagacccgatcaaggtgaaatcagtgcacttcattggagaaaaggactggctcaaggtaccttccgaggagctggcttctgcctttgatgagcctctcatcataaggcatcctcagggtcacactgtccctaggcttgacgacgtgtctgtgaaacagctttctgaatggagctcacacgtcctggaagacctcaagagtgcagatgttcctgaggccttagattcaggcaaaccatctgataaggaggctgctggtgcggaattcacagaaaacctggtgaaagcttgaggcatgctcactagtcacttcagccttgttcgattatttctatctcacatggattgacatcgaaacgaacaatcccttccatggcatggctgcatctgggacttgtaccgtttttactatgatctgagtagtgcgtggaacttgtttgatcgcgtgtgtattgcatttggcaaagcaataaatcgttatttagagctacaactgaaataaatggatccaaacaactttttttttttgcgagcgaagtttcaccaaccaacaaatactctattctagaatgctatggagaaaattgaaccaatgaatatgaatagctcaacaccatattcagtgtttcactacaaacaaccagccttctgttctgtttccatctacctcttcattcaccccagaccatcattagcaggtctttgtctagcgaagcctataatatgtacactgggcacaaaacttgtcctttggaacgaacaagagctatatgtacagcgaaactgacaatgtattcctcatctcgcaactgtttcatggcgaggagcttctgtcctggacctcatcatcacgcgcccaaacgacgtccttcagctccgtggacagagttttgt

SEQ ID NO: 145175 - DNA, 772 bp, Zea Mays
gttttcacgctccaggttgcatcacgaccaaggagctgggcactgtcatgcgctcgctggggcaaaatcctacagaggctgagctccaggacatgatcaacgaggtcgatgctgatggcaacggcaccatcgatttcccagagtttctcaaccttatggctcgcaagatgaaggacaccgactctgaggaagagctcaaggaggccttccgtgtgtttgacaaggaccagaacggcttcatctcggccgccgagctccgccatgtcatgacaaatcttggtgagaagctaactgatgaggaggtggacgagatgatccgtgaggctgatgtcgatggtgatggccagatcaactacgaggagtttgtcaaggtcatgatggccaagtgagccacagaaccataatctgaaggcagagaagattatgcattgcatattagtcaagatgcaactttttattccatcgacttctagtgaaacattctgctagttgtagttgctgaaaaaggcaatgtagttcctgctttgttcttccctccagtgtgttttcagaactgttgtttcatgtgaacttgtaatgattgccctctctgctgtgtcttgattgcagttaaaatcatatgtagtttcaccccacccacacatcaacttctgtttcacgctgtttgtatcaatggatggcccgttgtttttagtgcaatgatctttagttaccgtggcatatgctctttgtttagtgcaaatttatttcaaactgctggtccatattgttg

SEQ ID NO: 145176 - DNA, 1001 bp, Zea Mays
tagcccaggggtagttttgggaaaaaagatatttggatgctggcgaatgtgacggccacgtctagtggaagcgcgtataaatcgtcccttctttctttcctcacccgcccctgatccactctccgcttcccgctccgatcgacctgctccctccccaccaccgagcccatggcggaccagctcaccgacgaccagatcgccgagttcaaggaggccttcagcctcttcgacaaggacggggatggttgcatcacgaccaaggagctgggcactgtcatgcgctcgctggggcaaaatcctacagaggctgagctccaggacatgatcaacgaggtcgatgctgatggcaacggcaccatcgatttcccagagtttctcaaccttatggctcgcaagatgaaggacaccgactctgaggaagagctcaaggaggccttccgtgtgtttgacaaggaccagaacggcttcatctcggccgccgagctccgccatgtcatgacaaatcttggtgagaagctaactgatgaggaggtggacgagatgatccgtgaggctgatgtcgatggtgatggccagatcaactacgaggagtttgtcaaggtcatgatggccaagtgagccacagaaccataatctgaaggcagagaagattatgcattgcatattagtcaagatgcaactttttattccatcgacttctagtgaaacattctgctagttgtagttgctgaaaaaggcaatgtagttcctgctttgttcttccctccagtgtgttttcagaactgttgtttcatgtgaacttgtaatgattgccctctctgctgtgtcttgattgcagttaaaatcatatgtagtttcaccccacccacacatcaacttctgtttcacgctgtttgtatcaatggatggcccgttgtttttagtgcaatgatctttagttaccgtggcatatgctctttgtttagtgcaaatttatttcaaactgctggtccatattgttg

SEQ ID NO: 145177 - DNA, 460 bp, Zea Mays
tagcccaggggtagttttgggaaaaaagatatttggatgctggcgaatgtgacggccacgtctagtggaagcgcgtataaatcgtcccttctttctttcctcacccgcccctgatccactctccgcttcccgctccgatcgacctgctccctccccaccaccgagcccatggcggaccagctcaccgacgaccagatcgccgagttcaaggaggccttcagcctcttcgacaaggacggggatggtaaggttcccttccctcctcccctcacacccctgttcgtgttccttcggatcggatctcagtggtgatgttagacgtccgcggctgcctacgtagtggcattgccgcccgaaaggtttgtttaggtggggtagatccgaaacaggccggatctggaccatgtccgcggcggggcggcgggacttgatcgcgtagctgtcgtgtgcatttctccct

SEQ ID NO: 145178 - DNA, 855 bp, Zea Mays
cagagtcctgtaactccgttgcaaagagctacagaagtgcctcctccggtgttcaaccaaatattgatgaatcaacaacaagaggattctgatggtccgcctcaaaagaaaattcccacgttgctcatgtggactcttggagggaggaatatctacgttgaaggatcatgggacaactggacatcaaagaaactcgttgagaaatccggaaaagatcacaccattcttttgatgctttcatctggagttcaccgttatagattcattgtagacggagaaagaagatttatacctgaccttccctgcgaaactgacaatatgggtcagattgtgaacctagtagatgtccatgacttcgttcctgacagcgtggaaagtgtgtctgagctgatggcccctccctccccggactccagctacggtttccatgttcccggcgaaaaggagttctccaaggagcctcctcagctgccgtcccagctctacctcggcgtgctgaattcccggagcaccgaagaaggctgcgcgaggccgaggcacgtcgtcctcgaccatctctacatcgagaagggctggggcgcacagccgctggtggccctcggctacacccacaggttccgctccaagtacgtcacctgcgtcctgtacaaggccatcgagcggtagcctgaccattgctggctgtgctgttgtgggccggcaactatagctagccgtggtggacttggcagttcattcaggtttagaagtctctcctgcataattcgttcatctgctaaactaaagaggtgggtgcaaatccatgtgaatcttgttttttttttagctgccagagcttacatattcttattattc

SEQ ID NO: 145179 - DNA, 979 bp, Zea Mays
cacgtccaaaaaccaaccaaagcacacacacactctgccggccaccatgccctcctctgcctccgctgacgccgagggcgcccgcagcaaacgcaaaagaggctcgtcggccgcatgcgcatccgacggcagcgaccagcagggcccgtcgtcccactggctgacgccgcgcgcgcagcaggcatactcctccaagctcctccaggcgctgcgcctcgtgcgcggcggcactggcacacccacctgctccgcctccgccccggcggtgcgcgacgcggcctaccgcgcgctggccgtggcggcgcggggtcggtcgcgctggagccgcgccatcctggcacgcagccgccggcgccgggcgctcctccgcgcgcgccgaccgccgcccccgacgccaaggcaccgtcagcggcggcatcagcagcagcaggacgagcggccggcgggagggctggctggcagggccaaggtgctggcgcggttggtgccagggtgccggagcctgtcgctgcccgcgctcctggccgaggtgtccgactacgtcgccgcactggagatgcaggtgcgcgccatgggccagctcacgcacgacctcgcgtcctcgtcttccgcgccgacgacggcgtcaacgatgattgctccgccctagctcggctcaggcgctcagctccttctcttggaatggatttgggtggcaatggaaatgggagatgcctgtacatttcaactagctgttagagttgatcgatcgattttgcttggctttttttggattggttttggacaatatttgatttgatctgtctcttgctttgcttaaactgtaaggtctcctttggtcttgttatcatttgctaagactggcgctaaagaagtcgtgtaagctgaatgtgaagtcgtgtaagctgaatgtgaaatgatgcttcacaagtgtaaacgtgtgcgatgtttgaatgcaaaagcaagcaagtaaccaaaa

SEQ ID NO: 145180 - DNA, 99 bp, Zea Mays
acgcacacggacgcacgcatatatacgtcctcttcttcttcttttcttttttttttaaattcaaagtgatgatgagctttcgttctcaggtgaaacttc

SEQ ID NO: 145181 - DNA, 2028 bp, Zea Mays
agcgagcaccgtcgtcgtccaaggtgatcccaatggcccatgtgcggctgcttctcccctccactagctccgatcacctagctagcctctcgctgtactacagatcggacaggggccgcgcaggcacaggcgcagcgtcccaaccaatcgtatttactccgatccgccccgccactgcacagccgccttctgccctccttccatcgcgctcgctcgctcgctctcctatataaacgccctgcagtcctgcagcacctaccagtccagtctcgcagagcagatagcatcagtgcctactgcggtactgcatagctagcttagcttggtcttcgatctcgaccagagccagagagtgtggtgtgaccgtgtgagcgacgatggggaagcacgtctgggcggcagcgctcatggcgctggccgtgattgtcgggctcggtgtgccccccggccgcatcgccgaggcgcgcaccttagagaaggacgacctgctgggcggcggcggtgactttggtgctggagagggaggaggcttcggtggtggtgctggtggaggtcttggaggtgggtttggtggaggaggaggccttgggggaggcggcggtgctggtggtggttttggtggcggggctggtcatggtggtggccttggaggtggcttcggaggtggaaaaggtggtggtgcaggtggaggtggtggtcttggagggggtgtaggaggtggctttggaggtgggaaaggtggtggtcttggtggaggtggtggcctcggtggtggaggtggtgcaggcgaaggcggtggtcttggagtaggtgccggtggaggaggtggactaggcggtggtgccggtggcgggtttggtggtggcgcaggaggaggtgttggtggaggtggtggccttggtgacggtgctggcggtggtgctggagctggcagtggtcttggaggaggtgctggtggaggaggtggactaggcggtggtgccggtggcgggtttggtggtggcgcaggaggaggtgttggtggaggtgcgggaggcggtgctggcggtggtgctggagctggcggtggtctcggtggtggtgcaggcagtggtgtcggtggtgggtttggaggaggcaaaggcggaggctttggtggtgggattggcgggggcgggggcgcaggtggtggtgccggtggtgggttcggaggaggcaaaggtggcggttttggtggtggcaagggaggtggttttggcggaggcgccggtggtgggttcggaggaggcaaaggtggtggttttggcggtggcaagggaggtggtttcggcggaggtgcgggtggtggctttggaggaggcaagggtggtggttttggcggaggtgcaggtggtggcttcggaggtggcggaggttcgggtggtggcatcggtggtggactctagaggtggcgggagctcggcgcgcgcacgttgagtgcgtgcatgccatgaaattaaaaagcgatacatggagtgtgtggtacggtatggacattgctagagttacattacatcatcactagtatatataaggttgactcttatttgtaagcctaatgaaagtgaataattggatgcgttatgtaagcctactctactatatatatgtttgttttggaaaatcgagggagtgtgttacttgactatccccaatcacactcataaaaacttgacttgtgtgttgtttgtactcgaccaattatatactacaatacatatttggtcatgcctgtgtgatcgctgtgctttgtgcttttaggaaggaatgcacgtgcgcgcaatgggtgttaatgagaaaatagaacacaagagagagtgcagcttcaaaattgataagttatcctgatatcgtcttggtattgtattgaatggtacacattagcagagagtgaaatatgtgataattcacaaaactggcgtacttgttagttccacgagtcttgtttttttttttgaaagggtaaatgatttagttaaaacacctctatttttttttaaaaaaaaaaaa

SEQ ID NO: 145182 - DNA, 2319 bp, Zea Mays
cacactcccggccggaatctgaaccgaatgaagtctagtgcagtggtggtggtgatgcaatctcgccgttgccgtccgtagcaaccgcacgcttcctcgctcgccgcgaaccctagagagcaggtgtcggtgtcatggccttctggtggccgctgctggtgctcgccgccgcatacgcgctctgtcgcctgctcctcttcctcatcccgcccaccgtcccatccatcgacgtcgacgcctccgacgtgttggccaaggaggacagcttcatctacataccgagaaggggtaaatcaactcagactgacaaggtccaatgctatgaaccagcgaccatgaaatacttggggtacttcccagtggtgactcctgatgaggtcaaggaacatgttgcacaatccaggaaagctcaaaggatatgggcaaaaagcagcttcaagcaaaggcgccagtttcttcgaatccttctcaagtatatacttgaacatcaggatctcatatgcgaggtatcatctcgggacactggaaagactatggttgatgcttcattaggagagataatgaccacctgtgagaagattacctggcttttggatgagggcgagaagtggctgaaacctgaatacagatctactgggagatcaatgctgcataagagagcaaaagttgagttttaccctcttggagtgattggtgcgattgtatcttggaattatcccttccataatgtttttaatccagtgctagcagcagtattctccggtaatgcagcagttataaaggtctcagaacatgcgacttggtcgggctgcttttattttcgtattatacaagcagctctttcagctgttggtgcacctgagaatctggtgcacataataactggttttgcggaaacaggccaagctcttgtatcatcagtagacaaaataatatttgtgggatcaccaggtgttggaaaaatgatcatgaaaagggcgtcggagactctaatacctgtaactctggagcttggtggcaaagattcatttattgtgtgtgaagatgtagatttacccagtgttgttcaagttgctactagagctgctctgcaatctagtgggcagaattgcgctggtgctgaaagattttatgttcacgatgacatctattctgcctttgtttcacagatagtgaagacagtcaaatctataagtgttggccccccattatcaggcagatatgacatgggtgcaatctgtatgattgagcactctgagaaacttcagaatcttgttaatgatgctctagacaaaggtgccgaaattgccgtcagggggagttttggcaatcttggtgaagatgcagttgatcaatttttcccaccaactgtcctggtgaatgttgatcacacaatgaaaattatgcaagaagagacatttggacctattataccaatcatgaaattcagttctgatgaagaggctatcaaacttgcaaacgactcaaaatatggtcttggctgtgctgttttttctggcaaccagaagcgtgccatcagaatagcgtcccagttacactgtggggtagcagcaatcaatgattttgcttcaagttacatgtgccagtctttgccattcggtggtgttaaagacagcggattcgggagatttgctggcgtagaaggcttgcgagcttgctgccttgtgaagtctgttgtagaagatagattgtggccatatattagaacagtgatcccgaagcctatccagtatcccgtctcagagcatggatttgagttccagcagttgcttgtggagactctgtatggctatagcgtgtgggacaggttgcggtcccttgtgaatcttataaagatggttaccgagcagaattttgccccgacttcaaatgcgaccacgaagaaaaggcgatgagacgaatgcccggggggttcattgaatctgtttatggtaagtctgatctctggacgctgtaaacctccccaagctgctgtgatcggccttgtttgctctctgaaacaatctcgagcctgggagcttgtgtattcaagcgctttagctttcatttcagaaccttcttttctctctctctcccttgcttattaacacccaaatgcgtgggcaatggaaatgaaattccactgtggatgtgctaggaactgtcaatgtgctgccgctgctgtgatttgtgaacatcatcggtattgagggtgaaggtgtggtgtaccatgcatgtgctgggattaaatgccctcgcgcatgtagcaaacagtacgctttcgcgcaattaattggcctgcagcctcctctttcgcgc

SEQ ID NO: 145183 - DNA, 1989 bp, Zea Mays
caagtgagagataccaggcgaagaaaaaagaaaccgcggtcgggatgccagagcagcgctaagatccgtgacgtcgagcgcgggaccaaaatctatagtggtctcaatatgattttttaaaagagactaaaatggggaaaaaactggctagcacctagcacgtatgacattgctcgctgccacttgggtcccatgcgccatagctgggtcccctctcgcggccacttgggcccatcatgcacgctaaccccacacgcagaggacggcccatggcgtctgttggtctgccctgccctgccagctgccatctcatctatatatatgcggcatcaggtcggccactccagtcttccaaaacgaagcaaaagcaaccgtcgagcttgcaacgccttacgcctccacactcaacagtcatggtcgtcatgggcaaggagcagcaacacgaggaggaggaggtgcaagggaaggtcgtccaagaagaagtgcaagtcgtccaagagacggtggtgccggtgccgtcggaggaggacaaggaggccgaggcggcgctggtgcacaagatctccagcctggccgccgccatcgcgaagctgccatccctgagcccgtcgccggaggtgaacgcgctcttcaccgagctcgtgacggcgtgcatcccgcgcagcagcgtggacgtggagcggctgggcccggagctgcaggagatgcgcggcgggctgatccgcctctgcgccgacgcggaggcgctgctggaggcgcactactccgacctgctggcctccttcgacaacccgctggagcacctgtcgctcttcccctacatcaacaactacatcctgctgagccagctggagcacgggctgctggcgcggcacgtgccgggcccagcgccggcgcgcgtggccttcgtcgggtccggcccgctcccgctgagctccctggtgctcgcggcgcgccaccttccgggcgcctccttcgacaactacgacatctgcggggaggccaacgaccgggcgcggcgcctggtgcgcggcgacggcgcgctccaggcgcgcatggcgttccgcacctcggacgtggcggacgtgacccgggagctggcgtcgtacgacgccgtgttcctggcggcgctggtgggcatggcggccgaggagaaggcccgcgtggtggcgcacctcgggaggcacatggcccccggcgccgcgctggtggtgcggagcgcgcacggcgcgcgcgggttcctgtaccccgtggtggaccccgaggagatccggcgcggcggattcgacgtgctcgccgtgcaccacccggagggggaggtgatcaactccgtgatcatcgcgcgcaagcccgttgccgtcgacgcgcacgccaccggcggggtggggcacgcgcacgcgcacgcgcacggcgccgtgctcaaccggccctgcctctgctgcgagatggaggcccgggcgcaccagaagatggaggaggtggccgtcgagcagctgccgtcctaggcaggcgcacaccggcgtcctcgctttcttgtccgtccggccgcccatttgattttcggagttgcatctatctcatctaatatggatccatccatccatccatctatagcagtattatgtatgcatccacatggtaataatctggctgaccgcatccgcatatcgtcgtctcatcgtccatctataccttgaaagctactaattaattactgagttattattactactgtttttactactactacgtacaactacctcatctagctggtgtattaattgattttgtttgttactgctgtactactgttgttgtggagatgaaccatgcatggagtggttagtcactctttagtactttcatgacgttgttttcaacggtcatatcatcatcattgttgttactgctgctgctagctcatctagctgctgtattgtctatatactgatgcatgtgtggaaacgaatcatggagcggttattgttc

SEQ ID NO: 145184 - DNA, 1310 bp, Zea Mays
actaacgacacgagtagtactgatcagggtcagggaccgtccgtagtttcagtcccgctcccgcagtctggttcgtcttctcttctccccacctgtctccacaattccccataggaggagggggaggtagagaagcgcgaatggagagcaggaacgtagtggtgtgcgacaatggtaccgggtatgtgaagtgtggctttgctggtgagaacttccctacatctgtgttcccttgtgttgtcggacgaccgctacttcgctatgaggagtcacttcaggaacaagaattgacggatattgttgttggagcagcttgtgctgacttgagacatcaacttgatgtatcatatcctgttaccaatggcattgttcaaaattgggatgacatgggccatatctgggatcatgccttctacagtgagctcaaggttgatccatctgagtgtaaaatcctactgacagatccaccactcaatcccgtgaaaaaccgagaaaaaatgatcgagacaatgttcgagaaatataactttgctggggtcttcatccagatccaagcagttctttcactgtatgctcaaggcttgctaactggacttgtgatagattctggtgatggtgttactcatgtggtgcctgtagttgatggatactcttatccacatctgacaaagagaatgaatgtagctggaaggcatataacatcttatcttgttgacctactctcaaggagagggtatgctatgaataaatctgctgactttgagactgtcagagaaataaaagagaagctatgttatataagttatgattacaaacgagaataccagctaggacttgagaccacaatccttgtgaaaagttacactcttccagatggaagagttattaaagtaggcactgaacgatttcaagctcctgaagctcttttcactcctgaactgatagatgttgaaggtgatgggatggcggatatggcattccgttgcattcaggaaatggatattgacaacaggatgacgctctatcaacatattgtcttaagtggaggaagtaccatgtaccctggtctgccaagtcggttggagaaagaaattcttgaccgttatcttgatgtagttttgaagggaaacaaagatggcctaaagaaattacggctgaggatagaggatcctcctcggagaaagcacatggtgtatctgggaggtgcagtgcttgctgggatcatgaaggatgcacctgagttctggataaccaggcaggagtaccaggaagaaggtgtagcgtgcctaaggaagtgcgggcagtcataa

SEQ ID NO: 145185 - DNA, 1609 bp, Zea Mays
ctacaagattattttgaaatttcgacgagatttgtcggaacaatgcgactccacttcagcagtgcgcagcaagccgccgccgccatttcgaaactcccgatcgccgaccgttgctttctttcccctcagcctcgccacttcagagagagagagagagagagaagagagagagagagagagagctaacgatggcgtccagagacgcggccagcagccccaaatcagcgccgcgtcgccatgggccggcggcgcccaagaatggcgccgacctgctcagcccacggttccggtcggctgccgcgctggccggctgggacgaggagtccgtcctccttgccgcgatggtcgtcgacgacaccccagtccgcgactcccgtcgcaagaggcgggcctccacctcctccgtcggcggcagcgccggatccagcaccaggaagaggaggccgcgcaggctgtctccggccaagatcccgccggtggttttcgcgctcgacgacgaaaagtcggacactgcggcagatagcaaatcggaagtgaaggccgccaaggaggaagagaagcctgtccttgtgggcgacaaggaggcgtccggttctggcgagaaagcagtggccgcggcaaacatgccgtgcatggatcggctccgggaggagctctcttgcgcgatttgcctggacatctgctttgagccgaccactacgccttgtggacacagcttctgcatgagatgcttaagacacgctgcagccaagtgcgggaaacggtgtcccaaatgcaggcagttcatcagcagctcgaaatcgtgcaccatcaacactgtgctctggaacaccattcagctcttatttcccagtgaggttgaggcaagaaagggttcgagctcatcaccttcaccatgcgacaaggacgatgtgagagctaataggttctcacaaggtggccccggtatgagaactaggagcaggagcagcggcagcggcttcatcagcagcgagggtaggacaagaagcagcttcatcgaacccggcgccagtgcgaacttcatcgtcagcacatatggcagcgcaagaagcagtaacagcaggaggggcttcgtccctgcctcgcagctgctgttgacaagattagagcaatctgaagatgccgcggcgttggcgtacaggttgcaacaggaggagttcgtgaatgcctttgaggagcctgagcaggagaggcagccacgcgacgccgtgtccacagcacgagacaccctgagagccatggcctcccgggccatccgcctccgtgctagaggctggcctgtttagtactactattgctctgctctgcatggaagttgagacctctgaacatataggcatcggtggggttgatagctctcgacattcactagggactctagaagatgtctgccccacgattgttcacgggaaggcccagcgacagctatgggctcccaactagaggagaagacgcgtaggctcaaagctgctgtcgccggtgagttgtaaaaatgctaaaaatctcattctctaagttttcagatgaagtgcacctagtaagacatctctagcagcttattcatactcatatttaaaataaactctac

SEQ ID NO: 145186 - DNA, 1568 bp, Zea Mays
ctacaagattattttgaaatttcgacgagatttgtcggaacaatgcgactccacttcagcagtgcgcagcaagccgccgccgccatttcgaaactcccgatcgccgaccgttgctttctttcccctcagcctcgccacttcagagagagagagagagagagaagagagagagagagagagagctaacgatggcgtccagagacgcggccagcagccccaaatcagcgccgcgtcgccatgggccggcggcgcccaagaatggcgccgacctgctcagcccacggttccggtcggctgccgcgctggccggctgggacgaggagtccgtcctccttgccgcgatggtcgtcgacgacaccccagtccgcgactcccgtcgcaagaggcgggcctccacctcctccgtcggcggcagcgccggatccagcaccaggaagaggaggccgcgcaggctgtctccggccaagatcccgccggtggttttcgcgctcgacgacgaaaagtcggacactgcggcagatagcaaatcggaagtgaaggccgccaaggaggaagagaagcctgtccttgtgggcgacaaggaggcgtccggttctggcgagaaagcagtggccgcggcaaacatgccgtgcatggatcggctccgggaggagctctcttgcgcgatttgcctggacatctgctttgagccgaccactacgccttgtggacacagcttctgcatgagatgcttaagacacgctgcagccaagtgcgggaaacggtgtcccaaatgcaggcagttcatcagcagcagctcgaaatcgtgcaccatcaacactgtgctctggaacaccattcagctcttatttcccagtgaggttgaggcaagaaagggttcgagctcatcaccttcaccatgcgacaaggacgatgtgagagctaataggttctcacaaggtggccccggtatgagaactaggagcaggagcagcggcagcggcttcatcagcagcgagggtaggacaagaagcagcttcatcgaacccggcgccagtgcgaacttcatcgtcagcacatatggcagcgcaagaagcagtaacagcaggaggggcttcgtccctgcctcgcagctgctgttgacaagattagagcaatctgaagatgccgcggcgttggcgtacaggttgcaacaggaggagttcgtgaatgcctttgaggagcctgagcaggagaggcagccacgcgacgccgtgtccacagcacgagacaccctgagagccatggcctcccgggccatccgcctccgtgctagaggctggcctgtttagtactactattgctctgctctgcatggaagttgagacctctgaacatataggcatcggtggggttgatagctctcgacattcactagggactctagaagatgtctgccccacgattgttcacgggaaggcccagcgacagctatgggctcccaactagaggagaagacgcgtaggctcaaagctgctgtcgccggtgagttgtaaaaatgctaaaaatctcattctctaagttttcagatgaagtgcacctagtaagac

SEQ ID NO: 145187 - DNA, 932 bp, Zea Mays
gccgcagcttgccgccccggagcgcggcgtcgtacaggagcttgaggtggtccaggtcccggaggcagtccgggagcgccccgaccgactccagcaggtcggcgcgcgctcgcagcgccgggatggaggccgggtccagcgccagcgcgcggttgcagtccgcgatggcgtccgcggggcgccccgccgaccggaacgcggcggcgcggcccaccaggcaggccgtggcgaaggggtgcggcagcacgctgcggcgcgtgtccagcaccttgttgaaatgccgcactgcctcgccggggagcccggcgtccagcgccgccaccgccgccgcgcgccgccggaggaggagcttcacgtgcgcgagcagctgcgacacggactccgcctcggacgctgcggcgctgttggccgtcagcgggttcgacggcgagaagctgtcctccgaccagcacacgctctcgcgccggaacgccgcggtggcgaggcggcgggcggtttggaggagcaccaccgcgtcttccatcaggccgaggtggaagcaggctctgcccaggaccaggtacctccactgcgcctcggtgctcgagctcctgcagaagctggcgacgaggcggcgcttgaggtcggacacgtggaggcagcagaggaagcgggcggcgccggcgcaggcgtcggaacggtcgcggtccccggaggcagacgagcaggacgaggatgacgaggcgcaggtggcgtcatcgtcgcccgagcacgacctggcgtaactggggatgtagtcgcggagcatgtcggcgacgtcgcggtagcgcctgagcgcgaggagcgcgcgcgcccggagctccagcgccgcctcggcccgcggcgacatctccagggcggccgtgaccaggccgagcgccgccgccgccgccgccgcgtcgtcggtgtcctgc

SEQ ID NO: 145188 - DNA, 4426 bp, Zea Mays
gccctcgccatgcccccgcacggccccgaagaagacgccgccgacgcgcacctcttcgctggcgtccgcttcgcgctccacggcttcgaccagatctccgcgtcccagtttcggttggagatagagcggtgcggcggcgtccacgcgggaggttgggacgcagactgcacccacgttatagtttccaacaccttatatgatgatccagtgtgtgtggcggcgaggaaggccgggaagaaggtcgtcgttgatcagtgggtggaagacagctttgatctcggagaattggcagatgcagatcgggtgctatatgctccagtcagagattttaaaggcattccaggttgcgataaacttcacatttgtttgacagggtaccagaagaattggcgcgacgacataatgaaaatggtttctttgatgggagcaaacttctccaagtctctggcagcaaacataattacccatctcatttgctacaaatttgaaggtgagaaatacgaacttgctaaaagggtgaatataaagcttgtcaatcaccggtggctggaagaatgcttaaaggcttgggaaatccttccggtcgaccattatacgaaaagtggttgggaagtagagataatgggagctcaagctaaggactctgaagatgaaacagaatatgctggtacatgctcattaagtagcagacgtattgacagaaggacccctattagagagatcagcacaaaatctcatgttgactctgctctacatgcacccagtggaggtcctactgtctctgctagcaatgtagtgggtgctactggaaaacacttgagcactccagagcagtttatgaaagcacacgatgcgagcacaaaatcatctgacattagaactgactcaggaactgcccctgacacaaagtgtgctgcaatgtctgttgataatgatactcttaaacctacccgctctcacatttaccacaatgagaatgatgaggttcctgcagataaggccagtagggatgaagctaaagatgatcacagaagggaacttgacaccagggatagtacccttcgtactcccagtgtacataaaagcattgcacccactattccaggagacaatatagagaacactaacaggaattgtttccatggtttcagtcagatcaatgtcaacagtgatcttcagttaaactcttctgaagaaaatttctccaagaaaatattacactcaacaaacttgagcagaaaggtagaccagaaggatgacgggcatgtacctgatcccaaacccaacatttctcagtcatcagttgaagaaaacctaaacatgtgtgagtttaatccaagatcagaaggcaattcagcatcaagaaatgatcaacccttaggctattcaagaaggcgatcttcaaagtcaggatcacttaatgttcataggaagaaaagcattctttcttcagtcagttcaaaggcaccaaatgaagccccagactcgggaagtggaatatcaagcgcaactgcttctgatgtgggtagaagccccaccgaacctaccaaagttgatggtcatgtaaacagtggtccaactatgaattcaacagagaaccagatgtccggttgtaaaagcaacctgttaagttataggagaacatctttgaagcttgtaagctctgctgaagtagaaaagcttcctgaaaattctgttaatgataagaacatggtggagccagatgtagtaaagacaccagcactgcacgaggcaacaactgaggagccttccccttccgtctgttctgaagttagaaaagaaagtttaggtgttcatcagaatagggacgctgaaatgactgatgctcagctgctaagcaaaactgaagatgcagctccttgctcaaaacctgataaagtggtttcttgtcagaactcgggactagaaggttgtaaagatgtcccagttaacaagatcactgatgaacatggaatatttccctcgaaaatatcaacttctagagtgaagaaggttggtgccaagcggtctcgcaatgccggcagtaaagctgctagtgaatttacaaatagtagaagtgaggttgcagctttgaagcctaagcatgataaagttgcttctcatgaaaacgtggaggcacaacagggagaaggatgttgtagtccaaatgctgctgaatgtacaccaccatctcctgcagaagccctgaacaacaaatcaacgaatgaagttctaaccagctcccagggccccaatcataagacaaacgaatcactagtggcttccaaggcggagtctgttaatatgactctgcaaagaaacaagaaggggaaccgcagaaagcttccaaacacttcaaatgcagatgaaaatcaaagaagttcatctcggacagtaccaaattccaaatcaggtaatttggttgcaaaggggtctcggactgctgatttcaatatatctgactcaccaactgtcgatgaaactgagacagtgccatcaaattcgagttttaatgaggcagttcctccaggaaatggtgaagaaaaacataaaaggctttcaagcagtgcaaacgcagatgaccctgaagcatgtacagcaaataaagtaccaaacaatagagtccgtaaggtcgtagccaagaggaagctatctgatgtccaaagccacaaatctggtagtgagccttgcaagactgcgaaggtattggtatctgaagttaaagttgtgtcaccagccagagttgcgcagagttctagaaatgctaacaaggtaacagtggttcaagacctgcagaacaccaatactggtaggacgaacgatacagttggatcattttgcaaagatgtcacggaagactgctcaaaagacatgcagagctctaaaactagaagcagcaggagacaaaagattgcagatctagtggatggttcaacggaccatgacaaggagaacatactagtcgatagtaattttacttccaatacaaaacgtggaaataacagcatgagttccaaatccaacacaaagacattacaaagtagcaaagctgtgcttgatgagagtagtgtgatcaaaaggaatggttatggaaccttggatgtgccagaaccaacatggtttattctaagtggacatcgcctgctgagaaaagagtatagggctatacttagacgtttgagaggtagagtttgcagggattcacatcactggtctttccaagcaacacaccttgtcaccactgagatgcgcagaactgaaaaattcttcgcagctgctgcggctggcaggtggatactgaagcctgattacttgactgctagcaatgaggctggcaagttcttagaggaagagccatttgagtggcacggtgaaggccttaatatcggtgatacgatcagcttggatgctccaaggaagtggcgccagctgcggcagcgtactggctatggcgctttctatgggatgcaggtcatcatatatggggaatgcattgctccaacactggacacgttaaaacgcgcgatcaggtgtggtgatggcaccatcttagcaacctccccaccttacacccggttctttaagtccagtgttgacttcgctgttgtatccgcgggcatgccaagcgcggacgcgtgggtgcaggaattcatgcggcatagcatcccctgcatcagcgcagattacctggtggagtacgtgtgcaagcccgggcaccccttgggcaagcacgtcctcttcaacatgcacgatctggccgagaggtccctgcagaagctcatgaagaaccaagaagatgctcccgggagctgttccgcttgtgggtcagacaaccgggaagtgccgatgctggtgtgcggcggcgacgggaggagccagtcttccggctgtggggtccggacgcatgccgattgctgcaaccctcccgtggaaggctgcgatggtggcgagtggctgtgcggtaggtgcgaccagcagaaatctgcaaagaaggctaagaagaccgctgcgaaaccgagggtgctgaaacagagatgattctggtttggcccgtacaagcgatgcaaaaggtcgtctcccaaggtaacgacgaatgatggcagcgggggtgctcttgctctctacaagttgatgacaactagctcgttgcctttggaaagcacccgtgcatgtgatctgatgaatgaaaacaaagtgatgggtgtaaacgtataaggactttagactggtgccaataaatattacgtatttatgtaaatgcacggatctgatggaatgctgtgatcaacttgaacatatatggtgcccatcaatctgggcattgggcgctgtcgaatgtccggtaaagcgcgctatttccggatcgtccttcatggttgtgtgcgtccgagtaaaggcaatggccgtgcaaaagtttcttcgacgg

SEQ ID NO: 145189 - DNA, 2817 bp, Zea Mays
cccccaaagatagttgctgtacctttatttttatttttatttgctgaactgctgaagtattgtatatgttgtcaccgcagcttaaaggcttgggaaatccttccggtcgaccattatacgaaaagtggttgggaagtagagataatgggagctcaagctaaggactctgaagatgaaacagaatatgctggtacatgctcattaagtagcagacgtattgacagaaggacccctattagagagatcagcacaaaatctcatgttgactctgctctacatgcacccagtggaggtcctactgtctctgctagcaatgtagtgggtgctactggaaaacacttgagcactccagagcagtttatgaaagcacacgatgcgagcacaaaatcatctgacattagaactgactcaggaactgcccctgacacaaagtgtgctgcaatgtctgttgataatgatactcttaaacctacccgctctcacatttaccacaatgagaatgatgaggttcctgcagataaggccagtagggatgaagctaaagatgatcacagaagggaacttgacaccagggatagtacccttcgtactcccagtgtacataaaagcattgcacccactattccaggagacaatatagagaacactaacaggaattgtttccatggtttcagtcagatcaatgtcaacagtgatcttcagttaaactcttctgaagaaaatttctccaagaaaatattacactcaacaaacttgagcagaaaggtagaccagaaggatgacgggcatgtacctgatcccaaacccaacatttctcagtcatcagttgaagaaaacctaaacatgtgtgagtttaatccaagatcagaaggcaattcagcatcaagaaatgatcaacccttaggctattcaagaaggcgatcttcaaagtcaggatcacttaatgttcataggaagaaaagcattctttcttcagtcagttcaaaggcaccaaatgaagccccagactcgggaagtggaatatcaagcgcaactgcttctgatgtgggtagaagccccaccgaacctaccaaagttgatggtcatgtaaacagtggtccaactatgaattcaacagagaaccagatgtccggttgtaaaagcaacctgttaagttataggagaacatctttgaagcttgtaagctctgctgaagtagaaaagcttcctgaaaattctgttaatgataagaacatggtggagccagatgtagtaaagacaccagcactgcacgaggcaacaactgaggagccttccccttccgtctgttctgaagttagaaaagaaagtttaggtgttcatcagaatagggacgctgaaatgactgatgctcagctgctaagcaaaactgaagatgcagctccttgctcaaaacctgataaagtggtttcttgtcagaactcgggactagaaggttgtaaagatgtcccagttaacaagatcactgatgaacatggaatatttccctcgaaaatatcaacttctagagtgaagaaggttggtgccaagcggtctcgcaatgccggcagtaaagctgctagtgaatttacaaatagtagaagtgaggttgcagctttgaagcctaagcatgataaagttgcttctcatgaaaacgtggaggcacaacagggagaaggatgttgtagtccaaatgctgctgaatgtacaccaccatctcctgcagaagccctgaacaacaaatcaacgaatgaagttctaaccagctcccagggccccaatcataagacaaacgaatcactagtggcttccaaggcggagtctgttaatatgactctgcaaagaaacaagaaggggaaccgcagaaagcttccaaacacttcaaatgcagatgaaaatcaaagaagttcatctcggacagtaccaaattccaaatcaggtaatttggttgcaaaggggtctcggactgctgatttcaatatatctgactcaccaactgtcgatgaaactgagacagtgccatcaaattcgagttttaatgaggcagttcctccaggaaatggtgaagaaaaacataaaaggctttcaagcagtgcaaacgcagatgaccctgaagcatgtacagcaaataaagtaccaaacaatagagtccgtaaggtcgtagccaagaggaagctatctgatgtccaaagccacaaatctggtagtgagccttgcaagactgcgaaggtattggtatctgaagttaaagttgtgtcaccagccagagttgcgcagagttctagaaatgctaacaaggtaacagtggttcaagacctgcagaacaccaatactggtaggacgaacgatacagttggatcattttgcaaagatgtcacggaagactgctcaaaagacatgcagagctctaaaactagaagcagcaggagacaaaagattgcagatctagtggatggttcaacggaccatgacaaggagaacatactagtcgatagtaattttacttccaatacaaaacgtggaaataacagcatgagttccaaatccaacacaaagacattacaaagtagcaaagctgtgcttgatgagagtagtgtgatcaaaaggaatggttatggaaccttggatgtgccagaaccaacatggtttattctaagtggacatcgcctgctgagaaaagagtatagggctatacttagacgtttgagaggtagagtttgcagggattcacatcactggtctttccaagcaacacaccttgtcaccactgagatgcgcagaactgaaaaattcttcgcagctgctgcggctggcaggtaa

SEQ ID NO: 145190 - DNA, 476 bp, Zea Mays
gtcttttcttcaaagcgaactaacagaaccaactttccttctctcgccatggatcccgcgagatctctggatcccgcactgcagccgccgccagggatgagatgcataggaccagccgcacatatctgccggagcgttgttccttggaggaggagcccccgtggtccgtgcaatccgccctcgcggcgccgttcgccgaggaagccctcgtcgcgccgtccgcggggccggaggagatgctttttgaagccacgcagtccgccaaggccgcgtcttacgccaagtccgcgcagtccgccagggtcgccctcgcggcgctgttcgccgaggacgcccttgtcgcgccgtccgccgggccggaggagatgctagccgaagccgcgcagtccgccagggatgccctcgtcgcgccgttcacttgtgctcatggagacatatgcaaagcagggtataaacgaagaagtatttctctttaa

SEQ ID NO: 145191 - DNA, 82 bp, Zea Mays
caattactctcatcagccacagccagcatttgttgaggagctaccgctccttgtggtgctcccccacctcggtaaaaatacc

SEQ ID NO: 145192 - DNA, 1734 bp, Zea Mays
atcatcttcatcttttgctgggaaagttcaagtcggagtcccaaacctcgcatcgcatttccccgcatccgcagctcacatcgctcccccgaacccgaacccaaatcccaagcaaccacttcgtcgaccatggggcagggcactccgggaggaatgggcaagcagggcggcgccggcgaccgcaagccgggggacgccggcgacaagaaggacaagaagttcgagccgccggccgcgccctcccgcgtcggccggaagcagcgcaagcagaagggcgccgaggcggccgcgcgcctccccaacgtcgcgccgctctccaagtgccgactccgcctcctcaagctcgaccgggtcaaggactacctcctcatggaggaggagttcgtcgccgctcaggagcgcctccgcccccaggaggacaaggccgaggaggaccgatccaaggtcgacgacctccgaggcacccccatgagcgtcggatccctcgaggagatcatcgacgagagccacgccatcgtctcctcctccgtcggacccgagtactatgtcggcatcctctccttcgttgacaaggaccagctcgagccggggtgctccatcctcatgcacaacaaggttctctctgtggttggtatattgcaagatgaagttgatcctatggtatctgtgatgaaagttgagaaagcgcctttggaatcttatgctgacattggtggactggatgctcagattcaagaaattaaagaggcagttgagcttcccttgactcaccctgagctgtatgaagacattggtattaggcctcccaagggagtcatattatatggagaacctggaacaggaaaaactcttcttgccaaggctgtggctaactcaacatctgcgactttcttgcgtgttgttggtagtgaactcattcaaaagtaccttggggatggtcccaaactagtccgagaattgtttagggtggctgatgaactttctccctcaattgtctttattgatgagattgacgctgttggaacaaagaggtatgatgctcattcaggaggagagcgtgagattcaaagaactatgttggagctgctgaatcagctagatggttttgactcgcgtggagatgttaaagttattctagcaacaaaccgcattgaaagtcttgatcctgctttgcttcggccaggccgtatagaccggaagattgaattccctctcccagatattaaaactagaagacgcatcttccagattcacacatcaaaaatgacattagctgacgatgtgaacttggaagagtttgttatgaccaaagatgagttctcgggcgctgatattaaggccatctgcacggaggctggattgctcgccttaagagaacgtagaatgaaagtgacccatgcagatttcaagaaagcaaaggagaaggtgatgtacaagaagaaggaaggtgttccggatggtctctacatgtagtagacgtctcctgccttgtcagaacaagttatcctcgtctctctcgtcatgggagatttgattgccacggcacttgttgcacacctataagtggtctgagaacgtgtattatgctttgattgtttcaagtaaaatttctcttggagaacgctggaaagtttgtgcatcggctacctaccagcatcctcgtaaacacccattaatcagtttgtgcatcggctgcctcacacgtgttggctgctcaatcccatggatgaaaat

SEQ ID NO: 145193 - DNA, 915 bp, Zea Mays
atcaccactttcttcgttaatcgttacatttagctggccctctgtatgtagcatttgcttccccgctaagaaggcatggacctggacatcatggcgatgcccaccacgcccaaagccaccaccagcagccccgccgcgtactacgtcgccaagcctcctcctcctcctcctctgggctacgcggttcacaacaaggcggcggcggcggcctacgattcctacgacggccgacacggcggcatggtcgccaccaccaccaccacccggtcgtcctcctcggcggcgcgccaccaccaccaccaccaccaccaccagcagccggcgggagcgcgggcgctggacggggtcctgctgctgctgcgcgcggccgcgtcggtcatggcgttcgtggccgtcgcgctcgtcgcgtcctgccgccacggcgactggatggagttcgcgcgctacccggagtaccggggcctcctgggggcctccgcgctcgcctgcgcctactccgccgcgcaggccacccgtggcttccgccggatgcgcgcctccgggagagcgggtggcggcctcgcggatttcgccggcgaccaggtggtggcgtacctgctcatcacggcgtcggcggcggctctccccatcaccctccgcatgagatccgccgtactcaacgtcttcacggacgccatgacggccgccatcagcctggctttcatagcctttgcggcgctcgccttgtccgccgtgctctccgccgccgcgcaaccatactagtagcagttcgcagtacacggccacatcctcacactcattatactgctggttacaacgtgagtgatgcatcgtataaacaaccacaatacctaatgcagtcatgtaaaccacttttttttcaatataatactagcccgcaacaattttccccaa

SEQ ID NO: 145194 - DNA, 483 bp, Zea Mays
tttcctcacccgcttgctcgcacggaagcgccgccatggacccgcccctgccatcgtcgaccgccccggccccggccagcaccaccctcggccacgccaacccaaccccaagaagagtgcgtccgcatccaaggtgagcagggcattgctggcatggccccaagaggagacatcggccattactatcgcatggggtctgcttggatatcccaaccgctctgaccttatcccttcactttccactctctctctcacgttcctctcccttctatcgagaacccatgaatttagatggagaatacaacgaggtgattgtgtaggtcgctaatcttgatcttatttgtcatctcccatgtcgcatgacttgtaaaaaactgatttgtggtccgtcgcagcttaggtaagcaaaatccctttgtacgctttgtattctacaactatatatcaatcttgttcatgcaattgaatgtcgttggctgctga

SEQ ID NO: 145195 - DNA, 698 bp, Zea Mays
ttaaaaaataggttcccaaattagcccttggcatgggaatttgattgaatgcagtccatcgtctgtttatcgttccagatgaccgaatgtgttctcttggacgacataatagacttgactttgtatgtgcagatagagggagactatcggaagtacaccgagactagaggaatgtcaatgtcattcccatcgtcatcctcgcatgctaccaccacatctatgtgcctccggtattcaggaacctccaccttggccacctccctggcgacatcaaccaccttcctctgcagcctctccttgtgcctcgcgaacatgctgttgtacagcagacaggtgccgcaggacatgctgtaggcgctgaggcccttgtcactgaaccactgcagcagttccgccacagtcaggttgcccctgatagtccaccggtcccatacggtccacctcatatcttgatgcttcatcagcttggccccaaccggctccgccatagacagcagaggtatagctaggttggcgaatgtgttgcggtagtcctccatggggtgctccccagcaatgaccttgtacagctccaggcacactagacctgtggccatggctgttgaagttgcgatggccgggatgatccttccggcgatgaacttagccttcaacttgtcaacctcaggaatgctgtaattccttgcgcgcatgtttgc

SEQ ID NO: 145196 - DNA, 1170 bp, Zea Mays
ctactgcgggttgggtggcctggagtttgcggcggagaccctggagccccattccaggagctccttgctggtgtcatccttgtgcaccaccacctcgatgaagcagaggcagtcctttctgtcgtcgccggtggccgtggcgatggccgccgtgagctcctcctccgtggccaccctagcggtccagcacctcccctggccgttgtggatggcgtcgacgaggcccgtgtagtcccagttcttgatgacgttgtagggcccgtcgtggatctccacctcgatggtgtagccgccgttgttgatgaggaagatgatgctcctctgctcgcaccggagcatcgtcgacacgtcctgcgccgtcacctggaagctgccgtcgccgatgcaggcgatgacgcgcttgtcgggggcgccctgggcgtagccgagcagcgcgccaaccgaccagccgatggacccgtactgcatctggaactcgtacccgcagccgtcgggtagccgcagcttctggcagttgaaccacgagtctcccgtctccgcgatgacggcgctgccgccgctgagcatcctctggatgtgcttgaagaggacgttgacgcggaggggctcgccggcctcgcactcgggcggctgcccgccggggacgaagatcctccggtagttgtcgtaggcggtggtgttggggcgcacgcgcttggccagcgccgacaggaagtccctcatcatgacgcagccgaaggtggggccgttgccgacggtgacgcggtccggctgcaccaccaccgccttgtccttcctgagcaggatggagtagcccacggagctgtagtcgttgaagatggggcccgccaagaggtaggcgtcggcggactccacgatctcggcgcagaacgccgtgctcacggcgccccagtaggtgcccaggaaccgcggcagcgtctccggcaccaggcccttggccgacggcatggccgccaccgcgtacccgctcgcctccgccagctccacgaaggcggcggcggccttggccacgcggatcttggggccggccaccaccaccggcttcacggccttgtcgaggaacgacacggtggcctcgacggcggcggcgagacccgtcaggttgctaggccttggcgccagcaagtatggcacagggtccgtggcgaa

SEQ ID NO: 145197 - DNA, 648 bp, Zea Mays
cctagtcctttcctcgtgtgttgactgctggtctgctcaccagcgtcaggtttggaatttgggattgcaggccgtgggcgtggggtaacgacggcggcatcaagtgcgccatggagacgcagcccatcagcaacaaccggacggggcgactggacatcggcacggattggcgcctgcacggcgtggcgcgcggggtgctggcgcgctacctccgccgcgtgccggtgcacttcgtcgacatcacggggctgtcggagctgcgcaaggacgcgcacacctccgtgcacacgctgcggcaggggaagctgctcacaccggagcagcaggccgaccccaagacctacgccgactgcatccactggtgcctcccgggactccccgacacctggaaccacttcctctacgcgcacatcctctcgctctcctcgtccgcccaggatcactaaccatttttgcccagcctcacaatgtcaagcgcttcctttcaactcctctccctagaccacccacccaccctggatacctattactactgctgctgctgtagatcttcgtttcattttgacaaatgcatgcaggtcttctcttgtaatttctataaaaaacatccctgatttaattttgactagcagtaccaattactttttc

SEQ ID NO: 145198 - DNA, 2338 bp, Zea Mays
ttttttttcgataccatctaatccagaaataagagaacaaggtgtaataaaaagaaatttggatggtgtcatcaatgagagaggaaatactatgtttgcttgactagtctcgcagcgcagggttagacgtgtgcggagcaggtagcacacaagggagagggagacagagggaggagggagagaggaatcttcctgtttccttgcctgggactgggactccgtctccgtctccgtctccatccccatcccctgccgttgcgcccatctcatccccgcgtcttttcctctcgactctcctctctctctctctctctctctctctctctctctgcgctgctctcggtttaggtcgaggagttgctagctagctagggggtttggatccctgctggtgctggctgctccgctgctgcgtgctagtcctactccagccccccagccccagcgaagcaggcaagcatagatagaggctggggtgggcagggaggtgcgcggacggagatccatcagatcagaatcagatcacatcatcggccctcggatgcgatgcagcaccggcgcaagcccgcttccgccgcggcgccgccggccgccaagcagccggccgcgcgcaggcccacggcgcggctgtcgctcgcgggcctcgtcgtctccatcttcctcgtcgccaccttcctgtacaacgaggacgtggtgaaggcggcctccggctcctccagctcagcaacaacagccgacgccgctgaggtaggcgtctccgggcgggcgaggtcacccgacctaagggtgctgcaggaggcggcgcaccagggggtggaagctgaggagcgggaggttggagatcgtacggaagcggagcagaagcagaagcccctgaccctccccatccccatccccgtggtggcgctggcggaggaggaactcgtggagaatactaagggaaggcagaagcagcagcagcaggaggaggagcaaacccagaagccaccgccaccgccgccgcctcctccccaggttgccgggtgcgacctgtaccggggtcggtggacgttcgacgcggccggcgagcaggcgccgctgtaccgcgagtcggagtgcgagttcctgacggagcaggtgacgtgcatgcgcaacggccgccgcgacgactcgtaccagaagtggcggtggcagcccgatggatgcgacctgcccaggtacgatgctcggttgctgcttgagcggctgcgcaacaagcggctcatgttcgtgggtgactcgctgaaccgcaaccagtgggagtccatggtgtgcctggtgcagtctgtggtgccctggggccacaagacgctgcacaagttcgtcaacaacggatcgctcaacgtgttcacggcgcatgattacaacgccaccgtggagttctactgggcgcccttcctggtggagtccaactcggatgacccgcaggcgcacagcgtcatgaaccgtgtcatcgcctggcgcgccatcgccaagcacgccaagaactggaagggcgtggactacctcgtcttcaactcatacatctggtggctcaacacattcgagatgaaagtcattcgccgtcatcagcatcagcttgaaaaggaggaggagggggtgaggtggagcaagtacgcccttgtggaccggccggtggcgtaccgggaggtgctcaagacgtgggccaggtgggtggaccgccacatcgaccccaaccgaacaagagtcttcttcatgggcatgtcgcccaaccacgtcacgccgtgggcgtggggtaacgacggcggcatcaagtgcgccatggagacgcagcccatcagcaacaaccggacggggcgactggacatcggcacggattggcgcctgcacggcgtggcgcgcggggtgctggcgcgctacctccgccgcgtgccggtgcacttcgtcgacatcacggggctgtcggagctgcgcaaggacgcgcacacctccgtgcacacgctgcggcaggggaagctgctcacaccggagcagcaggccgaccccaagacctacgccgactgcatccactggtgcctcccgggactccccgacacctggaaccacttcctctacgcgcacatcctctcgctctcctcgtccgcccaggatcactaaccatttttgcccagcctcacaatgtcaagcgcttcctttcaactcctctccctagaccacccacccaccctggatacctattactactgctgctgctgtagatcttcgtttcattttgacaaatgcatgcaggtcttctcttgtaatttctataaaaaacatccctgatttaattttgactagcagtaccaattactttttc

SEQ ID NO: 145199 - DNA, 1206 bp, Zea Mays
agaaggaaaccctaataacctctcccgggtcccggcgctgagcgagcaggactgcaggagcagcgagaaaggcaaccgcggcgccccgccgccccgcctcgccgctgcctcacccgccgtgcgctgccgcgacccgaccaaatcgaactgaagctgcgtgaagcggctgttgggctctgttgttggatgggctttcgggcactcagattgggctgtagtttagagagtcccagcgacctgtagcctcctctctccgtcgacctcgctctcgcctcgccgcctccgacccgcagcagcgcctccattgctctctctcacgagtcccggcgttccagtggggggcattcatggcggggcagtccgacccgcacctctccatcttctcgccctccgaggtggagttcgtggctgaggatgagattgtcgaaatcgtccccaacatccgcatggacgccctcaacatgatctgcattcccaccaaggtgcctctctggctcgctgtcgcgctcaagaagcgtagcaagtgcaccatccgcaccccggactggatgactgttgaccgcttgacacaggtattggaagcggaaagagagtcgccacgagaattccagccattaccattccactatattgaaatttctaagcttctgtttgatcatgctcgtgatgacatctcagatgcatacctggtaagatctctaattgaggacatcagagatgtcagatttcacaaggttgagactggattagagacgatatctggacgcacccatgccgtaaagctcaaaaatctctctgcaatggaagtgaacattgtccgccctttcatggtgagaactttgcaggcattctataagcacgatagtgcacagatgattcagcaagcagataatatagggagcagagcaacactggttacagaccgtggcccgagaagagatctaaggcgcaggtagtccacttgtattctgccaaaaaaaatgtatatctgaggacagcagcaagtggttgctttcttgcaataataccagctaagtatgtgctaatgagtcctgagatgtatcagatagtaaagcaatggtggatcatagtttgtctacttttatagagggaactggcattgctcttccccgctttgaaattgtactgctttattcctactgatgttatatgcaagtgtgtgtgtgtggctcattgatctctcca

SEQ ID NO: 145200 - DNA, 1442 bp, Zea Mays
tcggcaacaagcttgcgcacggggctggcctcatcggtgtggaggtcggcgatgcgcgcgacgcggttggggagcggcaccctgcggaggtcgcgcaggtggtggaggcgcgcggcgatgtcatggggcggcggaggggggttccgggcggccagcatcgggcccgccctcttctgctggctgtgttgctgctggggctaaagttgatgagaaggaaaccctaataacctctcccgggtcccggcgctgagcgagcaggactgcaggagcagcgagaaaggcaaccgcggcgccccgccgccccgcctcgccgctgcctcacccgccgtgcgctgccgcgacccgaccaaatcgaactgaagctgcgtgaagcggctgttgggctctgttgttggatgggctttcgggcactcagattgggctgtagtttagagagtcccagcgacctgtagcctcctctctccgtcgacctcgctctcgcctcgccgcctccgacccgcagcagcgcctccattgctctctctcacgagtcccggcgttccagtggggggcattcatggcggggcagtccgacccgcacctctccatcttctcgccctccgaggtggagttcgtggctgaggatgagattgtcgaaatcgtccccaacatccgcatggacgccctcaacatgatctgcggggatttcgggcccttcttcccccagattcccaccaaggtgcctctctggctcgctgtcgcgctcaagaagcgtagcaagtgcaccatccgcaccccggactggatgactgttgaccgcttgacacaggtattggaagcggaaagagagtcgccacgagaattccagccattaccattccactatattgaaatttctaagcttctgtttgatcatgctcgtgatgacatctcagatgcatacctggtaagatctctaattgaggacatcagagatgtcagatttcacaaggttgagactggattagagacgatatctggacgcacccatgccgtaaagctcaaaaatctctctgcaatggaagtgaacattgtccgccctttcatggtgagaactttgcaggcattctataagcacgatagtgcacagatgattcagcaagcagataatatagggagcagagcaacactggttacagaccgtggcccgagaagagatctaaggcgcaggtagtccacttgtattctgccaaaaaaaatgtatatctgaggacagcagcaagtggttgctttcttgcaataataccagctaagtatgtgctaatgagtcctgagatgtatcagatagtaaagcaatggtggatcatagtttgtctacttttatagagggaactggcattgctcttccccgctttgaaattgtactgctttattcctactgatgttatatgcaagtgtgtgtgtgtggctcattgatctctcca

SEQ ID NO: 145201 - DNA, 1144 bp, Zea Mays
agaaggaaaccctaataacctctcccgggtcccggcgctgagcgagcaggactgcaggagcagcgagaaaggcaaccgcggcgccccgccgccccgcctcgccgctgcctcacccgccgtgcgctgccgcgacccgaccaaatcgaactgaagctgcgtgaagcggctgttgggctctgttgttggatgggctttcgggcactcagattgggctgtagtttagagagtcccagcgacctgtagcctcctctctccgtcgacctcgctctcgcctcgccgcctccgacccgcagcagcgcctccattgctctctctcacgagtcccggcgttccagtggggggcattcatggcggggcagtccgacccgcacctctccatcttctcgccctccgaggtggagttcgtggctgaggatgagattgtcgaaatcgtccccaacatccgcatggacgccctcaacatgatctgcggggatttcgggcccttcttcccccagattcccaccaaggtgcctctctggctcgctgtcgcgctcaagaagcgtagcaagtgcaccatccgcaccccggactggatgactgttgaccgcttgacacaggtattggaagcggaaagagagtcgccacgagaattccagccattaccattccactatattgaaatttctaagcttctgtttgatcatgctcgtgatgacatctcagatgcatacctggtaagatctctaattgaggacatcagagatgtcagatttcacaaggttgagactggattagagacgatatctggacgcacccatgccgtaaagctcaaaaatctctctgcaatggaagtgaacattgtccgccctttcatggtgagaactttgcaggcattctataagcacgatagtgcacagatgattcagcaagcagataatatagggagcagagcaacactggttacagaccgtggcccgagagtaagcttcccttgtagttatggtttcaacttgcttgcggattctaggaggttgttgtccccatcaaaatgtgaatctaagatgttgcgcacaaaatagttgcatgtcagaaaattggtacatatataattctattatgattggttggtgacccggtacaatttataatagcttaatacatt

SEQ ID NO: 145202 - DNA, 790 bp, Zea Mays
agaaggaaaccctaataacctctcccgggtcccggcgctgagcgagcaggactgcaggagcagcgagaaaggcaaccgcggcgccccgccgccccgcctcgccgctgcctcacccgccgtgcgctgccgcgacccgaccaaatcgaactgaagctgcgtgaagcggctgttgggctctgttgttggatgggctttcgggcactcagattgggctgtagtttagagagtcccagcgacctgtagcctcctctctccgtcgacctcgctctcgcctcgccgcctccgacccgcagcagcgcctccattgctctctctcacgagtcccggcgttccagtggggggcattcatggcggggcagtccgacccgcacctctccatcttctcgccctccgaggtggagttcgtggctgaggatgagattgtcgaaatcgtccccaacatccgcatggacgccctcaacatgatctgcggggatttcgggcccttcttcccccagattcccaccaaggtgcctctctggctcgctgtcgcgctcaagaagcgtagcaagtgcaccatccgcaccccggactggatgactgttgaccgcttgacacaggtattggaagcggaaagagagtcgccacgagaattccagccattaccattccactatattgaaatttctaagcttctgtttgatcatgctcgtgatgacatctcagatgcatacctggtgattgtttaatcaatcttggtgcagatttgttagttgtgtctagtaagccctaatcaataaccaccaccaca

SEQ ID NO: 145203 - DNA, 1659 bp, Zea Mays
atgtccgcccgcatcgacctcaacaacaacgccggatccgcctcccaaaccctggcggcacacaagcgcggccgcggccgcccccgcaagaaccccccgccccccgctcacccgcgccctccgcatcccgacacccccatggtcagcggcttcgctccgggcgacatggtctggggaaagaagctgaaccacgccgcctggccgggcctcatctactccgccggagggaacggcaccggccacgagggccagcttctcgtatcctactttggcgacaaggccttcgcctggtgcgacacagccgagctcaggccctatgaaccctacttccctgtcgccgagctctatgacgacggcggcgaggatttcgacgccgccgtcgaggcctccctcgacgagttctccagccgcgtcgagtccgccctcgcctccgccgcccgccctttcgcccccgccgatttccttgcctcgctccatgatctcgccgcggatcgcatgggcttcaccaatagggtgcaggccgccgtcgtcaaggcgcatctcagagccttcgacgccttcagggctctgccggacccacctcagtacaccttggagctcggtctactcccagacgtcccgctcccgctgcccaatcctaaagctgccacggatgccgccttcagctcctacaccacccccgcttccagtttcaggaggggcaggaagaggaaggaggaactcatcaaggacgatgactccgatgaggactgggaccctagcaagaggggtgccaccgacttggattctgatgtggactttgactgcaggagaggatccagaggcaggggcaggggcggcggcggcactggtgcgtcgcgtggcaggcctcgagggaggcccaggaaagcagatgcctgcatggacgaagatgagattcaagacaaactggagtatccgtcggctgctgagatgttgctgcagcttctgtccatcgccacggatcctgtaaatggcaattatgactctgctcctgtgattgttagcttcttctcaaagcacaaggactccgatgtgcctagtttatatgaagacaaagaactgattgagaattttggtggcaagaagggtaagaaaaagtccatcggaagcttgggcccagctacaaagccagaagccagcgatgatactgtggatggtcagaggggccgtaggaagtctgctgggagcttgtactcagctagaaaggccgaagattcatattggtgtgatattatcatcagcgatttcgatgacggagacagtgactatgacagtcacaagaggaagcggccctgtaacaggagcaccaataagaagatgaagcaggaggagccacctcaaggagccccatcatcgaatgcaaaacctgcagatggtccagccgcccttattctacatttcagcagtccagaagctattccttctgttgatgacatcaatagcatattccgtattcatggacctattgtggagcgtgagactgtgatcactaagaagtcaaagattgcaaaagtagttttctctaagagtgttgatgcagagcaggcacatcacagttccggaaagcgtaatgcatttggtccatcgcttctcacatctgaaattaagtacttgccatcggcacctcaggtttcttaa

SEQ ID NO: 145204 - DNA, 1896 bp, Zea Mays
agccccgagccgaccctgtcttctccgttcagcctccgccctccgctctgcctctgcgtcttccaccctttgccatttgcttgcaatgtctaatacctgagtgagagagcttcctcagtccatggaggtgtcgtcgaggctccaaagcctcctcagacccttcctactctgccgctcccgcgccgcagggatgaccctccaaaccctagctctttgctccccgccgcctcctccgcgcatcccatcttccttcctcctccgaacgcgccgtctacctcctccctttccccatggcggcccatcccgtcttcttttccacagcaccttcgcctccgtctccccggcccccgcccctgctccagggagggaccacctcaactccaaggaacagggacccccgcccgcgcccttgcctccgccaccgccagaggagctcgcctccgaagacgagtcctactaccacgagcaccttctcgaagtggcgcaggagaaccagtcacgggtcgtccccgtcaaggcattctttctatgcaccagcatcgacctgcggagcctgcagtcccagaattccttcaatgtcattccacccacatcgcgtgccaccaactacgttgtccttagatactacgatgtcaagggagaccccgagggttttaagtctggtgtcatagatgagagccattgccactacatggtcgttttccaatatgggtccattgtgctgtttaatgtttctgatcatgaagcagatggatacctgaaaattgttgagaagcatgcatctggtttacttccagagatgagaaaggatgactatgctgttgttgaaaagcctaccctagagacatggatgcaaggtggtcttgactatatcgtgcttcgggatctgagtattgatgggatccgtacaattggaagtgtcctgggtcagagtattgctcttgactactatatccgtcaagtggatggaatggtagctgagttcacagatatcaaccgtggaatggaaaaaactggtaccttcactatggagaggaagaagcttttccagcttgtagggaaggccaactctaacttggctgatgttattcttaagcttggactctttgagaggtcagacatagcgtggaagaatgcaaactatgctcagatctgggaataccttcgagatgaatacgagctaacccagagatttgggaaccttgattttaagttgaaatttgttgagcacaacatcaggtttcttcaggagatccttcagaacaggaagtcggattttctggaatggcttatcatcatcctgatcagtgttgagatcttgatatctgtttataacataatacaggagcagatgtagggctttgttccatcctgaacacgagatgcatatgttttgaccgtggattctgtgatgccctgctgccgttggcacaacctcgatttgtaaagaaacatacgtactagagactggatccgattcgacctctatactccttataaattaattcctcagacatatggtttggtgattgcatttgcatgttgtcagtcagtcagctgtcctttctactggtaaaggaatgtcaccatgttctcgtctgcttgcccactcaaaagtgctgatgctgggcaggtacccttctagaaattgaatgtgcttattagtttactttgagtcctgtagtgtcatgaggtggtagcctagagcatagaggttcatatggataggatcagggttaagattagtagataaagattagataagattaagttagttatttgggattagattaaataagattgagttagttacttggtagccaagtcttcctatctatataaggatgtgttgtacctccttaagaaaaaaagaaataaagaagaattagtcataga

SEQ ID NO: 145205 - DNA, 1796 bp, Zea Mays
agccccgagccgaccctgtcttctccgttcagcctccgccctccgctctgcctctgcgtcttccaccctttgccatttgcttgcaatgtctaatacctgagtgagagagcttcctcagtccatggaggtgtcgtcgaggctccaaagcctcctcagacccttcctactctgccgctcccgcgccgcagggatgaccctccaaaccctagctctttgctccccgccgcctcctccgcgcatcccatcttccttcctcctccgaacgcgccgtctacctcctccctttccccatggcggcccatcccgtcttcttttccacagcaccttcgcctccgtctccccggcccccgcccctgctccagggagggaccacctcaactccaaggaacagggacccccgcccgcgcccttgcctccgccaccgccagaggagctcgcctccgaagacgagtcctactaccacgagcaccttctcgaagtggcgcaggagaaccagtcacgggtcgtccccgtcaaggcattctttctatgcaccagcatcgacctgcggagcctgcagtcccagaattccttcaatgtcattccacccacatcgcgtgccaccaactacgttgtccttagatactacgatgtcaagggagaccccgagatggatacctgaaaattgttgagaagcatgcatctggtttacttccagagatgagaaaggatgactatgctgttgttgaaaagcctaccctagagacatggatgcaaggtggtcttgactatatcgtgcttcgggatctgagtattgatgggatccgtacaattggaagtgtcctgggtcagagtattgctcttgactactatatccgtcaagtggatggaatggtagctgagttcacagatatcaaccgtggaatggaaaaaactggtaccttcactatggagaggaagaagcttttccagcttgtagggaaggccaactctaacttggctgatgttattcttaagcttggactctttgagaggtcagacatagcgtggaagaatgcaaactatgctcagatctgggaataccttcgagatgaatacgagctaacccagagatttgggaaccttgattttaagttgaaatttgttgagcacaacatcaggtttcttcaggagatccttcagaacaggaagtcggattttctggaatggcttatcatcatcctgatcagtgttgagatcttgatatctgtttataacataatacaggagcagatgtagggctttgttccatcctgaacacgagatgcatatgttttgaccgtggattctgtgatgccctgctgccgttggcacaacctcgatttgtaaagaaacatacgtactagagactggatccgattcgacctctatactccttataaattaattcctcagacatatggtttggtgattgcatttgcatgttgtcagtcagtcagctgtcctttctactggtaaaggaatgtcaccatgttctcgtctgcttgcccactcaaaagtgctgatgctgggcaggtacccttctagaaattgaatgtgcttattagtttactttgagtcctgtagtgtcatgaggtggtagcctagagcatagaggttcatatggataggatcagggttaagattagtagataaagattagataagattaagttagttatttgggattagattaaataagattgagttagttacttggtagccaagtcttcctatctatataaggatgtgttgtacctccttaagaaaaaaagaaataaagaagaattagtcataga

SEQ ID NO: 145206 - DNA, 2246 bp, Zea Mays
tccaaagttgaacgtgagctcgagatagaacatggcccagctcagccccgagccgaccctgtcttctccgttcagcctccgccctccgctctgcctctgcgtcttccaccctttgccatttgcttgcaatgtctaatacctgagtgagagagcttcctcagtccatggaggtgtcgtcgaggctccaaagcctcctcagacccttcctactctgccgctcccgcgccgcagggatgaccctccaaaccctagctctttgctccccgccgcctcctccgcgcatcccatcttccttcctcctccgaacgcgccgtctacctcctccctttccccatggcggcccatcccgtcttcttttccacagcaccttcgcctccgtctccccggcccccgcccctgctccagggagggaccacctcaactccaaggaacagggacccccgcccgcgcccttgcctccgccaccgccagaggagctcgcctccgaagacgagtcctactaccacgagcaccttctcgaagtggcgcaggagaaccagtcacgggtcgtccccgtcaaggcattctttctatgcaccaggtattggttgttgagtgttagaccccctccctctctctctgctaatctgctttctttggttggtgatgaactaacctctcgcagcatcgacctgcggagcctgcagtcccagaattccttcaatgtcattccacccacatcgcgtgccaccaactacgttgtccttagatactacgatgtcaagggagaccccgaggtacttcctgcttcatcaccctggaatccctaagtgttgactgttgaattgcaaactactctcactttgttgagatgctaaactattttctgagatggagctgacatagatgagagccattgccactacataaagggctgtgtttattttctgagatggtttgttaaggacctgacatagagtggagacttgctgggttggttcttatctcattctctcacagggttttaagtctggtgtcatagatgagagccattgccactacatggtcgttttccaatatgggtccattgtgctgtttaatgtttctgatcatgaagcagatggatacctgaaaattgttgagaagcatgcatctggtttacttccagagatgagaaaggatgactatgctgttgttgaaaagcctaccctagagacatggatgcaaggtggtcttgactatatcgtgcttcgggatctgagtattgatgggatccgtacaattggaagtgtcctgggtcagagtattgctcttgactactatatccgtcaagtggatggaatggtagctgagttcacagatatcaaccgtggaatggaaaaaactggtaccttcactatggagaggaagaagcttttccagcttgtagggaaggccaactctaacttggctgatgttattcttaagcttggactctttgagaggtcagacatagcgtggaagaatgcaaactatgctcagatctgggaataccttcgagatgaatacgagctaacccagagatttgggaaccttgattttaagttgaaatttgttgagcacaacatcaggtttcttcaggagatccttcagaacaggaagtcggattttctggaatggcttatcatcatcctgatcagtgttgagatcttgatatctgtttataacataatacaggagcagatgtagggctttgttccatcctgaacacgagatgcatatgttttgaccgtggattctgtgatgccctgctgccgttggcacaacctcgatttgtaaagaaacatacgtactagagactggatccgattcgacctctatactccttataaattaattcctcagacatatggtttggtgattgcatttgcatgttgtcagtcagtcagctgtcctttctactggtaaaggaatgtcaccatgttctcgtctgcttgcccactcaaaagtgctgatgctgggcaggtacccttctagaaattgaatgtgcttattagtttactttgagtcctgtagtgtcatgaggtggtagcctagagcatagaggttcatatggataggatcagggttaagattagtagataaagattagataagattaagttagttatttgggattagattaaataagattgagttagttacttggtagccaagtcttcctatctatataaggatgtgttgtacctccttaagaaaaaaagaaataaagaagaattagtcataga

SEQ ID NO: 145207 - DNA, 898 bp, Zea Mays
gtcttctccgttcagcctccgccctccgctctgcctctgcgtcttccaccctttgccatttgcttgcaatgtctaatacctgagtgagagagcttcctcagtccatggaggtgtcgtcgaggctccaaagcctcctcagacccttcctactctgccgctcccgcgccgcagggatgaccctccaaaccctagctctttgctccccgccgcctcctccgcgcatcccatcttccttcctcctccgaacgcgccgtctacctcctccctttccccatggcggcccatcccgtcttcttttccacagcaccttcgcctccgtctccccggcccccgcccctgctccagggagggaccacctcaactccaaggaacagggacccccgcccgcgcccttgcctccgccaccgccagaggagctcgcctccgaagacgagtcctactaccacgagcaccttctcgaagtggcgcaggagaaccagtcacgggtcgtccccgtcaaggcattctttctatgcaccagcatcgacctgcggagcctgcagtcccagaattccttcaatgtcattccacccacatcgcgtgccaccaactacgttgtccttagatactacgatgtcaagggagaccccgaggtacttcctgcttcatcaccctggaatccctaagtgttgactgttgaattgcaaactactctcactttgttgagatgctaaactattttctgagatggagctgacatagatgagagccattgccactacataaagggctgtgtttattttctgagatggtttgttaaggacctgacatagagtggagacttgctgggttggttcttatctcattctctcacagggttttaagtctggtgtcatagatgagagccattgccactaca

SEQ ID NO: 145208 - DNA, 138 bp, Zea Mays
atggaggaggacaacagggaggtggagcaccagcgatgggcagttgggcacgacggcgatgcccaatgccgccattactcttggacaattagaattagggcccttatcatcattgaggttgtgtcggacttaggctga

SEQ ID NO: 145209 - DNA, 1251 bp, Zea Mays
atggaagtcaaagtgcagagctccaagctcgtgaagcccgcttttattgccgcgccgccccgtgaacatgatgatgagtacgtccccttgtctgtgttcgacacggtcacgtaccagatgcagatggccatcatctacgctttcccgccgccggccccgtccacggctgccatcgagaagggccttgcagcggtgctggccgagtaccgcaccttcgcggggcagatccgcgtgccccgtgacggcggcacggccgcggtgctgctgaacgaccacggcgcacgcatcgtggaggctactgtggacgccaacttcgtggacttggcgcccgccaagcccaccccggagctgctgctgctgcacccggacatcgagcaggagctccaagaggtggtgctctgcagctcacccggttccggtgtggctccctcgccatcgggttcacgtccaaccacgtcgcggccgacggccacgccaccagcaacttcctcgtggcctggggacgcgccaccaggggcctccccacgggcctgccgcctcccggagtactaccacctgccgtcgcctgctgctgacaacaaccacggctacggcgacgaggacgtgatcgacagcatcgtcatccacaaggcgcacttcaccaaggaattcatcgcggggctccgctccagggcgtcggagggccgcggccggccgtttagccggttcgagaccatcctggcgcacctctggcgcaccctcacgcgcgcccgcgcgctgagccccgacgagacctcgcagatccgcctgtccgtcgacggccgccaccgcctcggcctgcccgccgagtacttcggcaacctggtcctctgggcgttccctaccgcgacggtcgccgacctgctggcacagccgctgaagcacgcggcgcaggtgatccacgacgaggtggcccgcgtggacggcaactacttccggtcgttcatcgacttcgccacgtcgggcgccgtggagaaggaggggctggcgcccagcgccgtctgcaaggacgtgctgtgcccgaacgtgtcggtggacagctggctcacgttcccgttctgcgagctggacttcggcacgggcagcccgacctacttcatgccttcctactaccccagcgaggggacgctctacctggtgccgtccttcggcgacggcagcgtcgacgccttcgtgcccgtattcaagcacaacctcgaggcctttaaggaatgctgctaccacgtggagtag

SEQ ID NO: 145210 - DNA, 2805 bp, Zea Mays
gcgatggcgtcgccggccggcggcgagtctccggcgaagcccgtcctcctgcacggcgacctcgacctctggatcctcgaggcgcgcctgctgcccaacatggacatgttctccgagcacgtgcgccgctgcttcgccgcatgccgcccgccctcctcctgcgggaccaagcacccgccgcccgccgccgctggccgccgccaccaccaccaccaccggaacatcatcaccagcgatccctacgtcacgctgtccgtgtccggcgccgtcgtggcgcgcaccgccgtcatccccaactcccaggaccccgtctgggaggagcgcttcgccgtgccgctcgcgcaccgcgccgccgacctcgagttccaggtcaaggacaacgacaccttcggcgcgcagctcatcggcaccgtcgccgtccccgccgaccgcgttgtctcgggcgacgaggtcgaggactggttccccgtcataggcaccaacggcaagccgtacaagcccgacaccgcgctgcgcctccgcttcaagttccagcccatcgccgacaacccggcctaccgccacggcatcgccggcgaccccgaccacaggggcatccaggactcctacttcccgctccgccacggcggccaactcacgctgtaccaggacgcgcacgtcagggaaggggacctgccagagattgagctcgacaacggcaagacgttccagcacaacgcgtgctgggaggacatctgccacgccatcctagaggcgcaccacatgatatatatcgtcggctggtcggtgtacgacaaggtgcgcctcgtgcgcgaaccatctccgtcgcggccattgcccgagggtggagaccttacgcttggggacctgctcaagttcaagtcgcaggagggtgtcagagtgtgcctgcttgtgtgggatgataagacttcacatgacaagttcttcatcaagacgggtggggttatggcaactcatgatgaagaaactcggaagtttttcaaacattcctcagtcatctgtgttctctctcctcgatatgctagcaataagctcagcattttcaaacagcaggttgttgggactttgtttacacaccatcaaaagtgtgtgctggttgatacacaagccaggggaaacaagcggaaaattacagctttcattgggggcctagatctttgtgatggccgctatgacacacctgaacacaggcttttcaaagatcttgacacagtattccaaaatgattaccataaccctacattttcggcaggtgcaaagggtcccaggcaaccatggcatgatttacattgcaggattgatggccctgctgcctatgatgtcttgacaaattttgagcaaaggtggcgaaaggcaacaaaatggcgtgaccggtttagaagagtatctcattggaaagacgatgctttaattaaactggagcgtatctcatggattttaagcccttcacccaatgttccaaataatcatcctagtttgtgggtttcaaaagaagaggatcatgaaaattggcacgttcaggtattcaggtcaattgactctggttccctaaaaggatttcctagtgattgcaaagcagcttcaaagctgaatcttgtgtgccgaaagaacctggtaattgataagagcatccacactgcatatgtccgagcaatcagatctgcacaacatttcatttatattgagaaccagtactttcttggttcttcatatgcttggccatcctatgtgaattcaggtgctgataatctggtaccaatagaattggccctcaaaattgcaagtaagattaaagcgggagaacgctttgcagtgtatgtagtgataccaatgtggccggaaggagtccctactgcagcatctgtgcaagaaatccttttctttcaggcccagacaatggagatgatgtataaaataattgcagatgagctcaaggcaacggacaataaggatatgcaccctgaagattacttgaacttcttttgtcttggaaatcgggaagaaccaccatctaatggtagtccagaatcagagaaatctacagataaaagtgcagcggccttagcttcgaaatatcgacggttcatgatctatgttcacgcaaaagggatgattgtggatgatgaatatgtcattctgggttcagcaaacatcaaccagagatccctggctggttctagagatactgagatcgcaatgggtgcataccagcctcattatgcatggtctacaaagaatggacatcctcacggccaggtatatgggtacagaacgtctctgtgggcagagcaccttggaacggttgatgatcgcttcaaggatccttcgagtttggagtgtgtaaggtttgtgaatcaaatagctgtagagaactggcaaaggtttacagcagaagaaatgagtacgttacaagggcacctcctcaagtacccagttaaggtggaggctgatggtaagatcagcccactgtcagaccaggagtgctttcctgatgttgggggcaagattctgggagctccaacttcacttcctgattcactgactatgtagtgttattacataaaaaaacttctttcagagttgaactttgtaattgtctaaaattggcgggtttatcgcagaacttgtactatatctgtaatcatcgatagttggcgcagggaaagttcaagatgttagtggtgctaagttttcccagcgtttgtaaatgaaccatatgataggatcctagacaatgcttccatttccattatgattatacaacagttttcaacatttttgctc

SEQ ID NO: 145211 - DNA, 2458 bp, Zea Mays
catcctcactcccccctactccactctaaaccctgcgctaaaccttggctatcgatggggaactgcgccgcctaccgccttgccgccggcgggagcggcgacggcggggaccccgtggccgtgtgccgcgaccggaagcgcctcatcaaggcggcggccgaccgccggttcgcgctggccggcgcgcacgccgcttacgcggcggctctccgttccgtcgccgacgcactcgacgtcttcgtcgcgcgccacaccgcgcctgcgccgatcctcatcacgctccccacccccagcagctcgccctcggcttcccccaagccaacgcaggttcaagtgcaggggcttccctctctcgccacgccgccgccgccgcctccgcaggagggggaggaagaagaggaggcgccggcatcaccgcccgccgaggaagatggggacggcggcgtgcagacgccggagatggagtgcccgtactactacgcacccccggcggtgacgccgccaccgccaccgctccctgcggcgtcgccggtcggcggctgggacttctttaacccgttctacgggacggaggaggtggctgcggccatcagcgacgaggagatgcgagcggtcagggagcgagagggcatccccgaactggaggaggcggaggaagaggagggggcgaaggcggcggcggcggcggaaaccaagcccccaaaggcacagccctctcttggacttggagtcttgacgccccaagaggaggctagagatgcgtgcgagatggcggggaacaacggcgggctggaggtggccgtggcgccgcaggggcgcgagctgctcgcagcgctcaaggaggtggaggagctcttcgcggccgccgccgaggcaggcaaggaggtgtctgccatgctcgaagcagccacgcgcgtccccgacctcaaagaaaactcgtcaaaaataatccacgccatcacatggcatcgctctccatcatctgtatcctcatcctacaggagcgagctgggagcgagctcgaatagtttgtcatggacagacaagagtgaaactaggagtgatatattcgaagactatggtggaatgaagtcaggaagtcactcacagactttagggagactgtatgcttgggagaagaaactttatgaagaagttaaggttatagatcaaatccgacaaacctatgagaagaaatgtgttcagctgaggaaccaagatgccaaaggttcagagctgcgttgtgctgaaaaaaccaggacaactgttagagacctgtacacaagaatctgggtttctctacgagcagcggaatccatatctgatagaatacaaaagttacgggacgaggaactgcagccacaactcgtcgagctgttgcagggctttacaaaatcttggaaaataatggtggactcgcatgaaacccagaggcagattatgttcgaggtgaattcatttacatgccctgcttatggcaaattctgcaacgatgcacagcgtcatgcaactctgaagttggaggttgagctgaggaactggagatcctgctttactagctatttcaatgctcagaaagcgtatatcgaggctcttgaaggatgggtatccaagtttgttctgaccgacaccatccggtactcgcgggggatctcgtcgattgctccagatagagctggtgctccaactctagttgtgatgtgccatgactggtacactacaatgtccaagtttccgagcaagcgggtctcgttcaccatgaggaattttctcaggagcgtgagggtgctatggctgaagcaaggagaggagcagcagcagaaaaggaaggtggacagcctggcaaaggagctggacaagaagctgaccgcctacaaaagggcagagaacaggatcataggcaccaagcttctggagcacagtcctgagacagacgccaagcagcgcatggagcacctgtcggagaagaaagaggtgctgaacctcctaaagaggaggatcgaggcagagaaagggaagcatcatgcgtgcatgcgggacacgcacgacgtcactctcaacgggttcaagatcggcctcgccagcatcttcgagtcgctggctgagttctcgaaggattcggtgaagctctacgaagacctcctaggccgagcccatggcaaggattcagagaaggctcacatagtggtggatgatggtaatctgcatgtgttaggacctagctagctgcattggcccagtttttgggcccctagaatctttgtctgattttagcgtgtagagagtaccatgttgtttggtttggttggttggttgcttgaaggtagtagggtcattcttgtgggcgacctgctgtgcttgtaattatccttttagcttgatatcggtggggattcgatctattgtggtgctgtgctgtgctgctgctcgttccatgtgactgtcaggtatgtatgtg

SEQ ID NO: 145212 - DNA, 1223 bp, Zea Mays
ccacagccgtcgtgggccaccgtccggctcccccggtatacggccaccacctgtccttccgcacgtccccgtcggccatcgtccacggatcctatcggtctctcctgtgtcctcttcagtctccacgccgttccagaagtcgccaaccttccctcgccgccgcgccgcaacagccgcctcccctccaaggtagcccaatcgaaaccactcgcccggccaccatggcctttgccagctcgctgcttcccgtgccgccctaccgcgtctgcgcgacccccgcgtcggaggtcgccgccttctcgccggccaagaagagcgtctcgctcgccgctgcgcgccagcgccgaggatcccgtcacggagtgagggcagaagtaaatgaatctggaagtgttttggctgttgatgcactctcgcaagttaaacatgttctgcttccagtccttgatcgcaacccttacctttctgaaggcacaagacaggctgcagcaacaaccgcttccctcgcaaagaagtatggagcagatattactgtagttgttattgacgataaaccaaaggagtctgtcccagagcatgatactcaaatgtcaagcattagatggcatctctcagaaggcggattttcggagtttagattgatggagcgtcttggggaagggcagaaaccaacagttatcatcggggaagttgctgatgagtgggacttagacctggttgtgctaagcatggaggcaatccactccaagcatgtcgatgggaatttgctcgctgaattcatcccttgccctgttctactgctcccgctctgacatagagctgatttgcatctgtcatgtttttttgagacaaatgatctgtttgtccttgaagatgtaactcccgcatgttccctggatacgaggggtttgcgtcagctgatgattctattatgttgatgcagtttttttcgaatttgtgtgcctgtgaatattgctaagaaaattatgttactcttttctttatttcttctgaatgagcagtttcaggtatatgctgctgctgtggttgggttaggatgcgttttttggggtgtttaaaagaaccagcatgtttaaaagaataaatcagtattaatgtcagacaaacagagaaaacaaataataaaaacatttggagatgcggggtatcgatccccgtacctctcgcatgctaagcgagcgctctaccatctgagctacatc

SEQ ID NO: 145213 - DNA, 894 bp, Zea Mays
ccacagccgtcgtgggccaccgtccggctcccccggtatacggccaccacctgtccttccgcacgtccccgtcggccatcgtccacggatcctatcggtctctcctgtgtcctcttcagtctccacgccgttccagaagtcgccaaccttccctcgccgccgcgccgcaacagccgcctcccctccaaggtagcccaatcgaaaccactcgcccggccaccatggcctttgccagctcgctgcttcccgtgccgccctaccgcgtctgcgcgacccccgcgtcggaggtcgccgccttctcgccggccaagaagagcgtctcgctcgccgctgcgcgccagcgccgaggatcccgtcacggagtgagggcagaagtaaatgaatctggaagtgttttggctgttgatgcactctcgcaagttaaacatgttctgcttccagtccttgatcgcaacccttacctttctgaaggcacaagacaggcggattttcggagtttagattgatggagcgtcttggggaagggcagaaaccaacagttatcatcggggaagttgctgatgagtgggacttagacctggttgtgctaagcatggaggcaatccactccaagcatgtcgatgggaatttgctcgctgaattcatcccttgccctgttctactgctcccgctctgacatagagctgatttgcatctgtcatgtttttttgagacaaatgatctgtttgtccttgaagatgtaactcccgcatgttccctggatacgaggggtttgcgtcagctgatgattctattatgttgatgcagtttttttcgaatttgtgtgcctgtgaatattgctaagaaaattatgttactcttttctttatttcttctgaatgagcagtttcaggt

SEQ ID NO: 145214 - DNA, 972 bp, Zea Mays
ccacagccgtcgtgggccaccgtccggctcccccggtatacggccaccacctgtccttccgcacgtccccgtcggccatcgtccacggatcctatcggtctctcctgtgtcctcttcagtctccacgccgttccagaagtcgccaaccttccctcgccgccgcgccgcaacagccgcctcccctccaaggtagcccaatcgaaaccactcgcccggccaccatggcctttgccagctcgctgcttcccgtgccgccctaccgcgtctgcgcgacccccgcgtcggaggtcgccgccttctcgccggccaagaagagcgtctcgctcgccgctgcgcgccagcgccgaggatcccgtcacggagtgagggcagaagtaaatgaatctggaagtgttttggctgttgatgcactctcgcaagttaaacatgttctgcttccagtccttgatcgcaacccttacctttctgaaggcacaagacagttattgacgataaaccaaaggagtctgtcccagagcatgatactcaaatgtcaagcattagatggcatctctcagaaggcggattttcggagtttagattgatggagcgtcttggggaagggcagaaaccaacagttatcatcggggaagttgctgatgagtgggacttagacctggttgtgctaagcatggaggcaatccactccaagcatgtcgatgggaatttgctcgctgaattcatcccttgccctgttctactgctcccgctctgacatagagctgatttgcatctgtcatgtttttttgagacaaatgatctgtttgtccttgaagatgtaactcccgcatgttccctggatacgaggggtttgcgtcagctgatgattctattatgttgatgcagtttttttcgaatttgtgtgcctgtgaatattgctaagaaaattatgttactcttttctttatttcttctgaatgagcagtttcaggt

SEQ ID NO: 145215 - DNA, 1334 bp, Zea Mays
ctatagtgcattcaaacacccctttagttggcgacaagggaacacataaatatttagttggtagtcattgttttaacgcatttgtgaatcattcaagtagatttttttttgaaaatataaacaatatatttttgaaacttctgtaactaatggaggcatatgccatcaggcaaattaagcaaataactaaaaaactggaagagacttacactttgtagttctcagttgggtatagaagacccaaaaatgtctcattcaatgtaggtgcactcctcttaggattgctcactgtcaacagaacgaatgttgaggcagataagaaaacgacagaatgtctctcagatgaaaaaaaaaagcaatagcctaacagcactgagaaaaaggagattgatatttctgtatgccaataaatcactgggttaaaactacactaataagattgaatcaaccattgcatttgtccataataatcatctagaaccactaagcttctatgcatatccaagccctcacaaggcaggtctgctcttgtccgcatatgccacatgatttgaatttgcccccttttgtacaagttggatcgattctcaagttttaatgctcattccagtaactaagggcctgttttggttggaggcctggcaggcaaatgccaggccccatataattggaagagtagattttgattcttctgacctgaaactggtgatgcagcttctaaatttcagttttaatttaactccagagcaacaagcacacaatttaacgaacatgatctcctccgtttctcaaatgactgcaaactagagatttgaacagatataaactaactagagctcccagctattcacagccgggctaaaaagaaggacgtctagatctggatcacgatggtcctcagcggcggcggcgggtgagacgcttagctacctcgctcgtcgatgacgtcgagagagcagtggacgatgtggtggagcttgagggcgtcgtccgcctccgtgaagctctgcaggtacagcggattgttctgcagcaccgacggaaaagctcacgacgagatcgcatcaggccagatctgcacgatcggacgcgagggccgagtggggcggtgagggtcctgacctggtggccgacaacggcgacgcagacgatcatgattcctccgggaagaggacttggggaggaacggaagaagaagccgccagccggtagcaagacctccggtgccggggactcctcaggcagcgaagtaacctcccgggctctgggctctttgggtaggctcgtgtgggcgaatgggcgatgacgacaagaggcacgccatcatatgccaa

SEQ ID NO: 145216 - DNA, 1136 bp, Zea Mays
aatcattcaagtagatttttttttgaaaatataaacaatatatttttgaaacttctgtaactaatggaggcatatgccatcaggcaaattaagcaaataactaaaaaactggaagagacttacactttgtagttctcagttgggtatagaagacccaaaaatgtctcattcaatgtaggtgcactcctcttaggattgctcactgtcaacagaacgaatgttgaggcagataagaaaacgacagaatgtctctcagatgaaaaaaaaaagcaatagcctaacagcactgagaaaaaggagattgatatttctgtatgccaataaatcactgggttaaaactacactaataagattgaatcaaccattgcatttgtccataataatcatctagaaccactaagcttctatgcatatccaagccctcacaaggcaggtctgctcttgtccgcatatgccacatgatttgaatttgcccccttttgtacaagttggatcgattctcaagttttaatgctcattccagtaactaagggcctgttttggttggaggcctggcaggcaaatgccaggccccatataattggaagagtagattttgattcttctgacctgaaactggtgatgcagcttctaaatttcagttttaatttaactccagagcaacaagcacacaatttaacgaacatgatctcctccgtttctcaaatgactgcaaactagagatttgaacagatataaactaactagagctcccagctattcacagccgggctaaaaagaaggacgtctagatctggatcacgatggtcctcagcggcggcggcgggtgagacgcttagctacctcgctcgtcgatgacgtcgagagagcagtggacgatgtggtggagcttgagggcgtcgtccgcctccgtgaagctctgcaggtacagcggattgttctgcagcaccgacggaaaagctcacgacgagatcgcatcaggccagatctgcacgatcggacgcgagggccgagtggggcggtgagggtcctgacctggtggccgacaacggcgacgcagacgatcatgattcctccgggaagaggacttggggaggaacggaagaagaagccgccagccggtagcaagacctcc

SEQ ID NO: 145217 - DNA, 102 bp, Zea Mays
ggtcgctcagaattctgtctcgcttgagcctgcccacggaggcgaccaaaaaacaaaaagctcatggcgagacagccatgaattctagagttcgaaggtcga

SEQ ID NO: 145218 - DNA, 1274 bp, Zea Mays
cgccgttcttgaatctgccattcgctgaatctgccattcgctgctgttgtttctggacagtgaagcagtattccggacagtgaacaaaaatctgggaacacatttcattttcactgtcattggctaccagagtccgggaacaaaatctgggaacaaaatctgggaacacaaaaatctgggaacaaaatctgcctttggctaccagagtttattgctcccatatcattcgctgtccatttcactgtccattcgctgaacacaaaaagctgggaacaaactcattttcccagtgaacaggtagcacaatttagttcacaaaatctgggagcacaatttagttcacaaaatctgggagcaataaacaggttgaacaggtagaacaaaatctgggagcaataaactgccatcccagaacaaaattcgcagctcacatttcagttcacaagctagttcacaatttagttcccaggtaccacaatttagttcacaagctagttcacaagctcacatttcaatggagcaatacacaggtagcagtttgacaagctattacacaagctcacatttctgggagcaatacacaggtagcagtttcacaagctatcacacaagctcacatttctgggagcaaaaaacaggtggcgtagtagcagtcgtgtgttcatcttcatttgcagcaacgacaagttcacggcttggtgcttcatcttcatttccagctacaacaacgacaagccacctgctttggcgcggactagggttgtggtcgcagcgccgccgccacctgctttggcgcggggccgcgagcagcaagggagaagacgcggagtttggagagaaggaggtgcagcgccgccgccacctgctttggcgcgggaccacgggcagcagatctccgggcagcaggggaggagactagcaggggagggaaatggagattgaagaaaatgagatggaaggaagaggcttgacgggagagagaagaaccttgaagagagaagaacggctctggacggcagaagaaaacggcgcgtgggctgatagcgacggaagatcattattcgttctcctgaacgactaataacgatgggatctggaataacaggagcctgatggttgcatcagtagagttgaccacttctcagtattgcgagatgcatcttacatggtcaagaagataattcctattctgaactacttgctcgtgttgatcagttttgcctagtcccagtaccatacaaagatgttcaggtgaacctgaaaattcttctcaa

SEQ ID NO: 145219 - DNA, 1497 bp, Zea Mays
cgccgttcttgaatctgccattcgctgaatctgccattcgctgctgttgtttctggacagtgaagcagtattccggacagtgaacaaaaatctgggaacacatttcattttcactgtcattggctaccagagtccgggaacaaaatctgggaacaaaatctgggaacacaaaaatctgggaacaaaatctgcctttggctaccagagtttattgctcccatatcattcgctgtccatttcactgtccattcgctgaacacaaaaagctgggaacaaactcattttcccagtgaacaggtagcacaatttagttcacaaaatctgggagcacaatttagttcacaaaatctgggagcaataaacaggttgaacaggtagaacaaaatctgggagcaataaactgccatcccagaacaaaattcgcagctcacatttcagttcacaagctagttcacaatttagttcccaggtaccacaatttagttcacaagctagttcacaagctcacatttcaatggagcaatacacaggtagcagtttgacaagctattacacaagctcacatttctgggagcaatacacaggtagcagtttcacaagctatcacacaagctcacatttctgggagcaaaaaacaggtggcgtagtagcagtcgtgtgttcatcttcatttgcagcaacgacaagttcacggcttggtgcttcatcttcatttccagctacaagtattggtgcttcatcttcatttgcagcttcgactattggtgcttctacttcatttgcagcttcgactattggtgcttctacttcatttgcagcaacgacaagccacctgctttggcgcggactagggttgtggtcgcagcgccgccgccacctgctttggcgcggggccgcgagcagcaagggagaagacgcggagtttggagagaaggaggtgcagcgccgccgccacctgctttggcgcgggaccacgggcagcagatctccgggcagcaggggaggagactagcaggggagggaaatggagattgaagaaaatgagatggaaggaagaggcttgacgggagagagaagaaccttgaagagagaagaacggctctggacggcagaagaaaacggcgcgtgggctgatagcgacggaagatcattattcgttctcctgaacgactaataacgatgggatctggaataacaggagcctgatggttgcatcagtagagttgaccacttctcagtattgcgagatgcatcttacatggtcaagaagataattcctattctgaactacttgctcgtgttcgtgtacaagtctccttatcatgtcctcctttcaagccagtctattctttgcttgattcatcacgggtgcacattattgtaattagaatcttcagagtactcgaaggatagttaaagctgtttggctagtccttcagattactaaaaatatagttaagaacatttgtattttgctatttcgatttccaacagtac

SEQ ID NO: 145220 - DNA, 1264 bp, Zea Mays
caacttccagatcgttctcatcccatcgtttcctcctctgctcaagcacggcagccagtccagccaccatttgggtgctcatctccctctgctcggcacccagccccagctcgcccgagctccctgcgccgacctcatcctccccatggtgcgtcaccttctactcctctccttcccacggcacagcagcgcccctgcagctccccttctccagatccatggcgcccaacaccttgagcgcccctgccgctgctcctccaccgggatctcctcctccactaggcgtccaggcttgtcccaccatggctgcccctcctccatctcctccctccccaccaggttacccagattccatggccgccgccgccccagccatctccctggtggccgacctcgcccctgccccagccacagctcccccttcggccctgctgctgcaagcactcagcccctcccatggcacacgccccatctgcaacaccgtcgacccccgacgaggtcctgttctcgccctgtcgttttagtactcggcgtcgattaagtagatgctaaccgtgtgtatattcgtgtgttcttgtgaggagaaatcccatgatttgggggaagacgaagtccaagcacaacccccgccaatcgctcgatgaaaaatctaaaccaaaaccctcagcgttttcatgggttccggagggattttatgttggtgttgtgcggtgtgatctccaattccctattgctgatgtcttactccatcatgaccttagggctttgatgattgctgtacaaggatgatatggcctcccgcccaaagctgtctggtattcagaagcaggttttggcgctgtacaggggattccttcggacagcacgccttaaggcccctgaagaacgccgcaggatcgagtctgttatcttggcagagttccgtgacaacgcaaggagtgttgaccgtaggaactttgtacacatagagtacttgttgaggagagggaagaagcagcttgagcagctcaagaatcctgatattactggactcgctacccttgtagtaaagaaatgagcaagagaagaaggaagacaagtcagacaaaacagaagacgagaagaggttcctaccataacacttaagcaaggaatcctgtacacttctctcctggtaaatagactggtagtagagtaatacatattgttgccatgataaaatgctaactgtgctgcataggcttgtactggtaattttaaaatggaactaaaacgtattatttaa

SEQ ID NO: 145221 - DNA, 1146 bp, Zea Mays
ccaccatttgggtgctcatctccctctgctcggcacccagccccagctcgcccgagctccctgcgccgacctcatcctccccatggtgcgtcaccttctactcctctccttcccacggcacagcagcgcccctgcagctccccttctccagatccatggcgcccaacaccttgagcgcccctgccgctgctcctccaccgggatctcctcctccactaggcgtccaggcttgtcccaccatggctgcccctcctccatctcctccctccccaccaggttacccagattccatggccgccgccgccccagccatctccctggtggccgacctcgcccctgccccagccacagctcccccttcggccctgctgctgcaagcactcagcccctcccatggcacacggtactcgtccagcccctttctactggtggctgacccatctctatggtgctcgacgaaatgaccatgaggagttttgtgttgtgtgcagccccatctgcaacaccgtcgacccccgacgaggtcctgttctcgccctgtcgttttagtactcggcgtcgattaagtagatgctaaccgtgtgtatattcgtgtgttcttgtgaggagaaatcccatgatttgggggaagacgaagtccaagcacaacccccgccaatcgctcgatgaaaaatctaaaccaaaaccctcagcgttttcatgggttccggagggattttatgttggtaaggtgttgtgcggtgtgatctccaattccctattgctgatgtcttactccatcatgaccttagggctttgatgattgctgtacaaggatgatatggcctcccgcccaaagctgtctggtattcagaagcaggttttggcgctgtacaggggattccttcggacagcacgccttaaggcccctgaagaacgccgcaggatcgagtctgttatcttggcagagttccgtgacaacgcaaggagtgttgaccgtaggaactttgtacacatagagtacttgttgaggagagggaagaagcagcttgagcagctcaagaatcctgatattactggactcgctacccttgtagtaaagaaatgaggtacgtagttttcaaaaacacttatttgactgtgcatggtcttcgaaacaagttttag

SEQ ID NO: 145222 - DNA, 1411 bp, Zea Mays
caacttccagatcgttctcatcccatcgtttcctcctctgctcaagcacggcagccagtccagccaccatttgggtgctcatctccctctgctcggcacccagccccagctcgcccgagctccctgcgccgacctcatcctccccatggtgcgtcaccttctactcctctccttcccacggcacagcagcgcccctgcagctccccttctccagatccatggcgcccaacaccttgagcgcccctgccgctgctcctccaccgggatctcctcctccactaggcgtccaggcttgtcccaccatggctgcccctcctccatctcctccctccccaccaggttacccagattccatggccgccgccgccccagccatctccctggtggccgacctcgcccctgccccagccacagctcccccttcggccctgctgctgcaagcactcagcccctcccatggcacacgccccatctgcaacaccgtcgacccccgacgaggtcctgttctcgccctgtcgttttagtactcggcgtcgattaagtagatgctaaccgtgtgtatattcgtgtgttcttgtgaggagaaatcccatgatttgggggaagacgaagtccaagcacaacccccgccaatcgctcgatgaaaaatctaaaccaaaaccctcagcgttttcatgggttccggagggattttatgttggtaaggtgttgtgcggtgtgatctccaattccctattgctgatgtcttactccatcatgaccttagggaaggatgttttcctctaaattactcgtaataattatgcttggtgtatgtgttgttttagctacttgatgaaatgttttagttgtgtgcgataatatggttgccgttcgagtggaaagtagatgtgttgtatgacctgagttggagttgaagcaagtatgtgtgtctcgtattacgaaactaattagagatatgcatgatgtttgtagatggattatgtgtagagtgttttagtacaagtatttttttaggtatagttgaaccaattattgtatatgaattgtgcgatatcaaggttgttctaatgttcttttaacatcttgctaataaggtgttagagtattctaaatgccaaacataggataattttacaagccaaatagaagttaaattgaaggtattgatgtttagggctgtaggtatagttttagttatgcagctagtccaataaagtagatcatgttttctgtagaagcgttatatataaaacttgtagataatctctttatcttacttgtgtaaaaatttcatgaccataggtgtagtagtttaggagttatgatttttccaagtccagtctcagaatctgtccgaattctatacaggtttcgaaaattggattgtttggctaagctaaactgagaa

SEQ ID NO: 145223 - DNA, 1410 bp, Zea Mays
gcagtctcaggcacacacaatgacacaacacaagcagggcacagtcacagtgtgagctgagctgagctgggcttgtgcttgtgcttccgcctcctcctccgcggctactaaagggtgccagccagccagccctgtggggcgccggtgcgtgcccaaaacaagcaagcataagcatagaggtgggcatcatagacatggaggatgacgaggacatatgggcaaacaccgccagcagccccagcgcgtccccaccgcagcccgtggcggcgggctcggtctccacctgcagcgccttcatctccacgcagctgagcctcaactcccgcctccacctcctctcctccgccgcggccgggggcgggtcctccccggtccgcggcggcgcctacggcgcggacggtgtccgccaccaccacatggctctcggcggtggcttccgcaatgccgcggcgtcccaggggtccttctttccgtacaacctcgccggcgccggcgccgatgtcgcgcccttcgacggcggccgcggcgtgctcgaggacgacatgtctgtcggcgccgccgcgtccggcacctgggctggcgggggcaccgaccggcggaagaagcgcatgatcaagaaccgcgagtccgccgcgcggtcccgcgcgcgcaagcaggcgtacgtccgcgagctggagacgaaggtgcagctgctgcagcaggagaacgagagcctccgcgtcaagtacgacgagctgcgggagtccgtggaggtggcggtgccgatggtgaggaagaccctgcagaggatgccgtccgcgccgttctgaggacattgaccggagatgagtcgaagcaggtggttgctcgttttgtttgttttttgaggaggtgattaagtaagtgactgattagtgagtggctgctgcctagtgcttggttactagtagtggtagaactcagaactacatagatccaggaagcaagcaagcaaatccttcctgccatggcggcctcaatgtacatagatcccatgtttttattaatttcgtctagctgggggggcgtgcacctgccatggcggcctcctttatttagctttatataagtaggatgtaggatgtctaccatatgtgtgtagcttgggattaggctgcaagaagataagcctgcttgtacaaatatggcttcctggaacaatgacattttgggggcgcaacgcaagaaagatgaaagaacaatccaggaagcagcaggtgttttcttcttcttcttcttttgccccttccatgatattcgcgtgtcaaaggctctcctaaagcgagtagtagtcttttggtttggtgaatatttgctgttttcatgctggtccctgctgatgtttgcgatgattttacaatcagaaagagacgttttttggttttgcctcca

SEQ ID NO: 145224 - DNA, 1008 bp, Zea Mays
gacgccggctcgggatcgtcagcagcagcggcgccacgcgggcgtttgggatcgcgacggtagtcagcgtagtcgtcgacgaggcggtcaagtacttggctcatgaggatctcgttgaagatgttgcttggcacctgaaggatgaacatatatttggatctgttggggatgactgtaagttgatgatgtgggacttgcgtacaaacaaaccagaacaatctattcttgcacatcgaaaggaggtcaactctttgtcattcaatccattcaatgaatggatattggctacagcatctggagacacaactatcaacctatttgacatgcgaaaactatctagaagcttgcatacttttgacagtcatgaggcggaggtgtttcaggttgaatggaatccaaatttggctactgtattagcttcatctgccgcagacaagagagtgatgatatgggatattaataggattggcgatgagcagtcagaggaagacgcagacgacggaccaccggagctgctgttcgttcatggaggccacacagacaagatatcagagctgtcgtggaatcctagcgagaaatgggccattgccagcgtgtctgaagacaacatcctgcagatatgggagatggcagaaagcatatactgtgatgacctctccatgcaggttaactgactcgtgcctcgaagcataaagccagagtgggcatctataagaactctttaaatccgtgacatgcattaggctatctccagcagatctcctatcacatcctttatgttatcccctattttcaaacttctctctgcaaagagtcagttattgacttgagtaatcttgatagtctgaatctgattgagcctttaggcataaatgtaactttgaaattgtagggtcagggttgacttcttttccagtttggaacttactactccctgcagtcccaaaagaattatatgtttgatcaaaaccaaactatagtataaaaatatgtttcatgattaatctg

SEQ ID NO: 145225 - DNA, 1584 bp, Zea Mays
atccgccgcttccgcttcgtcccaaatcccttttggcgggagacgagcagcaggctgcctccacttcccgcgcaaagcagtaaatcggagtaaccatggacggcggatcctccacaccggcgagccccccaccgacggtatccgcgtcggcggcgaatatggaggagtaccggaactggaagaagaacgcggcggtgctttacgacctcgtcatctcccacccgctcgagtggccatcgctcaccgtgcagtggctcccatcggagtcctcggcccgcagccaccggctcgtcgtgggtacgcacacctccgacgaggcccccaacaacctcatggtcttggacgcggtgctaccgctcccacctcgcctcgctgcagccgtcgctgcctcgggcggcgccgtcccgttcccatccgtatccgtctcgcgcgtggcgccacaccgtggcgaggtcaaccgcgcgcgctgcatgccgcagcgtccctatacggtggccaccaaaacgtgcgtcgacgaggtgcacgtgtaccatctcggcgatgacgacggcagcgggaagagcggcgccgaagttgtgctcaaggggcatgaggcggagggttatggcttgtcatggagcccgatgaaggaggggtggctgctgagcggctcgtatgataagaagatttgcttgtgggacatctcctctgggagtggcgctcctgttctggatgcacaacaggtgtttgtggctcatgaggatctcgttgaagatgttgcttggcacctgaaggatgaacatatatttggatctgttggggatgactgtaagttgatgatgtgggacttgcgtacaaacaaaccagaacaatctattcttgcacatcgaaaggaggtcaactctttgtcattcaatccattcaatgaatggatattggctacagcatctggagacacaactatcaacctatttgacatgcgaaaactatctagaagcttgcatacttttgacagtcatgaggcggaggtgtttcaggttgaatggaatccaaatttggctactgtattagcttcatctgccgcagacaagagagtgatgatatgggatattaataggattggcgatgagcagtcagaggaagacgcagacgacggaccaccggagctgctgttcgttcatggaggccacacagacaagatatcagagctgtcgtggaatcctagcgagaaatgggccattgccagcgtgtctgaagacaacatcctgcagatatgggagatggcagaaagcatatactgtgatgacctctccatgcaggttaactgactcgtgcctcgaagcataaagccagagtgggcatctataagaactctttaaatccgtgacatgcattaggctatctccagcagatctcctatcacatcctttatgttatcccctattttcaaacttctctctgcaaagagtcagttattgacttgagtaatcttgatagtctgaatctgattgagcctttaggcataaatgtaactttgaaattgtagggtcagggttgacttcttttccagtttggaacttactactccctgcagtcccaaaagaa

SEQ ID NO: 145226 - DNA, 3259 bp, Zea Mays
aacaaaggtaaacaattgatactaagcatataataagtaaaatcaatggtagaatacattggtttaagaagtacaggataaagcaccattacaatgatctgagatcagccctaaagttcataaatagtcagtaagacatgagcaggtaaaaatcgctagcatagaagattctactccaagcatacgatagaaaggcaactacaattgaaagccaacaaaatagagcagcttaccgagcactaatcctcatcatcttcttctgagctcccaacgtcactactgtactcgtcactactactgctcccaaaatcaagctgcacaggcttgacctgtattgtctctggtcccattggtgccactggtcgcactgaaacaggtgcctgcggcacaggggcctgtgcctcccgctcttcacccttgataccaggtagtatctcatcaagtggtagcgtgatcggatcaccaggcttccatcccggcggcggctttagctccttcgggaacatgggtggcaaggtgtttggtagcctcgacggcccctcctgtggtgcctcatacagcggcgcaacctccacttctgccgcgatcccgtccttcgcatccaatggcttcttgggtacccctacatccaaatcagcaaacagatacagctgcgacgctctcatctgattctcctgtggtacaggtggcaggctaacacggagaggcaacccagcaccatgctccggcggagcaaaggttgtgtaacttatgcggtgcgcgtaggtcaggatgtcatcaagcttaaggctggagtggagggacgtgccgaagtcgccctctgacgccggctcgggatcgtcagcagcagcggcgccacgcgggcgtttgggatcgcgacggtagtcagcgtagtcgtcgacgaggcggtcaagtacttggtgagcctcatgcagcttcttcgcaaaggctagcagcgcagcatccttgccacgcgcctcacggacaaggcgcgcgcgcgcatcctgcagatcgagggtctcttgcagctcggcgacggcctcgaagagctgcgtctgcagggtggtgacaagagagagcgcgtccttggtggaggagatcggggttgcgagcggcggcgcggaggacgccgatgggaggaaggtgggaagcgatcctcggtacgctgagatccacgcggcgcggttcgccgagagttccaagaggttggaagcgagcgacgatataagctggagcagcgattgcgcgcgcggaagcggcggcaggagcggtagcagcgacggcgaggtggttagggttggggcagcactggtgccagcggctgcgctcgagggcaggctaccgtgtgaaggcgaggatgtgggattcaaggggaccggattgggcgggagcgacggcgacgaggctgtgagccccagcctcgccggggagggcagatgcggctgcatcattgcggcggcggcggagggcgcagcaaacggacgcgacgcgagctcgagacgctcgtgcttgctgatcctccacttcgtgggctcatgggacgggcttgctcaactagatgtgtttgggctttttatgtcttgaggcccaactaatccgcgttaaaagccctctctccttggtccttgcctacccatccgccgcttccgcttcgtcccaaatcccttttggcgggagacgagcagcaggctgcctccacttcccgcgcaaagcagtaaatcggagtaaccatggacggcggatcctccacaccggcgagccccccaccgacggtatccgcgtcggcggcgaatatggaggagtaccggaactggaagaagaacgcggcggtgctttacgacctcgtcatctcccacccgctcgagtggccatcgctcaccgtgcagtggctcccatcggagtcctcggcccgcagccaccggctcgtcgtgggtacgcacacctccgacgaggcccccaacaacctcatggtcttggacgcggtgctaccgctcccacctcgcctcgctgcagccgtcgctgcctcgggcggcgccgtcccgttcccatccgtatccgtctcgcgcgtggcgccacaccgtggcgaggtcaaccgcgcgcgctgcatgccgcagcgtccctatacggtggccaccaaaacgtgcgtcgacgaggtgcacgtgtaccatctcggcgatgacgacggcagcgggaagagcggcgccgaagttgtgctcaaggggcatgaggcggagggttatggcttgtcatggagcccgatgaaggaggggtggctgctgagcggctcgtatgataagaagatttgcttgtgggacatctcctctgggagtggcgctcctgttctggatgcacaacaggtgtttgtggctcatgaggatctcgttgaagatgttgcttggcacctgaaggatgaacatatatttggatctgttggggatgactgtaagttgatgatgtgggacttgcgtacaaacaaaccagaacaatctattcttgcacatcgaaaggaggtcaactctttgtcattcaatccattcaatgaatggatattggctacagcatctggagacacaactatcaacctatttgacatgcgaaaactatctagaagcttgcatacttttgacagtcatgaggcggaggtgtttcaggttgaatggaatccaaatttggctactgtattagcttcatctgccgcagacaagagagtgatgatatgggatattaataggattggcgatgagcagtcagaggaagacgcagacgacggaccaccggagctgctgttcgttcatggaggccacacagacaagatatcagagctgtcgtggaatcctagcgagaaatgggccattgccagcgtgtctgaagacaacatcctgcagatatgggagatggcagaaagcatatactgtgatgacctctccatgcaggttaactgactcgtgcctcgaagcataaaggtgagttacctgaccaatgatgcaagcgtatctggaggggttatatacctgtatgatttgagagatttcaatttcgctatttttgttcactgcagccagagtgggcatctataagaactctttaaatccgtgacatgcattaggctatctccagcagatctcctatcacatcctttatgttatcccctattttcaaacttctctctgcaaagagtcagttattgacttgagtaatcttgatagtctgaatctgattgagcctttaggcataaatgtaactttgaaattgtagggtc

SEQ ID NO: 145227 - DNA, 1658 bp, Zea Mays
aaaaaaaaaaaaacctctccctccaaaactcctctcttccccttccgaattacagtttccctcgcatcctcctcctacatctatctcccacctcgcacaatcacagattcctgattcctcaatcctcagtaccccgctgcctgtcctccacgcacctcaccgcaaacatggcgaacgccgccgacgacctggacctcctgctatcactaggcgaggccgtcccggagacacctcccgcctccccccgcaccgccgatgtccccgtgtgcgacggcgctttcacaccaccaaggacggcgccccccggcggcaccgacatgtccgttttccgcgacgccgtcaaggattacctcgaggcggcccccgaaaccacctccccgcttgctaatcgccccaagcgacccaaggccaccgaaatcctcgtcgacaaatactccggcctccgcatcaagcaccttacgctctcgcctcttgagattagcaaccgcttcgctgacatccgatttgtgcgcatcaccgcgttaaagaactctgtggggagcgacaggttctccggctgttgggcaaccgcgggcgtgttactggacaagggcgtgcagcgggtgagtgcgaaggggagcagctacagcatctggaagatgggcgctctggacgagaccgacgtatctctgttcctgtttggggacgcgcacgttcactactccggagctgctgtgggttcagtgttcgctgtgttcaatggcaatgtccgcatggacaatgggggcaaagggttctctatgagtgttgcttctgttggacagatgttgaagatgggggtcgcatcagattttggtctctgcaaaggcaagaggaaagacggggtggcttgcaccatggctataaataagagtaaaggatcatactgcaaatttcattcgtcgaaaacatcacaaaagtatactactggcagagtagagcttaagggcggaaatttcaaatttgcttccaaacttcgatctgaagggatttacatggtcaatccttcctcagaacgacccaatccaagaaattctttgcaaccggtgaaagtaatgtcaattgatgggctaaaaagggctttaagcaatgcagatagagtgactaataagaaccagtcccagggtataagatttctttcccatgttacagctaatatggacaatatggtaccaaaagccccaaccaccggctctaggaatcaacagagatcgaaggccggcttaaacaaaagtttgtcatcatctggcgccaaagccttgcccaaggagggattgcgaaaaccacaacaggatgttaaaaggcaaaagatgaacaatcctacagagaatattgttgagcttgatgcggtcagctcagacgatgacgagataaatatagtactgcgacgctgatgcttcatcaataatagcgtgacatgtaattgtactccaaatcggctaaacaattgtacgctcttgttttcatatatcccaagtcatccgaggcagaaaaattaaatcagatatatttgttgacttatggatcaggttggtccgtagtgttctattttctcttgacatgcagtttaacaattagatataaacatatatttttaatatttttatagaagagagaagtcagcccttgatcaaaagtta

SEQ ID NO: 145228 - DNA, 753 bp, Zea Mays
attataagtatcttgtaccatgccattcttgattctatacaaatgattttgcccctggaatctttccagaaatttcaaatttgcttccaaacttcgatctgaagggatttacatggtcaatccttcctcagaacgacccaatccaagaaattctttgcaaccggtgaaagtaatgtcaattgatgggctaaaaagggctttaagcaatgcagatagagtgactaataagaaccagtcccagggtataagatttctttcccatgttacagctaatatggacaatatggtaccaaaagccccaaccaccggctctaggaatcaacagagatcgaaggccggcttaaacaaaagtttgtcatcatctggcgccaaagccttgcccaaggagggattgcgaaaaccacaacaggatgttaaaaggcaaaagatgaacaatcctacagagaatattgttgagcttgatgcggtcagctcagacgatgacgagataaatatagtactgcgacgctgatgcttcatcaataatagcgtgacatgtaattgtactccaaatcggctaaacaattgtacgctcttgttttcatatatcccaagtcatccgaggcagaaaaattaaatcagatatatttgttgacttatggatcaggttggtccgtagtgttctattttctcttgacatgcagtttaacaattagatataaacatatatttttaatatttttatagaagagagaagtcagcccttgatcaaaa

SEQ ID NO: 145229 - DNA, 1642 bp, Zea Mays
aaaaaaaaaaaaacctctccctccaaaactcctctcttccccttccgaattacagtttccctcgcatcctcctcctacatctatctcccacctcgcacaatcacagattcctgattcctcaatcctcagtaccccgctgcctgtcctccacgcacctcaccgcaaacatggcgaacgccgccgacgacctggacctcctgctatcactaggcgaggccgtcccggagacacctcccgcctccccccgcaccgccgatgtccccgtgtgcgacggcgctttcacaccaccaaggacggcgccccccggcggcaccgacatgtccgttttccgcgacgccgtcaaggattacctcgaggcggcccccgaaaccacctccccgcttgctaatcgccccaagcgacccaaggccaccgaaatcctcgtcgacaaatactccggcctccgcatcaagcaccttacgctctcgcctcttgagattagcaaccgcttcgctgacatccgatttgtgcgcatcaccgcgttaaagaactctgtggggagcgacaggttctccggctgttgggcaaccgcgggcgtgttactggacaagggcgtgcagcgggtgagtgcgaaggggagcagctacagcatctggaagatgggcgctctggacgagaccgacgtatctctgttcctgtttggggacgcgcacgttcactactccggagctgctgtgggttcagtgttcgctgtgttcaatggcaatgtccgcatggacaatgggggcaaagggttctctatgagtgttgcttctgttggacagatgttgaagatgggggtcgcatcagattttggtctctgcaaaggcaagaggaaagacggggtggcttgcaccatggctataaataagagtaaaggatcatactgcaaatttcattcgtcgaaaacatcacaaaagtatactactggcagagtagagcttaagggcggaaatttcaaatttgcttccaaacttcgatctgaagggatttacatggtcaatccttcctcagaacgacccaatccaagaaattctttgcaaccggtgaaagtaatgtcaattgatgggctaaaaagggctttaagatagagtgactaataagaaccagtcccagggtataagatttctttcccatgttacagctaatatggacaatatggtaccaaaagccccaaccaccggctctaggaatcaacagagatcgaaggccggcttaaacaaaagtttgtcatcatctggcgccaaagccttgcccaaggagggattgcgaaaaccacaacaggatgttaaaaggcaaaagatgaacaatcctacagagaatattgttgagcttgatgcggtcagctcagacgatgacgagataaatatagtactgcgacgctgatgcttcatcaataatagcgtgacatgtaattgtactccaaatcggctaaacaattgtacgctcttgttttcatatatcccaagtcatccgaggcagaaaaattaaatcagatatatttgttgacttatggatcaggttggtccgtagtgttctattttctcttgacatgcagtttaacaattagatataaacatatatttttaatatttttatagaagagagaagtcagcccttgatc

SEQ ID NO: 145230 - DNA, 2883 bp, Zea Mays
atgaccgtccgggccgcggccgtgctggtggccgccgccgtgctcgttctcctcctcccgggatgggcggcggcggagtggaatctcacgaagaaaggcagcgtcgtcacctacgatgggcgctctctcatgatcgacggcaagcgggacctcttcttctccggcgccatccactaccccaggagcccgcctgaggtgtggccgaagctgatcgagcgggctaaggagggcggcctcaacacgatcgagacgtacatattctggaacgcgcacgaacctgagcctggcaagtacaattttgaaggccggttcgacttgatcaagtacctcaagatgatccaggagcatgacatgtatgcaattgtgcgcatcgggcccttcatccaggcagaatggaaccatggtggtctgccttattggcttagagagatcgaccacataatattccgggcaaacaatgatccctacaagaaagaaatggagaaattcgtgagattcatagtgcagaagttgaaggatgctgagttatttgcatctcaaggaggacccatcattctaacacagatcgagaatgaatatgggaacataaaaaaagatcatgcaacagacggtgacaagtacctcgaatgggcagctcaaatggcgctcagcacacaaacaggagttccatggataatgtgcaagcagtcttcagctcctggtgaagtgatccctacttgcaatggaaggcattgtggagatacatggacactacgcgacaaaaataagcctatgctttggactgagaattggactcaacaattcagagcatatggcgatcaagtagctatgcgttcagctgaggacattgcatatgctgtgttacggttttttgcaaagggtgggtcattggttaactactacatgtatcacggaggaacaaattttggaaggactggggcttcttatgtgctgactgggtactatgatgaagctcccatggatgaatatggtatgtacaaggagcccaaatttgggcatctcagggacttgcacaatgtaataaggtcatatcagaaagcattcctcttggggaagcattcgtctgagatattgggtcatgggtatgaggcacacatctttgagttgcctgaagaaaatctttgcctctctttcctttccaacaataacacgggcgaagatggaacagtaatcttccgaggggagaagcactacgtgcctagccgttcagtctccattcttgcagggtgcaagaacgtggtttacaataccaagagggtgtttgtacaacacaatgaaaggtcataccatacctcagaggtaacaagcaagaataaccaatgggagatgtactcagaaaaaatcccgaagtaccgtgatactaaagtcaggatgaaggaacccctggagcaatttaaccaaaccaaggacgctagtgattacttatggtacaccacaagctttcgcttggagtcagacgatttgccttttagaaatgacatccggcctgtgcttcaggtcaaaagtagtgcacactcaatgatgggatttgccaatgatgctttcgtaggatgcgcacgcggaagcaagcaggtgaagggtttcatgtttgaaaaacccgttgatctgaaagtaggtgtgaaccatgttgtattgttgtcgtcaactatgggaatgaaggacagtggtggtgaacttgctgaagtaaagagtggcattcaggagtgcctaatccagggtctgaacactgggacgttggatttacaagtcaatggctggggccataaggctgcactggaaggtgaggacaaggagatctactcagaaaaaggtgtgggcaaagttcagtggaaacctgccgagaacggccgggcagccacttggtataagagatacttcgatgagccagatggagatgatcccgttgtacttgacatgagctcaatggacaaaggaatgatttttgtgaatggtgaaggcgtgggtagatactgggtctcataccgaactcttgctggaactccttctcaagcactataccatattccgcgtcctttcttgaaatccaaggacaaccttttggttgtcttcgaggaggagatgggcaagccggatggcatcctcgtgcagacggtgacgagagacgacatatgtctgttcatctcggagcacaacccgggacagataaagacgtgggatacggatggtgacaaaatcaaactcattgcagaggatcacagcaggcggggcaccttgatgtgcccccctgagaagacaatccaagaagtcgtctttgccagcttcggcaacccagagggcatgtgcggcaacttcactgtaggcacttgccacactcccaatgcaaagcagatcgttgagaaggaatgcctcggcaagccatcctgcatgctgccggtggatcacacggtgtacggcgcggacatcaactgccaatcaacgactgctacactgggggtgcaggtgagatgcggaggcggcaagaagggtgcctgagaataacaagatggatgctgctaattaatggacgtttcagcttgtttgtttgttcatcccttcggtttggcactgatgcttacattgttctgacattgcaattgaaatgtgattggaacattcttgatcgggaactaacatgaaatgagtggagggtagatgctgatcagaccaaagatgtgtatttcccccctctttccttctgtctcgtgttgtttcatgtaaccatcacaatatatatagatgttgaataatcatgaccagtagtatagatcttagagcatccctaacttttgaataaaagactcttggagattggagctggactaactgattgcttcttgcaacatgtatatgaacatttcatta

SEQ ID NO: 145231 - DNA, 764 bp, Zea Mays
ttgtggagttaaccttattgaggcaggtatacaagcttgacaacaaaatgtcatttcatttgtctcttccgctctgccttcagataccatattccgcgtcctttcttgaaatccaaggacaaccttttggttgtcttcgaggaggagatgggcaagccggatggcatcctcgtgcagacggtgacgagagacgacatatgtctgttcatctcggagcacaacccgggacagataaagacgtgggatacggatggtgacaaaatcaaactcattgcagaggatcacagcaggcggggcaccttgatgtgcccccctgagaagacaatccaagaagtcgtctttgccagcttcggcaacccagagggcatgtgcggcaacttcactgtaggcacttgccacactcccaatgcaaagcagatcgttgagaaggaatgcctcggcaagccatcctgcatgctgccggtggatcacacggtgtacggcgcggacatcaactgccaatcaacgactgctacactgggggtgcaggtgagatgcggaggcggcaagaagggtgcctgagaataacaagatggatgctgctaattaatggacgtttcagcttgtttgtttgttcatcccttcggtttggcactgatgcttacattgttctgacattgcaattgaaatgtgattggaacattcttgatcgggaactaacatgaaatgagtggagggtagatgctgatcagaccaaagatgtgtatttcccccctctttccttc

SEQ ID NO: 145232 - DNA, 2642 bp, Zea Mays
atgaccgtccgggccgcggccgtgctggtggccgccgccgtgctcgttctcctcctcccgggatgggcggcggcggagtggaatctcacgaagaaaggcagcgtcgtcacctacgatgggcgctctctcatgatcgacggcaagcgggacctcttcttctccggcgccatccactaccccaggagcccgcctgaggtgtggccgaagctgatcgagcgggctaaggagggcggcctcaacacgatcgagacgtacatattctggaacgcgcacgaacctgagcctggcaagtacaattttgaaggccggttcgacttgatcaagtacctcaagatgatccaggagcatgacatgtatgcaattgtgcgcatcgggcccttcatccaggcagaatggaaccatggtggtctgccttattggcttagagagatcgaccacataatattccgggcaaacaatgatccctacaagaaagaaatggagaaattcgtgagattcatagtgcagaagttgaaggatgctgagttatttgcatctcaaggaggacccatcattctaacacagatcgagaatgaatatgggaacataaaaaaagatcatgcaacagacggtgacaagtacctcgaatgggcagctcaaatggcgctcagcacacaaacaggagttccatggataatgtgcaagcagtcttcagctcctggtgaagtgatccctacttgcaatggaaggcattgtggagatacatggacactacgcgacaaaaataagcctatgctttggactgagaattggactcaacaattcagagcatatggcgatcaagtagctatgcgttcagctgaggacattgcatatgctgtgttacggttttttgcaaagggtgggtcattggttaactactacatgtatcacggaggaacaaattttggaaggactggggcttcttatgtgctgactgggtactatgatgaagctcccatggatgaatatggtatgtacaaggagcccaaatttgggcatctcagggacttgcacaatgtaataaggtcatatcagaaagcattcctcttggggaagcattcgtctgagatattgggtcatgggtatgaggcacacatctttgagttgcctgaagaaaatctttgcctctctttcctttccaacaataacacgggcgaagatggaacagtaatcttccgaggggagaagcactacgtgcctagccgttcagtctccattcttgcagggtgcaagaacgtggtttacaataccaagagggtgtttgtacaacacaatgaaaggtcataccatacctcagaggtaacaagcaagaataaccaatgggagatgtactcagaaaaaatcccgaagtaccgtgatactaaagtcaggatgaaggaacccctggagcaatttaaccaaaccaaggacgctagtgattacttatggtacaccacaagctttcgcttggagtcagacgatttgccttttagaaatgacatccggcctgtgcttcaggtcaaaagtagtgcacactcaatgatgggatttgccaatgatgctttcgtaggatgcgcacgcggaagcaagcaggtgaagggtttcatgtttgaaaaacccgttgatctgaaagtaggtgtgaaccatgttgtattgttgtcgtcaactatgggaatgaaggacagtggtggtgaacttgctgaagtaaagagtggcattcaggagtgcctaatccagggtctgaacactgggacgttggatttacaagtcaatggctggggccataaggctgcactggaaggtgaggacaaggagatctactcagaaaaaggtgtgggcaaagttcagtggaaacctgccgagaacggccgggcagccacttggtataagagatacttcgatgagccagatggagatgatcccgttgtacttgacatgagctcaatggacaaaggaatgatttttgtgaatggtgaaggcgtgggtagatactgggtctcataccgaactcttgctggaactccttctcaagcactataccatattccgcgtcctttcttgaaatccaaggacaaccttttggttgtcttcgaggaggagatgggcaagccggatggcatcctcgtgcagacggtgacgagagacgacatatgtctgttcatctcggagcacaacccgggacagataaagacgtgggatacggatggtgacaaaatcaaactcattgcagaggatcacagcaggcggggcaccttgatgtgcccccctgagaagacaatccaagaagtcgtctttgccagcttcggcaacccagagggcatgtgcggcaacttcactgaatgcctcggcaagccatcctgcatgctgccggtggatcacacggtgtacggcgcggacatcaactgccaatcaacgactgctacactgggggtgcaggtgagatgcggaggcggcaagaagggtgcctgagaataacaagatggatgctgctaattaatggacgtttcagcttgtttgtttgttcatcccttcggtttggcactgatgcttacattgttctgacattgcaattgaaatgtgattggaacattcttgatcgggaactaacatgaaatgagtggagggtagatgctgatcagacc

SEQ ID NO: 145233 - DNA, 2740 bp, Zea Mays
cactgccaagcgcagttgtctctgatgtctggtcacgcctgacgacgccgctatcacgcgccaccctcctgccgacgaacgcggcctcctcctcattgctgagcgcagcccctcacttctctcctggctgcgccaccatgatgccgccacggaatgcgcagagccgccgaagagagcagagtcccagcgagaaacgcaggagctcttccttccacctctggcgaacctccaaggaaactcgacgcccagacctgctcgcgcacagggagcatctttgctccggcggctgctcgccggcctccctgtctcctccccagttcttcctctcacagccgtgcagcgccctcttctctacagtggccgctgctcctctctgaagctatgcgcaggagctctccaggacgccgcgcctcctccctgctacacgccccggtcgacgacgaacttcccgtggtctgggaggccgcgcccgcccagatccgccggaaggagcgaaaggagccccgccgccgctgtcatcacaggccgcacgggcttccggtggcctgctcaggcggcggctagggttttgaggggcgctcgggtcgcccagcgcggggacgaccgagcgccgtctgcttcaaacatttggagctcatcccctcgaaatacagaaggtgcatccacaaaggattaatctcttcgtctaattttcttgggcatacacagattcagagcatatggcgatcaagtagctatgcgttcagctgaggacattgcatatgctgtgttacggttttttgcaaagggtgggtcattggttaactactacatgtatcacggaggaacaaattttggaaggactggggcttcttatgtgctgactgggtactatgatgaagctcccatggatgaatatggtatgtacaaggagcccaaatttgggcatctcagggacttgcacaatgtaataaggtcatatcagaaagcattcctcttggggaagcattcgtctgagatattgggtcatgggtatgaggcacacatctttgagttgcctgaagaaaatctttgcctctctttcctttccaacaataacacgggcgaagatggaacagtaatcttccgaggggagaagcactacgtgcctagccgttcagtctccattcttgcagggtgcaagaacgtggtttacaataccaagagggtgtttgtacaacacaatgaaaggtcataccatacctcagaggtaacaagcaagaataaccaatgggagatgtactcagaaaaaatcccgaagtaccgtgatactaaagtcaggatgaaggaacccctggagcaatttaaccaaaccaaggacgctagtgattacttatggtacaccacaagctttcgcttggagtcagacgatttgccttttagaaatgacatccggcctgtgcttcaggtcaaaagtagtgcacactcaatgatgggatttgccaatgatgctttcgtaggatgcgcacgcggaagcaagcaggtgaagggtttcatgtttgaaaaacccgttgatctgaaagtaggtgtgaaccatgttgtattgttgtcgtcaactatgggaatgaaggtaaaaattcgtcggaactgtggaatgtgtttggaatgtaagatgactgattatactgtcctagccgatatccaggcgaaaaaaatatggctgtattgacgcaagctacaaacactttattttggaaaggtggacatatataaatatcataaatagaagggtggcccatgcgctctgctaatgcaataatccttcccatcagctctaaatttgcatgtttcactatcttctgcaggacagtggtggtgaacttgctgaagtaaagagtggcattcaggagtgcctaatccagggtctgaacactgggacgttggatttacaagtcaatggctggggccataaggctgcactggaaggtgaggacaaggagatctactcagaaaaaggtgtgggcaaagttcagtggaaacctgccgagaacggccgggcagccacttggtataagagatacttcgatgagccagatggagatgatcccgttgtacttgacatgagctcaatggacaaaggaatgatttttgtgaatggtgaaggcgtgggtagatactgggtctcataccgaactcttgctggaactccttctcaagcactataccatattccgcgtcctttcttgaaatccaaggacaaccttttggttgtcttcgaggaggagatgggcaagccggatggcatcctcgtgcagacggtgacgagagacgacatatgtctgttcatctcggagcacaacccgggacagataaagacgtgggatacggatggtgacaaaatcaaactcattgcagaggatcacagcaggcggggcaccttgatgtgcccccctgagaagacaatccaagaagtcgtctttgccagcttcggcaacccagagggcatgtgcggcaacttcactgtaggcacttgccacactcccaatgcaaagcagatcgttgagaaggaatgcctcggcaagccatcctgcatgctgccggtggatcacacggtgtacggcgcggacatcaactgccaatcaacgactgctacactgggggtgcaggtgagatgcggaggcggcaagaagggtgcctgagaataacaagatggatgctgctaattaatggacgtttcagcttgtttgtttgttcatcccttcggtttggcactgatgcttac

SEQ ID NO: 145234 - DNA, 2733 bp, Zea Mays
cactgccaagcgcagttgtctctgatgtctggtcacgcctgacgacgccgctatcacgcgccaccctcctgccgacgaacgcggcctcctcctcattgctgagcgcagcccctcacttctctcctggctgcgccaccatgatgccgccacggaatgcgcagagccgccgaagagagcagagtcccagcgagaaacgcaggagctcttccttccacctctggcgaacctccaaggaaactcgacgcccagacctgctcgcgcacagggagcatctttgctccggcggctgctcgccggcctccctgtctcctccccagttcttcctctcacagccgtgcagcgccctcttctctacagtggccgctgctcctctctgaagctatgcgcaggagctctccaggacgccgcgcctcctccctgctacacgccccggtcgacgacgaacttcccgtggtctgggaggccgcgcccgcccagatccgccggaaggagcgaaaggagccccgccgccgctgtcatcacaggccgcacgggcttccggtggcctgctcaggcggcggctagggttttgaggggcgctcgggtcgcccagcgcggggacgaccgagcgccgtctgcttcaaacatttggagctcatcccctcgaaatacagaaggtgcatccacaaaggattaatctcttcgtctaattttcttgggcatacacagattcagagcatatggcgatcaagtagctatgcgttcagctgaggacattgcatatgctgtgttacggttttttgcaaagggtgggtcattggttaactactacatgtatcacggaggaacaaattttggaaggactggggcttcttatgtgctgactgggtactatgatgaagctcccatggatgaatatggtatgtacaaggagcccaaatttgggcatctcagggacttgcacaatgtaataaggtcatatcagaaagcattcctcttggggaagcattcgtctgagatattgggtcatgggcacacatctttgagttgcctgaagaaaatctttgcctctctttcctttccaacaataacacgggcgaagatggaacagtaatcttccgaggggagaagcactacgtgcctagccgttcagtctccattcttgcagggtgcaagaacgtggtttacaataccaagagggtgtttgtacaacacaatgaaaggtcataccatacctcagaggtaacaagcaagaataaccaatgggagatgtactcagaaaaaatcccgaagtaccgtgatactaaagtcaggatgaaggaacccctggagcaatttaaccaaaccaaggacgctagtgattacttatggtacaccacaagctttcgcttggagtcagacgatttgccttttagaaatgacatccggcctgtgcttcaggtcaaaagtagtgcacactcaatgatgggatttgccaatgatgctttcgtaggatgcgcacgcggaagcaagcaggtgaagggtttcatgtttgaaaaacccgttgatctgaaagtaggtgtgaaccatgttgtattgttgtcgtcaactatgggaatgaaggtaaaaattcgtcggaactgtggaatgtgtttggaatgtaagatgactgattatactgtcctagccgatatccaggcgaaaaaaatatggctgtattgacgcaagctacaaacactttattttggaaaggtggacatatataaatatcataaatagaagggtggcccatgcgctctgctaatgcaataatccttcccatcagctctaaatttgcatgtttcactatcttctgcaggacagtggtggtgaacttgctgaagtaaagagtggcattcaggagtgcctaatccagggtctgaacactgggacgttggatttacaagtcaatggctggggccataaggctgcactggaaggtgaggacaaggagatctactcagaaaaaggtgtgggcaaagttcagtggaaacctgccgagaacggccgggcagccacttggtataagagatacttcgatgagccagatggagatgatcccgttgtacttgacatgagctcaatggacaaaggaatgatttttgtgaatggtgaaggcgtgggtagatactgggtctcataccgaactcttgctggaactccttctcaagcactataccatattccgcgtcctttcttgaaatccaaggacaaccttttggttgtcttcgaggaggagatgggcaagccggatggcatcctcgtgcagacggtgacgagagacgacatatgtctgttcatctcggagcacaacccgggacagataaagacgtgggatacggatggtgacaaaatcaaactcattgcagaggatcacagcaggcggggcaccttgatgtgcccccctgagaagacaatccaagaagtcgtctttgccagcttcggcaacccagagggcatgtgcggcaacttcactgtaggcacttgccacactcccaatgcaaagcagatcgttgagaaggaatgcctcggcaagccatcctgcatgctgccggtggatcacacggtgtacggcgcggacatcaactgccaatcaacgactgctacactgggggtgcaggtgagatgcggaggcggcaagaagggtgcctgagaataacaagatggatgctgctaattaatggacgtttcagcttgtttgtttgttcatcccttcggtttggcactgatgcttac

SEQ ID NO: 145235 - DNA, 2832 bp, Zea Mays
atgaccgtccgggccgcggccgtgctggtggccgccgccgtgctcgttctcctcctcccgggatgggcggcggcggagtggaatctcacgaagaaaggcagcgtcgtcacctacgatgggcgctctctcatgatcgacggcaagcgggacctcttcttctccggcgccatccactaccccaggagcccgcctgaggtgtggccgaagctgatcgagcgggctaaggagggcggcctcaacacgatcgagacgtacatattctggaacgcgcacgaacctgagcctggcaagtacaattttgaaggccggttcgacttgatcaagtacctcaagatgatccaggagcatgacatgtatgcaattgtgcgcatcgggcccttcatccaggcagaatggaaccatggtggtctgccttattggcttagagagatcgaccacataatattccgggcaaacaatgatccctacaagaaagaaatggagaaattcgtgagattcatagtgcagaagttgaaggatgctgagttatttgcatctcaaggaggacccatcattctaacacagatcgagaatgaatatgggaacataaaaaaagatcatgcaacagacggtgacaagtacctcgaatgggcagctcaaatggcgctcagcacacaaacaggagttccatggataatgtgcaagcagtcttcagctcctggtgaagtgatccctacttgcaatggaaggcattgtggagatacatggacactacgcgacaaaaataagcctatgctttggactgagaattggactcaacaattcagagcatatggcgatcaagtagctatgcgttcagctgaggacattgcatatgctgtgttacggttttttgcaaagggtgggtcattggttaactactacatgtatcacggaggaacaaattttggaaggactggggcttcttatgtgctgactgggtactatgatgaagctcccatggatgaatatggtatgtacaaggagcccaaatttgggcatctcagggacttgcacaatgtaataaggtcatatcagaaagcattcctcttggggaagcattcgtctgagatattgggtcatgggtatgaggcacacatctttgagttgcctgaagaaaatctttgcctctctttcctttccaacaataacacgggcgaagatggaacagtaatcttccgaggggagaagcactacgtgcctagccgttcagtctccattcttgcagggtgcaagaacgtggtttacaataccaagagggtgtttgtacaacacaatgaaaggtcataccatacctcagaggtaacaagcaagaataaccaatgggagatgtactcagaaaaaatcccgaagtaccgtgatactaaagtcaggatgaaggaacccctggagcaatttaaccaaaccaaggacgctagtgattacttatggtacaccacaagctttcgcttggagtcagacgatttgccttttagaaatgacatccggcctgtgcttcaggtcaaaagtagtgcacactcaatgatgggatttgccaatgatgctttcgtaggatgcgcacgcggaagcaagcaggtgaagggtttcatgtttgaaaaacccgttgatctgaaagtaggtgtgaaccatgttgtattgttgtcgtcaactatgggaatgaaggtaaaaattcgtcggaactgtggaatgtgtttggaatgtaagatgactgattatactgtcctagccgatatccaggcgaaaaaaatatggctgtattgacgcaagctacaaacactttattttggaaaggtggacatatataaatatcataaatagaagggtggcccatgcgctctgctaatgcaataatccttcccatcagctctaaatttgcatgtttcactatcttctgcaggacagtggtggtgaacttgctgaagtaaagagtggcattcaggagtgcctaatccagggtctgaacactgggacgttggatttacaagtcaatggctggggccataaggctgcactggaaggtgaggacaaggagatctactcagaaaaaggtgtgggcaaagttcagtggaaacctgccgagaacggccgggcagccacttggtataagagatacttcgatgagccagatggagatgatcccgttgtacttgacatgagctcaatggacaaaggaatgatttttgtgaatggtgaaggcgtgggtagatactgggtctcataccgaactcttgctggaactccttctcaagcactataccatattccgcgtcctttcttgaaatccaaggacaaccttttggttgtcttcgaggaggagatgggcaagccggatggcatcctcgtgcagacggtgacgagagacgacatatgtctgttcatctcggagcacaacccgggacagataaagacgtgggatacggatggtgacaaaatcaaactcattgcagaggatcacagcaggcggggcaccttgatgtgcccccctgagaagacaatccaagaagtcgtctttgccagcttcggcaacccagagggcatgtgcggcaacttcactgtaggcacttgccacactcccaatgcaaagcagatcgttgagaaggaatgcctcggcaagccatcctgcatgctgccggtggatcacacggtgtacggcgcggacatcaactgccaatcaacgactgctacactgggggtgcaggtgagatgcggaggcggcaagaagggtgcctgagaataacaagatggatgctgctaattaatggacgtttcagcttgtttgtttgttcatcccttcggtttggcactgatgcttac

SEQ ID NO: 145236 - DNA, 124 bp, Zea Mays
tttctatgttgtttaaaactacgtttaaacgaagtttaaatgttaaaacttcacccatatttaaatgtttaaaagtcaaaacttcacccataaacgtttaaccttgaaaagtacaagcttcgac

SEQ ID NO: 145237 - DNA, 932 bp, Zea Mays
tcagcatcctttctttcctgtcttgtcttggagcagtagttgacatgatactgacccttttggttgtagcataagctgctatttatcttgatctgttttatttgattaagatcagcgagcaagctgcggccttcttttgcttcgatccatctccacttgtttttttgctggctggagtttcttttaattgtttgcttagctctgcagcttcgatttgttccgaaactttgttgatctatctgtgctgttgttgctcagatcagctcgcaaggaactaacacactttattttttagatcttagaattctgactccatatcttgatctcgatggcttgcacgccgtactacaacacctgcacagcccgccacgccacgaagaacgccccgtcatttccgcgaccgccggcgccaccccaggctccgcgcgccaaggagccacagccacacaagatggccgtcgctcctgaaccatccaagaagagggtggcgccggggactggactggaggagtggacggagacggcggactcgctctactccgtgtccccaccgccgagcagcgtaccgatgcctacgtccctgttgctcacagtcacgccgccgaccgcctgcgccgtggatgtcggcgccaccgacgagctccgacggatcctcaagctttagctgcgacgatgcggctatggcatcgcaacaaagatgtgatctgcgtgactgtccgttctctttagcgagcaagcgagcttcatggtctcgtcccaaagttgtactattctagtaatcgaatgttccaatgcgttgtgttttccattccaaccaaaccacgcattcgagtatgagatgttgcttttttttctttttttttgtaatcgaatgtgtccgtattgtgttccgaaccactaattaattccagtatgagatgtctccgtttgaa

SEQ ID NO: 145238 - DNA, 258 bp, Zea Mays
atgcggaaggcgagtccatggaactctcggggatcggtgctccgggcggcggcggagaaatttgattcggccggcaggggggaggaatcgaattggtttgggccttcggctgtcggcacgtcgctgctcacgcacacggcggccgcgatccaaggtggggttaacaataatccgtggggcgcaaatgctataattaaggtcactaaactagcgcgtgtgcatgagggtggatcttctccacagtgttacatcggataa

SEQ ID NO: 145239 - DNA, 1827 bp, Zea Mays
atgtcccatctcctggagcgcgaggccgacaccgccttccttccccacttggatcagcgggatggagttgaggcgtggctcatcctgcgccggtgcactcccgcctccttcaacgtcgcctccaccgaccccaacaacgaggtctcgagcgccgttaccgcggacgcgctcgctaaggccgcgcccgcgctcttcgcttcgagggcgcccagaccatcgctcaagtacctggagctgcttctccaggcagaaatcgacttcgaccacattgacctaccgactgctgccgccgcagagcacatcgtcgcccaggtcaccggcaacaacgcggtgtccgtggtggaggaccaactcaggtgcaccctcttcctcacgcgtaacttcctgtcaagccaccaccaggccgtcagcaaggagtgggacatggtcgccgtcgtgcacccagtgtgcaacgtgggggaaaagaagcctgctgtgtcgacatgctcatcagcatcttctgctcaagaagatacaccaataccactcctcttccttcgcggtggactgagtatgatggataatgtcttacctgctaattctactttcctgtctaccaacatatcactcagcaacatggagtgtctgagagagtttatgcttcaccttaagctcggcaccgccagattcactatttgtgacgaaagtgtagtgaacctgtggtcgtcgccggtggagcgagttgttcagcaacaaacatggctacaacttgagttgacaaatagtggtcttgacctatggcctatctcatggcaatcgcaacaagtctattttggtactcaccatggattcgctgcatggcccaggagccatggcacaattcttgtcttcgattttagcaataccttgtcctggaacaactcaatgtcaattgttgcttcatgctcaaccaacacccttcttgccaaggatgatggagattctatgaaccggtgtttcagttggtgttggaagcctccatggttacatccaggagtctgccgttctctgcacatgattactaaattttctaagcaatactttgttggcctatttttgctaattacaagggaaaaatttatgtctgggagaataatgttggctcttcttccacttctgaagctatttacatcaggaggagcaaggattgtcaatgcttcctcacttgcgtcggagctgaagagaatgccaaatgagaagttgcgaaacgatttgagcaacattgacatctgggacgaggaccggatacaagcagtactcaacacattcttggaagacctgaggagcggtcggctggaagaggctgggtggcccgtgatgctaccagcctacagcctgtcgaaaatggtcatcaatctgtacaccaggatcatagcaaggaggtatccggagatgcgcatcaactgtgtgcgacctggatttgtcacgacggacatcagctggaatctgggggtcctgacgcctaaacaaggtgcgagagggccagtcatgctagctctcctcccagatgatggaccaacgggttggtacagagatgaaatgggcgataagatgggcagcctattatttttcaaaatggtcaagtattcatcactagtcgagggattttgtggtgtgcagttttcatttcctaatattctattgtgcaagtcttggtcacaggagttagccaccaacacagaaagccatttactaccagaaatgctagaagcggccaatggttatatttgtcatgagcttcatcttatgcttacctctattggagtgacacatatgatcgattgtgaagatactccatccttcctgtga

SEQ ID NO: 145240 - DNA, 107 bp, Zea Mays
gaaatcaagtacccaatagctggtgccaagggattatccttcctgggtgtcccactctccactgcttagggtcagatcttcatagggggtgtggcttagggtcagat

SEQ ID NO: 145241 - DNA, 1926 bp, Zea Mays
ccaaaaccctgctaccagccagcgtactgccactgccaccgctccgctttcccgtcgtctccctgttgctctgctgcacagcaatcgtctcgtttcatacagggcagggaagtcaggaggaagatgatgcagcaggagccctggaacgccgccgccgccatggggctcctccgcccgaccaagtcggcgccctgctcgcccatcaagccgccgccggcgaccatgctgcggactcacttccacgtcgcgcacaaggtgccggtcggcgacacgccctacgtgcgagccaagcgcgtccagctggtggacaaggatccggagaaggcgatcgcgctgttctggagtgcgatcaacgccggagaccgcgttgacagcgcgctcaaggacatggccatcgtgatgaagcagcagaaccgcgccgaggaggccatcgaggccatcaagtcgctgcgcagccgatgctccgaccaggcgcaggagtccctcgacaacatcctcctcgatctctacaagagatgcgggcggctggacgaccaaatctcgctgctcaagcacaagctgcagctgatcaaccagggccacgccttcaacggcaagcggaccaaaacggctcgctctcagggccgcaagttccaggtcaccctggagcaagaagccaccaggctccttggtaacctggggtgggcgctgatgcagaaggagaactacacggaagcggagggagcgtaccgtcgggcgctgctcatcgggccggacaacaacaagatgtgcaatctgggcatctgccttatgaagcaggcccgcgtgctcgaggccaaggatgtgctcaagcaggtacgccccgcggcggttgatggtctgcgcggcgccgactctcacctcaaggcctacgagcgagcgcaggagatgctgcgggacctcgagaccaagctcatcggccgcccgcccgctgaccagctcgacacgaactggctcttcgatgcgctgctgctgggatcgtcctcaagcatctggcagccgcagccgtgcaccgatcacttgctgccacctcctgttccggctccagccacggcgccgcgcggccacttcgccgatgaaaacgccggtgtgagcaagaagctggcggtgctccaggagaacatgcttaatgtggacgcgcagcccttctactctttgcgggtgccgtcgcttgcagccaagtcacataacacgctgcctcagcggcaacagcagcagaagccagctcctgtccatgatcccctgggcaacctgaagagaacacggtccggcaattgcatggacaaggcaggagcagtggtgttcaaggagcagagcatcgacgagaacagcggcaggaggaagtcgctgtcagctgaggacaggtggccagagctacccgaccacagcgcgttcgatgaggccctcgtcgccgtcgtcctggctccagtgctcgacgacgaaccaacagctactgaagtcaagctgccggcgagctgcgacacgagcccagcggtgaaggaaaagatcggcaagaggctgaggatcttccaggacatcacacagacagtgaacagtttctgattcgttttggttttcttcaatttcctactcacaaattaatcagggaaggagaaaggacttgttctcctgggacctaaattaatcagggattcgattcgatttttaatttgatgctgattttaatttaatttattaacacacaaaaataacagctgattcgcttcttcagcttgacactttagaagcgcgtgcttcctttaccgcaagattctcctcgtaatagaagttgcatcttgttctaatttcatttcttttgaaataacaaagttcatttgtgtatcggcgactcattttgactttcagtgcaatcgtttgataaaaaaaatctaaagtggccaaaaaggt

SEQ ID NO: 145242 - DNA, 1953 bp, Zea Mays
ccaaaaccctgctaccagccagcgtactgccactgccaccgctccgctttcccgtcgtctccctgttgctctgctgcacagcaatcgtctcgtttcatacagggcagggaagtcaggaggaagatgatgcagcaggagccctggaacgccgccgccgccatggggctcctccgcccgaccaagtcggcgccctgctcgcccatcaagccgccgccggcgaccatgctgcggactcacttccacgtcgcgcacaaggtgccggtcggcgacacgccctacgtgcgagccaagcgcgtccagctggtggacaaggatccggagaaggcgatcgcgctgttctggagtgcgatcaacgccggagaccgcgttgacagcgcgctcaaggacatggccatcgtgatgaagcagcagaaccgcgccgaggaggccatcgaggccatcaagtcgctgcgcagccgatgctccgaccaggcgcaggagtccctcgacaacatcctcctcgatctctacaaggttcgtgctcgtacttcgtctaccttaatttctctgcacgtgcgctcgattcatgcctctggctctgagacggtattaaatttaaatgcgcagagatgcgggcggctggacgaccaaatctcgctgctcaagcacaagctgcagctgatcaaccagggccacgccttcaacggcaagcggaccaaaacggctcgctctcagggccgcaagttccaggtcaccctggagcaagaagccaccaggctccttggtaacctggggtgggcgctgatgcagaaggagaactacacggaagcggagggagcgtaccgtcgggcgctgctcatcgggccggacaacaacaagatgtgcaatctgggcatctgccttatgaagcaggcccgcgtgctcgaggccaaggatgtgctcaagcaggtacgccccgcggcggttgatggtctgcgcggcgccgactctcacctcaaggcctacgagcgagcgcaggagatgctgcgggacctcgagaccaagctcatcggccgcccgcccgctgaccagctcgacacgaactggctcttcgatgcgctgctgctgggatcgtcctcaagcatctggcagccgcagccgtgcaccgatcacttgctgccacctcctgttccggctccagccacggcgccgcgcggccacttcgccgatgaaaacgccggtgtgagcaagaagctggcggtgctccaggagaacatgcttaatgtggacgcgcagcccttctactctttgcgggtgccgtcgcttgcagccaagtcacataacacgctgcctcagcggcaacagcagcagaagccagctcctgtccatgatcccctgggcaacctgaagagaacacggtccggcaattgcatggacaaggcaggagcagtggtgttcaaggagcagagcatcgacgagaacagcggcaggaggaagtcgctgtcagctgaggacaggtggccagagctacccgaccacagcgcgttcgatgaggccctcgtcgccgtcgtcctggctccagtgctcgacgacgaaccaacagctactgaagtcaagctgccggcgagctgcgacacgagcccagcggtgaaggaaaagatcggcaagaggctgaggatcttccaggacatcacacagacagtgaacagtttctgattcgttttggttttcttcaatttcctactcacaaattaatcagggaaggagaaaggacttgttctcctgggacctaaattaatcagggattcgattcgatttttaatttgatgctgattttaatttaatttattaacacacaaaaataacagctgattcgcttcttcagcttgacactttagaagcgcgtgcttcctttaccgcaagattctcctcgtaatagaagttgcatcttgttctaatttcatttcttttgaaataacaaagttcatttgtgta

SEQ ID NO: 145243 - DNA, 1180 bp, Zea Mays
cacaaacacgaagcccaagtagaaacagactgcacccctttttcccaaacgcccctgaacaagacaaggcccagaaaaaattcagcaaacaagcaaaggtacggccaccaccaccggccaggaagcaagctcaaaccctaaccgccggcgacgccagcacgatggcccgctacgaccgcgcgatcaccgtcttctcccccgacggccacctcttccaggtcgagtacgccctggaggccgtccgcaagggcaacgccgccgtcggcgtccgcggcacggacaccgtcgtcctcggtgtggagaagaagtcaacccccaagctccaggactccaggtccgtgcgcaagatcgcgtgcctggacacccacatcgctctggcatgcgcggggctgaaggcggacgcacgcgtgctcatcaaccgcgcgcgggtcgagtgccagagccaccgactcaccgtcgaggaccccgtcaccgtcgagtacatcacccgctacatcgctgggctgcagcagaagtatacacagagtggtggagtccgccctttcggcctctccacactcattgtcggcttcgacccctacaccgacaagccagcgctgtaccagaccgatccttctggtaccttctctgcttggaaggcgaacgccacgggaaggaactccaactctatgcgtgagtttctggagaagaactacaaggagacctccggcaaggagaccatcaagcttgctattcgtgcacttctagaggttgttgaaagtggtgggaagaacatcgaggttgcagtgatgacaaagaaggatggtctccgggaacttgaggaggctgagattgatgaatatgttgctgagatagaggcagagaaggctgcagctgaggctgcaaagaagggtggtcctagggacacctagtccctgtattgtggtattcctccctttgtgtgtcttgtttttatgttccatagcaccatcttaattgttttagaagaaggatgcttatatggctgtggctgccttgtgacttgtgtgggtctgtgggctgcggggtagttctaaagctctgcagccccgagtgtttatttattaattattgttgaggttgagagaagagggatgacaccacaccatggtttctctagtcgttctgatgcaggaagcaacgaacctgggctccgttcctc

SEQ ID NO: 145244 - DNA, 880 bp, Zea Mays
cagcccaccaaactgcaggcaagacggacacaaacacgaagcccaagtagaaacagactgcacccctttttcccaaacgcccctgaacaagacaaggcccagaaaaaattcagcaaacaagcaaagcacgatggcccgctacgaccgcgcgatcaccgtcttctcccccgacggccacctcttccaggtcgagtacgccctggaggccgtccgcaagggcaacgccgccgtcggcgtccgcggcacggacaccgtcgtcctcggtgtggagaagaagtcaacccccaagctccaggactccaggtccgtgcgcaagatcgcgtgcctggacacccacatcgctctggcatgcgcggggctgaaggcggacgcacgcgtgctcatcaaccgcgcgcgggtcgagtgccagagccaccgactcaccgtcgaggaccccgtcaccgtcgagtacatcacccgctacatcgctgggctgcagcagaagtatacacagagtggtggagtccgccctttcggcctctccacactcattgtcggcttcgacccctacaccgacaagccagcgctgtaccagaccgatccttctggtaccttctctgcttggaaggcgaacgccacgggaaggaactccaactctatgcgtgagtttctggagaagaactacaaggagacctccggcaaggagaccatcaagcttgctattcgtgcacttctagaggttgttgaaagtggtgggaagaacatcgaggttgcagtgatgacaaagaaggatggtctccgggaacttgaggaggctgagattgatgaatatgttgctgagatagaggcagagaaggctgcagctgaggctgcaaagaagggtggtcctagggacacctag

SEQ ID NO: 145245 - DNA, 585 bp, Zea Mays
cattttctttatagttgtcaaaattgttcacagagttttatgtatattttcatatatatttttaggtttatgttgaaaccgatccagctacaaacactccacaggttggccaggcttctcttgattcggagatgcaaactgtgttagctctacgcgaatatttgtgtggtctgcaatctgacaccggcaggaccataatagattatggtgaatattcagcgacatgttctgacatatatgaatcttttgccgatgggaagtgtctcgacaatggattcatgcagtgtttcatccaatgtgttattcatgatgcaaaaaatcagcagacttccatgagttcaaacagtttggttcttgatgttaatgttgggtcaatactcaactttgaggaacaggaacgacagtcgcaatcctcaaccttttgatgaatctgtactccacacacttctagacaattcattgcctgagacagatgagttggaccaatacaaagcggcaacaatcctatttcataatccaaacacaattccttttaaatgtaacatatcacattgttatgcttttgtaagttaccctgttaatttt

SEQ ID NO: 145246 - DNA, 2404 bp, Zea Mays
ccatcgaagaaaaggggaaaaggggaaaatgatttcttaaaaaagaggagtgacccggtctaccggagcgtacggtgccgatcccgtcgccgccgctacccctcaatcgcgagcaacttcttccggattcgcaccaagctctccacaattctatcgctatgctgcggaaggccgtcgtcgccttcatcgcctgcaccgccttcttcctcgccttctctgcctactcccgtcgccagggcgttgcagaggttcaattaccagcagttactcacagggtctacctagatgtagaaattgatggccaacacataggtagaattgttattggtctctatggggaggtcgttccaaaaacagttggtattcttattatacttctctttttccagcatgttcttttattgattttgattttcgaagtttgtgtactcctttgcacgcctggtgcttcctgcgcttctgttctagactcttgacatgtggcatagtcatgaactcacacatttgtgagtttccccattgttttggttaaaagttaccctgtccctgttccaagtagaagtttagttgatacatattaatttctaacatctgtctgttcctatcagtgtgctgttttgtgtggttaacaaagatctagttgctagcactcttcctattttcatgattccacttatatatgcctatagaagggcagactggtacagtggtgagagctatctcattgattcaccaggtctagggtttgaagcagcctttccgcatttgcggagtaaggcttacctttgtttatcctttccctaaatccaactcatgtgggagccttcagcatggggcctgcccaattatacatgcgtatggctgagaccaacctcaccgcttcaaacttacaattatcatgtcaaagtttttttttgtaacatatatgaaataaaattggcttcacagattatagttcatctactaaatttttttgttctacactctgcagaaaactttagggctctttgtacaggtattttctctctggtctccatggcttattttctcgccagcaaccccacctgagctgatcgttcatgtccatttgttcaccatttcaggtgaaaaaggtgtcgggtccaatggcaaacctcttcactataagggaacaccattccatcgtattatccctggcttcatgattcagggcggtgacatagttagaggcgacggtaaagggagtgagtctatatatggaggcatcttcccagatgagaatttcactgtaaaacatacacatccaggtgtgattgttcagccagtgaactttatcatccagtttgcattttgcctttgttgaagttcatgtgtactcagttacacatttattttcaaggaaaccaccactattttatttgacactaatgatgctatctattaaagaatatgcaacttttagttgatggcatcttttttagattacaacgcggtcttttttagattacaacgggtctggtttctgatttgattcactatgtagctacacctgatttcaagaaagctttgtaccgagacctactaagttgtttgtcagcaacaagtccaaatattctggtgtttttttccttttgttttactttgtttatatttctttcatcctgacttggttagcaaccggtcaatgtggccaaatcatgaatgggtgtttgatcttctgacaggtatctatctgaatttttttaaattaggatggtcatttccaactctacccctgctttgctgtcttgcaggggttgttgctatggcgaattctggacttgattctaatggatctcagttttacataactactatcaagacaagctggttggatggggagcatgttgtcttcggcagggtgatccaaggaatggataccgtgtacgccatagaagggggcgctgggacttacaatggcaagccaaggaagaaggcggtgatcaccgacgctggtgagatacccaaggagaaatggggtgatcaggaagcgtagggtgttttctacttcttgtcaccttcaaatcaggtagccatgtacttcttttttccttgacctccatggtgtgccacggttcagcaagacttccggaatgttgtatatcgtagctagcttatggccagtcgaattgactctgatcccttgagttgtgatgtggagacgcatacatctgaaaaatctttaggccatgttcggttagggtggagtgaaggggattaagtttccttccattcaaatttgaatttaaatttcaataggaggaggttgttcgcttcgaattaaagctaactgtttagactgttatagctgtaatctgtacagacaaaaacattgtataagcagaagctaatatggattaaagctaagcgaacaggctattaatct

SEQ ID NO: 145247 - DNA, 1199 bp, Zea Mays
ccatcgaagaaaaggggaaaaggggaaaatgatttcttaaaaaagaggagtgacccggtctaccggagcgtacggtgccgatcccgtcgccgccgctacccctcaatcgcgagcaacttcttccggattcgcaccaagctctccacaattctatcgctatgctgcggaaggccgtcgtcgccttcatcgcctgcaccgccttcttcctcgccttctctgcctactcccgtcgccagggcgttgcagaggttcaattaccagcagttactcacagggtctacctagatgtagaaattgatggccaacacataggtagaattgttattggtctctatggggaggtcgttccaaaaacagttgaaaactttagggctctttgtacaggtgaaaaaggtgtcgggtccaatggcaaacctcttcactataagggaacaccattccatcgtattatccctggcttcatgattcagggcggtgacatagttagaggcgacggtaaagggagtgagtctatatatggaggcatcttcccagatgagaatttcactgtaaaacatacacatccaggggttgttgctatggcgaattctggacttgattctaatggatctcagttttacataactactatcaagacaagctggttggatggggagcatgttgtcttcggcagggtgatccaaggaatggataccgtgtacgccatagaagggggcgctgggacttacaatggcaagccaaggaagaaggcggtgatcaccgacgctggtgagatacccaaggagaaatggggtgatcaggaagcgtagggtgttttctacttcttgtcaccttcaaatcaggtagccatgtacttcttttttccttgacctccatggtgtgccacggttcagcaagacttccggaatgttgtatatcgtagctagcttatggccagtcgaattgactctgatcccttgagttgtgatgtggagacgcatacatctgaaaaatctttaggccatgttcggttagggtggagtgaaggggattaagtttccttccattcaaatttgaatttaaatttcaataggaggaggttgttcgcttcgaattaaagctaactgtttagactgttatagctgtaatctgtacagacaaaaacattgtataagcagaagctaatatggattaaagctaagcgaacaggctattaatct

SEQ ID NO: 145248 - DNA, 1435 bp, Zea Mays
ccatcgaagaaaaggggaaaaggggaaaatgatttcttaaaaaagaggagtgacccggtctaccggagcgtacggtgccgatcccgtcgccgccgctacccctcaatcgcgagcaacttcttccggattcgcaccaagctctccacaattctatcgctatgctgcggaaggccgtcgtcgccttcatcgcctgcaccgccttcttcctcgccttctctgcctactcccgtcgccagaggggaaccgcttcctggtggagctggtagaaggcccgacgattacgtgattggagtttgtttcggcgggggtggttgtgatctggtgatgtcatgcacgccagtttgttatggcatcggcaagatacagggccccatcggcagtggtgataaccggcgtgtgcacatgcatgatggagccgagaggctcatgtcggataggtgtgggctgctaccagactcaatttggctgtcagggcgttgcagaggttcaattaccagcagttactcacagggtctacctagatgtagaaattgatggccaacacataggtagaattgttattggtctctatggggaggtcgttccaaaaacagttgaaaactttagggctctttgtacaggtgaaaaaggtgtcgggtccaatggcaaacctcttcactataagggaacaccattccatcgtattatccctggcttcatgattcagggcggtgacatagttagaggcgacggtaaagggagtgagtctatatatggaggcatcttcccagatgagaatttcactgtaaaacatacacatccaggggttgttgctatggcgaattctggacttgattctaatggatctcagttttacataactactatcaagacaagctggttggatggggagcatgttgtcttcggcagggtgatccaaggaatggataccgtgtacgccatagaagggggcgctgggacttacaatggcaagccaaggaagaaggcggtgatcaccgacgctggtgagatacccaaggagaaatggggtgatcaggaagcgtagggtgttttctacttcttgtcaccttcaaatcaggtagccatgtacttcttttttccttgacctccatggtgtgccacggttcagcaagacttccggaatgttgtatatcgtagctagcttatggccagtcgaattgactctgatcccttgagttgtgatgtggagacgcatacatctgaaaaatctttaggccatgttcggttagggtggagtgaaggggattaagtttccttccattcaaatttgaatttaaatttcaataggaggaggttgttcgcttcgaattaaagctaactgtttagactgttatagctgtaatctgtacagacaaaaacattgtataagcagaagctaatatggattaaagctaagcgaacaggctattaatct

SEQ ID NO: 145249 - DNA, 1830 bp, Zea Mays
ccatcgaagaaaaggggaaaaggggaaaatgatttcttaaaaaagaggagtgacccggtctaccggagcgtacggtgccgatcccgtcgccgccgctacccctcaatcgcgagcaacttcttccggattcgcaccaagctctccacaattctatcgctatgctgcggaaggccgtcgtcgccttcatcgcctgcaccgccttcttcctcgccttctctgcctactcccgtcgccagggcgttgcagaggttcaattaccagcagttactcacagggtctacctagatgtagaaattgatggccaacacataggtagaattgttattggtctctatggggaggtcgttccaaaaacagttggtattcttattatacttctctttttccagcatgttcttttattgattttgattttcgaagtttgtgtactcctttgcacgcctggtgcttcctgcgcttctgttctagactcttgacatgtggcatagtcatgaactcacacatttgtgagtttccccattgttttggttaaaagttaccctgtccctgttccaagtagaagtttagttgatacatattaatttctaacatctgtctgttcctatcagtgtgctgttttgtgtggttaacaaagatctagttgctagcactcttcctattttcatgattccacttatatatgcctatagaagggcagactggtacagtggtgagagctatctcattgattcaccaggtctagggtttgaagcagcctttccgcatttgcggagtaaggcttacctttgtttatcctttccctaaatccaactcatgtgggagccttcagcatggggcctgcccaattatacatgcgtatggctgagaccaacctcaccgcttcaaacttacaattatcatgtcaaagtttttttttgtaacatatatgaaataaaattggcttcacagattatagttcatctactaaatttttttgttctacactctgcagaaaactttagggctctttgtacaggtgaaaaaggtgtcgggtccaatggcaaacctcttcactataagggaacaccattccatcgtattatccctggcttcatgattcagggcggtgacatagttagaggcgacggtaaagggagtgagtctatatatggaggcatcttcccagatgagaatttcactgtaaaacatacacatccaggggttgttgctatggcgaattctggacttgattctaatggatctcagttttacataactactatcaagacaagctggttggatggggagcatgttgtcttcggcagggtgatccaaggaatggataccgtgtacgccatagaagggggcgctgggacttacaatggcaagccaaggaagaaggcggtgatcaccgacgctggtgagatacccaaggagaaatggggtgatcaggaagcgtagggtgttttctacttcttgtcaccttcaaatcaggtagccatgtacttcttttttccttgacctccatggtgtgccacggttcagcaagacttccggaatgttgtatatcgtagctagcttatggccagtcgaattgactctgatcccttgagttgtgatgtggagacgcatacatctgaaaaatctttaggccatgttcggttagggtggagtgaaggggattaagtttccttccattcaaatttgaatttaaatttcaataggaggaggttgttcgcttcgaattaaagctaactgtttagactgttatagctgtaatctgtacagacaaaaacattgtataagcagaagctaatatggattaaagctaagcgaacaggctattaatct

SEQ ID NO: 145250 - DNA, 721 bp, Zea Mays
ccatcgaagaaaaggggaaaaggggaaaatgatttcttaaaaaagaggagtgacccggtctaccggagcgtacggtgccgatcccgtcgccgccgctacccctcaatcgcgagcaacttcttccggattcgcaccaagctctccacaattctatcgctatgctgcggaaggccgtcgtcgccttcatcgcctgcaccgccttcttcctcgccttctctgcctactcccgtcgccagggcgttgcagaggttcaattaccagcagttactcacagggtctacctagatgtagaaattgatggccaacacataggtagaattgttattggtctctatggggaggtcgttccaaaaacagttgaaaactttagggctctttgtacaggtgaaaaaggtgtcgggtccaatggcaaacctcttcactataagggaacaccattccatcgtattatccctggcttcatgattcagggcggtgacatagttagaggcgacggtaaagggagtgagtctatatatggaggcatcttcccagatgagaatttcactgtaaaacatacacatccaggtgtgattgttcagccagtgaactttatcatccagtttgcattttgcctttgttgaagttcatgtgtactcagttacacatttattttcaaggaaaccaccactattttatttgacactaatgatgctatctattaaagaatatgcaactttta

SEQ ID NO: 145251 - DNA, 208 bp, Zea Mays
tttgagttcatacttattttagaaacttgagctcacaaattttctcttatttggtctctgtatggtggaattatgtcattttataatctctgttcgttcagtcagtcgttgtgaactctcttctaatcgctcacttcattggtcgtgttgtaccaatacatattggatggagtaaacaataacatcagttagccaaatcaaaaaaata

SEQ ID NO: 145252 - DNA, 98 bp, Zea Mays
tttcttattttttagatttgaatcgtgttgccttcttttgagttgttacgcaacaaatggtctagttttacgatgtgttttaattctaaaacttctac

SEQ ID NO: 145253 - DNA, 396 bp, Zea Mays
atggggatggacaaatgcagcgcgaatggacaagtgtagcgtgaacaaggtggacagcgacaacgtacacaaggcgggcatggtgatgaacgggttgtccatcagtgtgtacgcatcagagacgttggggtgtgcggcggccatgtccacagacggttgatgagcaagatgctcgggcgcaatggggattcaccgctgatcaggttcggcacatacacatgcggcgcgtgcgccgtgtcgggcacgctcaagtgggacatggccactgtcatggagtacaagggcctacctctgcagcaggtcgtcgactactatgtcaggggcacgatgcagaatatccgaagtcaactattatcaataattagccgatataaactatttacaaatctttactaa

SEQ ID NO: 145254 - DNA, 1152 bp, Zea Mays
caacccccctcccgtgccgttcaccaccacttccttcttcctccccctaaccgccactgcactgcttacccccatatagctaaccgcaactgccatttcaacaacttctcggtcagccttgtcacatttttttgacacatacatacatacatacatacatacattcaattttaatttgttgggtaaattaaattgggttcgatcgagtccgacgatggcttctttgatgatcagtctgtcgtcattcgtgatcctatcattctttcaaggtgcggccggcgggatcacgttcacgttcacgaaccggtgcggcggcacggtgtggccggggttgctggccaactccgggagctcgccgctgcagacgacggggttcgagctggggcccggcgagacgcggtcgctgacggcgccgccggggtggtcggggcggttctgggcgcgcacggggtgcgcgttcgacgccgcgtcgggcaagggcgcgtgcgcgacgggggactgcgggtcgggcgaggtggagtgccgcggcaggggcgcgaccccgccggcgacgctggcggagttcacgctgggcggcgggggcaaggactactacgacgtgagcctggtggacggctacaacctgcccatggtggtggaggcggcggcgccgggctgccccgtcacgggctgcctggtggacctcaacgagcggtgcccagtggagctgcgcgccggcggccaggcctgccgcagcgcgtgcgaggcgttcggcacgcccgagtactgctgcagcggccagttcggcaacccggacacgtgccacccctcgccctactcgcagatgtttaaggcggcgtgcccgcgctcctacagctacgcctacgacgacgccacctccaccttcacttgcaccggcaccgactactccatcaccttctgcccgcctcgcgctggcacgtccagcagccagaaggcgaccaagggccccttgccgacgcccagggacgtgcagctcgagggcgactcgtggctggcgagcctggccaccggcgagacggacgccgcgacgtcgacggcggcggcgtcgctgctccaggccgcatcggcagcggccgcagtcgttgccttgcttttatgaccggatcgacgacggcggcggatggatgagga

SEQ ID NO: 145255 - DNA, 1268 bp, Zea Mays
caacccccctcccgtgccgttcaccaccacttccttcttcctccccctaaccgccactgcactgcttacccccatatagctaaccgcaactgccatttcaacaacttctcggtcagccttgtcacatttttttgacacatacatacatacatacatacatacattcaattttaatttgttgggtaaattaaattgggttcgatcgagtccgacgatggcttctttgatgatcagtctgtcgtcattcgtgatcctatcattctttcaaggtgcggccggcgggatcacgttcacgttcacgaaccggtgcggcggcacggtgtggccggggttgctggccaactccgggagctcgccgctgcagacgacggggttcgagctggggcccggcgagacgcggtcgctgacggcgccgccggggtggtcggggcggttctgggcgcgcacggggtgcgcgttcgacgccgcgtcgggcaagggcgcgtgcgcgacgggggactgcgggtcgggcgaggtggagtgccgcggcaggggcgcgaccccgccggcgacgctggcggagttcacgctgggcggcgggggcaaggactactacgacgtgagcctggtggacggctacaacctgcccatggtggtggaggcggcggcgccgggctgccccgtcacgggctgcctggtggacctcaacgagcggtgcccagtggagctgcgcgccggcggccaggcctgccgcagcgcgtgcgaggcgttcggcacgcccgagtactgctgcagcggccagttcggcaacccggacacgtgccacccctcgccctactcgcagatgtttaaggcggcgtgcccgcgctcctacagctacgcctacgacgacgccacctccaccttcacttgcaccggcaccgactactccatcaccttctgcccgcctcgcgctggcacgtccagcaggtaaagagagaacgaagcatcaaactgggatggcgaaaggaggcgctttaattaaattgttcgccatgcttcttttgctgccctgcaccgcatttgttccttccccaccatgtatggccatggacagctcgagaaaagcttggaatctcacggccacacggttgatctctgtgtgcagccagaaggcgaccaagggccccttgccgacgcccagggacgtgcagctcgagggcgactcgtggctggcgagcctggccaccggcgagacggacgccgcgacgtcgacggcggcggcgtcgctgctccaggccgcatcggca

SEQ ID NO: 145256 - DNA, 197 bp, Zea Mays
ttttttttcttttttcttagtttaatatatgtgtaaaaagttacctagacgaatcatatcttgggttggttattccctaagtgtttcaattgtaaataatactccatgtgtcctaaatctctactatacttaaagcgtcagtttcaacgtcatctttttacaaaaaagtccttacatttcttccaaatcaattcagc

SEQ ID NO: 145257 - DNA, 1305 bp, Zea Mays
aatgctgctgttccctcccccgtttcaatgccttggcttcaagtgaccgtggtaaaagaaaatttgacgccacaacacacgtcggttgcttgtttacttggtgtggctttaattcgactgcagctgctgcggcttttattttgtcattagagagcagccgagcgccaccgtccatcacgagcttccatgttcaagccctgctctctgctcttataataaataaaagtcggcacatgattgcatcgcccccccgcctacagactccaaacaaaatcaagactgagagcaaaaccgtctcatctgatctagcgagcactccagctttctgcaatggcgattcaccgtctgatgcttcccatttctatccttctgatgagctcactctccggtacgccgccgcccctcgatggcacgcgcgataattaatcctgatccttccttacgatgccgtgtttgctgccttgtgcaggggccgtgtcgacgacgttcacgctggccaactcctgcggctacacggtgtggcctgggctgctgtcgagcgcgggctcggcgccgctgcccaccacgggcttcgcgctggcaccgggggagtcgcgcgtcgtggacgcgcccgcggcgtggtccggccgcatatggggccgcacgcgctgcgccgcggacaaccaggcctccggccggttcgcctgcgccacgggcgagtgcggctcgggggcggtggagtgcgcgggcggcggggccgcgccgcccaccacgctcgcggagttcacgctggacggcgccggcgggaacgacttctacgacgtgagcctggtggacgggtcgaacctgccgatggccgtggtgccgcagggcggcgccgggaccagctgcggcgccacgggctgcctggcggacctgaacgggccgtgccccgccgacctcagggtggtgggctccgacggcgccggcatcgcctgcaagagcgcgtgcggggcgtacgggcggccccaggactgctgcagcggcgactacggcacccccgcgacgtgccagccgtccgccagctcgcagttcttcaagaacgcgtgcccgcgcgcctacagttacgcctacgatgacgccacctccaccttcacctgcacgtccggcaccgccagttacctcgtcacgttctgcccaagcatctccaggtaacaagatcacagttgacctcacctacctagctagtggagatgcgagttgatcattttggcatgaataatggaacgaatgatcgatcagagatgatttcatgcccaagtaaacgttgcatgcaaactcacctga

SEQ ID NO: 145258 - DNA, 449 bp, Zea Mays
cccgtgcgttgcaacggtgaacaaactactttatacaaaatattagtgcacaaagattaaaaatgaaaacacatatattatcaatctcaacatctcactgaaaaatatttaaatttaaaattccttgcagtttcgaaacacttatgtcactacaacaaaggtttattcatccaagttgtataatttcatcatcagcttcaagcacctatttaacttatagtgctccaatgcgcttaggcccaattacaaagttacatataccaaaataaaactctcgacaaggaaaattatctactaccctagagtaaattttgaatagttagcgcctagcaggtaacatagagtgctccaatactcttaggccctttaacttgaaacattgagggggaaatagctatgaagtatggccctttgacttgaaacattaggctaaaaatagctatcacaac

SEQ ID NO: 145259 - DNA, 2479 bp, Zea Mays
aaaaccatgccaaattaactccctgccaccaacaccccccgttcacctcctcctcctccaattctcccccaattcccaccctgcggaggaggcagggaggaaggccggaccgaacagcccgcccaccgcccgctgcgggattgggacagggcctgtggccggccgccattcggttcggttgcttgaccgcggcgaaggggcagcgtcgtcggccgggatggacgacctcaagcagatcctggcgcggccgatccagcttgccgagcaggtaataaagtggtctgacgaggcctacacgttccggcaggagtgcatggagctcaaggccaaggtcgagcgcctggccgtgctgctccgccaggccgcgcgcgccgacctctacgagcgccccgcgcgccgcatcttcgacgacaccgagaaggcgctcgacaaggcgctggccctcgtcgacaagtgccgcgcgcacggcctcgtccgccgcgtcttcaccatcatccccgcgggctccttcaagaagatgaccaaccagctcgacaactccgtcggcgacctctcctggctcctccgcgtctcctcctcggccaacgacgacgacgacgacttcgacgcccacatcgggctcccgcccatcgcgcagaacgagcccatcctcttcctcatctgggagcagatcgcagtgctctacaccggcaacctcgaagcccgcgccgacgccgccgccagcctcgtctcgctggcgcgcgacaatgacaggtactctaagctcatcatagaggaagatggcgtgccgccgctgctcaagctcgtcaaggaggcgcatctcgaggggcaggagaactgcgcgctcgccatcggcctcctaggccgcgatccggagtgcgtcgagcagatggtccaagccggggtgtgcttggccttcgccaaggtgctcaaggagggccccatgaaggtgcaggccatggtggcctgggccgtctcggagctcgctgccaaccaccccaagtgccaggacgcgttcgcgcagcacaacgtcatccggctgctcgtcggccacctcgctttcgagacggtgcaggaacactccaagtacgccgtcgcgtccaagatgtcgatacattccgtgctaatggacaaaaagaacatcaccggctctccagttcagcaggacttactggacgcaggggagcacggaggcacgaggtatccgactggacacgcttcccagagcaagaatgagatccacagtttggtgcagtccaccatggctgccaagtctaatggaggcagtggtaagcacaacgtatctagtaatggtggtgtcatggcaacgaagcagcacaatgcgtcattgtcaggaacgagtataagaggccgggagttcgaagaccctgagacaaaggcatacatgaaagccaatgcagctaaggcgttatggcagcttgccaagggaaatgcagctatctgtaagagcatcacagagtcaagggctctgctctgcttcgctgttcttcttgagaaaggcgaaggcgacgtgcaatataattctgcaatggctctcatggagatctgctgtgtggccgagcagaattccgacctacgacgatcagcattcaagccaacttctcctgctgcccgggctgttgttgaccagctcctgcgtgttgttgagaaggctgagtatgatgatctcctgattccctgcattatctctctaggttgcttgtccagaacattccgtgctacagagactcggattattggaccgttggtgaagcttcttgatgagagggaagcagatgtgtctcgagaggcagcaatttccctgaccaagtttgcgtgcacagataattacctgcacgttgaccattccaaagcgatcatcagtgcaggtggagcgaagcacctagttcagcttgtgtatttcagcgagcaggtggttcagattgcatcactcacccttgtatgctacattgcacacaatgtcccagacagcgaggagctggcacaagcagaaatcctcacggtgctcgaatgggcttccaagcaagcttacatggtgcaagacccagtaatagacaacttgttgccagaagcaaagatcagattggaactgtatcaatctagaggcgcaaaaggctatcattagattagctgctgtggaaaggcatgaaagaggaattttaaggcgttcttctttgaattggccaagtactgtatatacatccaacggcttctctctatactctggctaaacccttttgattccaggcatggcaaacgttgttgaagttacaccgctggttgggttctcgatacagggaagtaagttttgtttgtaggcttggatgttcagaactccaattcctcttgttggtggtatagtttttgggagattagcatcttgtactctctttggcctaatgatgtatcgtgtatattacatttcactcatcaatctgaaaaaaaaaattcttaaatc

SEQ ID NO: 145260 - DNA, 219 bp, Zea Mays
caacttccatcagtatcttataagaatcttctacaagaactagttcagaaagaaggctttcccttgcctatctataatacagcctcggatgtctcgaactattctgctggcttcgtatcaactgtggaaatccaaggtgtaacttttcatggaaagccagggaacaccaaaagcaagcagagatgaatgctgcaaagtctgcttttgatttaaaaaaga

SEQ ID NO: 145261 - DNA, 1233 bp, Zea Mays
ttgtcagtgtgtgcggtgtatggcaggtttttggttcggcaagtggggccctccggggaggaatctcagtaacaaaccgctcttctgaaaagttcagcgcgcagttaagcatagcaggacgaccacgacgatgtatcacccgcagtgcgagctcctgacgatggcgcacgaaacgccggacctggacgccggccagccgcacctaaccgtctccggcgtcgccagcatcccggcagagctgagcttccacctgctgcactcgctcgacgccgcggcggcggtcaatcccgtcacggcgccgccgcagtccaccatcgactacttcctcggcggcgccgatccccaccagcaggccatgcagtacgagccgctgccgcccgccgcgggcggccaccaccagtacaccatggacatgttccgcgactactgcgacggccactaccccaccgccgagccgtacatccgcgggacaatgactggagccctcgtgttcggggccaccgacgacgacgactcggccgctgcctacatgcccggggggcactttgagacctccccgccgccgccacgcgccaccggccgcggcaggaagcggggcagggcgctgggcggcggcttccatgctgtgctggccaacggcgtcgagaagaaggagaagcagcgccggctgcggctcaccgagaagtacaccgccctcatgcacctcatacccaacgttacaaagactgatagggcgacggtgatctcggacgcgatcgagtacatccaggagctggggaggacggtggaggagctgacgctgctggtggagaagaagcggcgccggagggagctgcagggggacgtcgtggacgcggcgccggctgcggtggttgctgccgccggtgaggcggagagctcggagggcgaggtggctcctccgccgccggccgtgccgcggcagccgatccggagcacgtacatccagcggcggagcaaggacacgtccgtggacgtgcggatcgtggaggaggacgtgaacatcaagctcaccaagcgccggcgcgacgggtgcctcgcagccgcgtcgcgcgcgctggatgacctccgccttgacctcgtccacctctccggcggcaagatcggtgactgtcaaatctacatgttcaacaccaagattcacaaggggtcttcagtgtttgcgagtgcagtggccggtaggctgatggaagtggtggacgagtactaggctac

SEQ ID NO: 145262 - DNA, 1609 bp, Zea Mays
cccccttcttctctctacccctccctccacctcataaatacttagtttaataaccttgcactgccgcagtagcccttaactgctgctatctatctcttttctgaaggaaaaaaaagttcagcgcgcagttaagcatagcaggacgaccacgacgatgtatcacccgcagtgcgagctcctgacgatggcgcacgaaacgccggacctggacgccggccagccgcacctaaccgtctccggcgtcgccagcatcccggcagagctgagcttccacctgctgcactcgctcgacgccgcggcggcggtcaatcccgtcacggcgccgccgcagtccaccatcgactacttcctcggcggcgccgatccccaccagcaggccatgcagtacgagccgctgccgcccgccgcgggcggccaccaccagtacaccatggacatgttccgcgactactgcgacggccactaccccaccgccgagccgtacatccgcgggacaatgactggagccctcgtgttcggggccaccgacgacgacgactcggccgctgcctacatgcccggggggcactttgagacctccccgccgccgccacgcgccaccggccgcggcaggaagcggggcagggcgctgggcggcggcttccatgctgtgctggccaacggcgtcgagaagaaggagaagcagcgccggctgcggctcaccgagaagtacaccgccctcatgcacctcatacccaacgttacaaaggtcgtaccaaatcctcctcttatgttcgtccatcgtttcaaattaagttaaaaaattaattcacggttcttgttgtttattttttgcgcactgcagactgatagggcgacggtgatctcggacgcgatcgagtacatccaggagctggggaggacggtggaggagctgacgctgctggtggagaagaagcggcgccggagggagctgcagggggacgtcgtggacgcggcgccggctgcggtggttgctgccgccggtgaggcggagagctcggagggcgaggtggctcctccgccgccggccgtgccgcggcagccgatccggagcacgtacatccagcggcggagcaaggacacgtccgtggacgtgcggatcgtggaggaggacgtgaacatcaagctcaccaagcgccggcgcgacgggtgcctcgcagccgcgtcgcgcgcgctggatgacctccgccttgacctcgtccacctctccggcggcaagatcggtgactgtcaaatctacatgttcaacaccaagattcacaaggggtcttcagtgtttgcgagtgcagtggccggtaggctgatggaagtggtggacgagtactaggctaccatgcacttgaatttctagctagctctacgtaccgcgctgctatgaatctagctatagcgtttcttggatgaaagactagttagttgttaccttctatctttgcttcaattaaatccgcttgctcgttacagactgagtttgtttctaaatgtcaaggttgttttggtcaaattgaataaattggcacactggcctgtgaggttattatatatatttatgtgtttattactggtctattaatttgtcttattatta

SEQ ID NO: 145263 - DNA, 1589 bp, Zea Mays
gtttaataaccttgcactgccgcagtagcccttaactgctgctatctatctcttttctgaaggaaaaaaaaggtttgatactcctctacctagctagtcctgcatgccgctaatgtgcgtcttgcctgtttatttgttcttaataagggctgcctatctattatattttgcacctgttttgctgtgttcttgttcagcgcgcagttaagcatagcaggacgaccacgacgatgtatcacccgcagtgcgagctcctgacgatggcgcacgaaacgccggacctggacgccggccagccgcacctaaccgtctccggcgtcgccagcatcccggcagagctgagcttccacctgctgcactcgctcgacgccgcggcggcggtcaatcccgtcacggcgccgccgcagtccaccatcgactacttcctcggcggcgccgatccccaccagcaggccatgcagtacgagccgctgccgcccgccgcgggcggccaccaccagtacaccatggacatgttccgcgactactgcgacggccactaccccaccgccgagccgtacatccgcgggacaatgactggagccctcgtgttcggggccaccgacgacgacgactcggccgctgcctacatgcccggggggcactttgagacctccccgccgccgccacgcgccaccggccgcggcaggaagcggggcagggcgctgggcggcggcttccatgctgtgctggccaacggcgtcgagaagaaggagaagcagcgccggctgcggctcaccgagaagtacaccgccctcatgcacctcatacccaacgttacaaagactgatagggcgacggtgatctcggacgcgatcgagtacatccaggagctggggaggacggtggaggagctgacgctgctggtggagaagaagcggcgccggagggagctgcagggggacgtcgtggacgcggcgccggctgcggtggttgctgccgccggtgaggcggagagctcggagggcgaggtggctcctccgccgccggccgtgccgcggcagccgatccggagcacgtacatccagcggcggagcaaggacacgtccgtggacgtgcggatcgtggaggaggacgtgaacatcaagctcaccaagcgccggcgcgacgggtgcctcgcagccgcgtcgcgcgcgctggatgacctccgccttgacctcgtccacctctccggcggcaagatcggtgactgtcaaatctacatgttcaacaccaagattcacaaggggtcttcagtgtttgcgagtgcagtggccggtaggctgatggaagtggtggacgagtactaggctaccatgcacttgaatttctagctagctctacgtaccgcgctgctatgaatctagctatagcgtttcttggatgaaagactagttagttgttaccttctatctttgcttcaattaaatccgcttgctcgttacagactgagtttgtttctaaatgtcaaggttgttttggtcaaattgaataaattggcacactggcctgtgaggttattatatatatttatgtgtttattactggtctattaatttgtcttattatta

SEQ ID NO: 145264 - DNA, 440 bp, Zea Mays
gttgcgcatgttactgtgttatgcaggtccatgaagatggctgtacttgacacgttccttttcacatccgagtctgtcaatgaaggctaccctgtgaccagaaatctgatgcagtgcctgatgcatgcctccctgaagatcctgacagcaaggttgcttgtgagacctgcaccaagactaacaacatggtcatgatccttggtgagatcactaccaaagacaacgttgaccatgagaagattgtcacggatacctgccgtgggattggctttgtgtccaatgatgtagggctggatgcagacaactgcaaggtgcttgtcaacattgaacagcagtcacctgacattgcacaaggtgctcatggtcacttcgccaagcgtcctggggagtttttttataaggaaggctttattaattttaagaacattacatcgaggtga

SEQ ID NO: 145265 - DNA, 701 bp, Zea Mays
gtattagcttaaactgtaatagaaatccagaccatgtattagcttaaactcttcgcgttgccataatagaaatccagaccatgtattagcttaaactgtaacaaatcattttgaaccggaggctacaatgaggaattttacggggtcctcaaataggatgctgcttgacttcatggatggtggatgtaaacaacaccagatggaacgcaaccgaacaataggttacagtttagggcctgttcggttcctagggaatagacacccagaacgattactagagattactagccgaattatttgtctaatttatactaggttcgatcagctggaacgattcctagtgaattccgacagaaacgagcaggccctttagtctatgccattagggatacaaagactaggtaacatccagaaactgcaagaggttatctcctgatgaacatctagggccaagtgtattaagccaaacactatatttatctgaattcaatgctacatgttgtctgattcagatactctcgtcagggaaaagcaacggcagtcattcattcattcatccagggttgttggatgcacgtgcattcagcaggggctgaagcgccttcaccacgatgctcatgttgggtcgaaagtcagcttcatattgcacacacagtgcagcaacagctgcaaactatttgaacaacaaagggaacaggaaa

SEQ ID NO: 145266 - DNA, 418 bp, Zea Mays
attttacaaaaaaaacatatatacatatatacaatttatattcaatattaaaaacatttgagcatgatgttctactggttagacaacttcatctagtgtctctcgcccttcttccatcagagcatgggttcaatcctcacctccagcaccgttttttaacattttagcccattggaggagatttatggggagtaatcaacttgctatttacgtggagatatatgaaatatatttgtatttaatttttaattttctaattaaggaaactttcaatataaagatatttttacatctaattaatacttatacgatctatttcgtgtggcaaattttttatatttttttgcaactttggatacaacgtaatgtaacttattaacttaataatctgcgccgcaattgatcatatgtgaaattt

SEQ ID NO: 145267 - DNA, 994 bp, Zea Mays
actttgctgtcctcttggtaatgtatgatccacaggctttcttccagtcaggagctccagaagaacaactccaaaactgtaaacgtcactcttagagctaagttgtccagtcattgcatacctacaccaaagttttcaaatataagcaaacaaaggatacaggcgtcagtgaaactgaaaggaaaactgcacatactcaggtgcatgatagccaaatgttccaagaactctggtcgaatgaagtcgagctgccatatccggagcttggtttgacaaatcaaaatcagctattttagatacgtcgtcatcaaatagaagaacattactggacttgatgtccctgtgtataatatgaggctgcgctttctcatgaagatactcaaggccttttgctgctccaacagcaatcttcactcgttgtgtccaggacaggactggaccaggctgagctcctttcacacctttgcgtcctgtggacatatcgtgaagagaacccatagtagcaaattcatatgcaaggatgcgggtgtttccatcaacacagtaaccaagcaactctacgacattgccatgcttaagccttgacaccatggatacctgtgccaaaaactcttgctctggctgcttgcttgaatctaacttttttatcgctgcactcctaccattttttagtacaccaaaatatactctgccaaaagacccctcaccaatcaaagcttcatcaccaaaagccactgtgacctccctaatttcttctacaggaatagtggggacagtgattggctgcattttcaaaggttgagcacccctcggagttggatcagctgtgcgataagcatcatcccctgaaggttgacataatttagggtatggacctccattatcaggtgttctttgagtatcttcgccgccacagcatgccaagcacgacatcttcaaacttaaccaagacctgagaaataaaacacttttatcttataagcattatgcagga

SEQ ID NO: 145268 - DNA, 665 bp, Zea Mays
cggcgagtgggagacggagcacggatgctttatcccaccctgtgacactgccgccatggtggcgagtgaggcgctgctggtggtatgcaggagctaggaggtaggcaacaaccatacgaaggcaagggcgagcggagccgaggcacaccgcgcgttctgcgccgaccagcactgcccgatctcgcgcgggggaggggggattcgtgagcgccggcggcagccatgccggagtcctggagacccgccgaggcggatgccctgcagccggcggcaggcacggcgtccgcgtccggcccctcggctcggagcccgggcaatggcgccaaggggcgcggggcgggggagccccccggcgctgcggcgacgcgggtgccgttccacaggctgttcgcgttcgcggactccgccgacgtggcgctcatgctgctgggcgcgctcggggccgtggccaacggcgccgccttgcccttcatgaccgtgctcttcggcaacctcatcgacgcctttggtggcgcgctcagcgtccacgacgtcgtcagccgggtgtccatggtctcgctcgacttcgtctacctcgccatggcctccgccgtcgcttccttcgtccgtaagttccacctcttgcgtaacgcggccagacactgagcactgagcactcaactgtt

SEQ ID NO: 145269 - DNA, 4221 bp, Zea Mays
gccatgccggagtcctggagacccgccgaggcggatgccctgcagccggcggcaggcacggcgtccgcgtccggcccctcggctcggagcccgggcaatggcgccaaggggcgcggggcgggggagccccccggcgctgcggcgacgcgggtgccgttccacaggctgttcgcgttcgcggactccgccgacgtggcgctcatgctgctgggcgcgctcggggccgtggccaacggcgccgccttgcccttcatgaccgtgctcttcggcaacctcatcgacgcctttggtggcgcgctcagcgtccacgacgtcgtcagccgggtgtccatggtctcgctcgacttcgtctacctcgccatggcctccgccgtcgcttccttcgtccaggtcacctgctggatgatcaccggcgagcgtcaggcggcgcggatacggaacctgtacctcaagacgatcctcaggcaggagatcgccttcttcgacaagtacaccagcaccggcgaggtcgtgggcaggatgtccggcgacacggtgctcatccaggacgccatgggcgagaaggtcggcaagttcgtccagctgctggtgaccttcttcggcggcttcatcgtcgccttcgcgcagggctggctgctcaccctggtcatgatggcgaccatcccgccgctcgtcctggcgggcgcggtcatgtccaacgtcgtcaccaagatggcgtccctgggccaggcggcctacgcggaatcgtcggtggtggtggagcagaccatcggttccatcagaacggtcgcgtctttcaccggcgagaaacgggcggtggacaagtacaacatgtccttgaagaacgcgtacaagtccggcgtccgagagggcctcgccactgggcttggaatgggcacggtcatggtgctcctcttctgcggctactcgctagggatttggtatggcgctaagctcatcctggagaaggggtacacgggagccaaggtcatgaacgtcatctttgcagtcctcactggttctctggctctaggtcaggcgtctccaagcatgaaggcgtttgcaggtgggcaggctgccgcacacaaaatgttcgagacgatcaacagaacgccagaaatcgacgcgtacagcaccacggggaggaagctggaggacgttcgaggggacatcgagttcagggatgtctatttctcctacccgacaaggcccaacgaacagatattcaagggtttctccctcgccatacctagtggcacgacgatcgcgttggtaggccagagcgggagcggtaaatccacggtcatcagcctgatcgaacggttttatgaccctcagcttggcgatgttctgatagatggtgtgaatctcaaggagttccagttgaggtggatcagaagtaaaatcggccttgtcagccaggagccggtcctttttgctgccagcataaaggagaacatagcttatggcaaagacaacgcgacggatcaggaaatcagagctgctgctgagcttgccaatgctgccaaattcatagataaaatgcctcagggttttgatacttccgttggtgagcatgggacacagctttctggtgggcagaagcaaagaattgcgattgcaagggctattctgaaagatccaagaatcctactattggatgaagctacaagtgctctggatgccgagtctgaaaggattgtgcaggaagctctcgacagggtcatgacaaacaggacgacagtcatagtcgcacaccgtctgagcactgttcgaaatgctgataccattgctgttattcatcagggaacactggttgaaaaaggtccacacagtgagcttctaagagatccagaaggagcttatagccaactgataaggctacaggaagcaaaccagcagaacaatgggaaggttgatgccaatgctcgtccaggcaaacaaatatcaataaacaagtcagctagcaggaggtcgtcccgtgataacagtagccaccattcattctcagtcccattcggtatgcctcatgggattgacattcaggatggttcatctaacaaactgtgtgatgagatgccacaggaagtgcctctcagccggcttgcatctctcaacaaggcagagatcccggtccttatactaggctccattgcctcagtcatcagtggagttatcttcccgatctttgcgatactcctgtcaaatgtgataaaagcgttctatgagcctccacatctcctaaggagggattcacagttctgggcttccatgttcttggtgtttggtgcagtgtacttcttgtcactccctgtcagttcgtaccttttctccatagcagggtgcaggttgattagaaggatccgactgatgacatttgagaaggtggtaaatatggaggtcgagtggtttgatcacccagaaaactcaagtggagcaataggtgcaaggttgtcagctgatgcagcaaaagttagaggccttgtgggggatgcgcttcaattggttgtacaaaactcttcgacactagttgctggtttggttattgcatttgtgtcaaactgggagctatccctcatcatcttagctttaataccactcattggcctaaatggatggatccagatgaagtttattcacggtttcagtgcagacgcaaagatgatgtatgaagaggcaagccaggtggctaatgatgcagtaggcagcataagaacagtggcctcattctcagctgaagagaaggtcatggatttgtacaagaagaaatgtgaaggtcctctaagaacaggaatcaggacagggattataagtggaatcggttttggagtttcctttttcttgctatttggggtatatgcagctagcttttatgctggtgctcggcttgttgaggacaggaagacaacctttcctaaagttttcagggttttcctagctcttgcaatggcggcaattggagtgtcgcaatcaagtacccttacatcagattcttccaaagcaaaatcagctgcatcttctatatttgcaattgtagatcgaaaatcaaggatagacccaagtgaggatgcaggggtaactgttgaggcactacaaggaaacatcgtattccagcatgttagcttcaagtatcctaccaggccagatgttcagatattccgggacctttgcttgacaattcatgctggaaagactgttgcactcgttggagagagtggtagtggcaaatcaacggcaatttcattgctccagaggttctatgacccagatgtaggccatatactactagatggcgtggacatacagaagttccagcttaggtggttaaggcaacaaatgggcctggttagtcaagaaccagctttgtttaatgacacaataagggcaaacattgcctatggaaaagatggacaagcaacagaatctgagatcatatctgctgcagaattggcaaatgctcacaagtttatcagttcggcgctgcagggatatgacacagtggttggagagcgtggagcccagttgtcaggagggcagaagcagcgagtggcgatcgcccgtgcaattgtgaaggaccctaggatcctgcttctggacgaagcgactagtgcgctggatgctgagtccgagcggatcgtccaggacgcactggacagggtgatggtgaaccggacaacagtgatcgtcgctcaccgtctgtcaacaatacaaaatgcagatttgattgcggtcgtgaggaatggggttatcatcgagaagggaaagcacgatgccttgatcaacatcaaggatggcgcctatgcgtccctcgtcgcccttcactcggcagcctcttcatagcaggtgatggtatgggatcctgcatacgtctgctaagacatatatgaacagagcgagctggcacaacctgtgtagcaatccaggtgctagtctctgttcctctatttgatggcatacataattgcttatacctaagcggagaaatgttacaaatagcaaggaccagatgtaaatgcaaggagctggtccttaagataactttttataatctataaatcttaatatgtatatgtagcttcgaacatagaaaccaaatagatgatggttatgctataactcatgatgttcttgctgtcgtttcccccctttatagcttatatgcaagtaatgataaccctgctcaggaaagaaagggcagctcccaaacgtttaatgataacc

SEQ ID NO: 145270 - DNA, 513 bp, Zea Mays
atggccgcgggcgaggtgtaccatggacggacgacaacgaggtggaggggcgacggctgctgcgtggtggccgactccgtgcctgggcgaccccagcacgctgcacctgggaatcccgcagccttagccaccagagcgtgtgggattgccgatgattgggaaggagaagaacagttggcggctcatttaggagtcctactccctgtggttgatcttccaattgaaccgtcagccattgcgaagccctgcacgcgcccgcccttctcgcaaaatggaatgggatcgatgcattgcggcgatggaagggcgcagattgcgggcttccatcgaaggtcgcgggggcgagaggatccgggggcggaggcgagaatggaggggcacgggcgcgagaatggcggcaacaatggcgagatgcagaggcgagaggatccatgggaggcgaggctgtgggcgcgacaatctcgggggcggagccacggtgaagttgtggacgcccacgttagagtcttataa

SEQ ID NO: 145271 - DNA, 1639 bp, Zea Mays
caatgaatttccagaatatcatacaaattaaactaggaaactttgtaacaaaaaaaacaatcatcagatacacctccatgtatttctaggggagaatgtttctcaaacccttctaacttctaaatgagttgaactgccaaaaattaggttgtccaattgtatgtacagtgccataaaaaatgcaaggaatgagcagcagaaacacctgggctaaaacaacgtcagcagggcggagtaaccaaccagatcgcatatttggcacaaaatcttcaacccacgtaacgaatcagttccatcagcacagtcgtccatcagcccagccacgattgacgtgctccgtggtagaagatttcacatgatgacatgatgaatagtagaatcactgcgattttgcaaccctccacaagtccaacaattgcaatggcttaactaacaaacatgccaaaagcttacaaggaccaaatatcccaattgacatgataaatacaaatgaaatgccacgacataatcagattggagttgttgaaaataaaatatacaacgaaataaagacgcagcgccatcttaagtgcgacataaaatttcacttaggacatcagtaacgcttgtttcactgagttcatgggagtctgaaattgttgaactattaaattcaacacagctgggcaaagtggacgtcgaatgtcattattcatgggggtttaacggtttctttgaatgtgcagagagagaacataaggatacaagtgtggcgtcagagatgagaaaagaaacttaattgttacagtaaattaacgattgtaccttaagaatctcgttgtagctccatgtttgtttttgttgtagatctccgtgttagatgcagaaatccgaagcgtgtaggtgagctgagatcgcaaaccacgcaaagaccaatgcacatagggacacggaacaccacgagggaggagaacccggggccaaaaaacaatcccccgtgcgatctccacccccaggacacaaaaatatcttcttttattaccgtggcctgccatgcgagcgcacccaccatggcaaaggcctctatagcatgtcacgtcttatacatgttgcaccttacctcgcctcttcaagtcggcgcatctcttagatctaataattatcgaaattcatccaataattatcagcgcagcagattcatcatcccgagtggagcagggcagagaagatcccgatcccaccgccgacttcagccatcatcgcttcagacgcgctccgaaaggaaccctaatagccttgcgatttcgctagctctagaacctgaagcaaaacaacgcggcagatcagcccaacacaacaacaaaatcttgcggtcagagactaaccggtgccgatccaactcgtcatacacgcggatttgttgtacctcccgtgctcagatccacagcctcccagctcgattcaagccgtaagacgaagaatccggcattcagatctaagcctgcgcaacatgaagcaaactgatttgtcgctaaatcgaaacaaagtagctcaccgagggcgcgcgaggtaacgagtcaaggagcccggcaatcctggatctggaggggagaaggttgcgtggaggaggggaacgcctcgaacaacatcttgttggttt

SEQ ID NO: 145272 - DNA, 3870 bp, Zea Mays
aattctgggtgtctctaatgatgaatctaggataaccagatatcttgtggtatcttgtggtatcttgtgttatttgtgaaaagctacttaatccttctcataattttattgttgttttaatggtgctatgatcaatatattgtcgataaaagatcaatggcaccatctacaatttaccataatatggctacttaatccttctcataatttttattgttgttttaatggtgctttgatcaatatattgtcgataaaagatcaatggcaccatctacactttaccaaaataggacggttgctgccgtatctccctttccaccagaatctccgtaagcaccatcttaaacttgcccattctcaactagcagatttccttatgtgaaaacgaagaaccaacataaacgaatctaatggagcataatgctgatcgcacaccattaatagacatatcaaacacaagcattacaggtgatcaaataggatcaaactcgcttggaccaatagacgatgctaatgaacgtaagaggcaaagggatagagaaagatatgccacgatgtccattgaacaaaagaatgagaaaaataggaagcgccgtgaagcacgtcaacgaaacaaaggactacccctaaagtctgagtcatctagaggtcctattaaaaacactccatcggctggtaattctatcgaacgaaagaggcaaagggatagagaaaggcgtgcaacaatgtcggttgaacaaaggaatgagtacaataacaagcgtcgtcaaatgcgtcaacgaaataagggacaaaatgtgatgcccgatgtttcaggagatggcgacaaaaaagaaaatgtggatccagatgatgatagcgactggctgcatcggaacgagacattccagtcaaacgactatgttgcaacgacagaccttctgccaccagatgaggagactgacgaggacatcgaaatcgatggtactcaggatgaatctactggcactgatgtgcctgacccgtacgacaaggtatacagtaacctccctgaagaaacacatatgctgaagcctgttcctgactgcggttattgcactgcgaagaagtttgagtacgagccacctgggttttgctgtcgtggtgggaaggttgagctagcaccactcgatacccctccccagctcaggaggttgtgggatagtgcagactctgatgctaagcactttcgtgataacattaggttttttaatggcaatttctctttcacttccctatactgttgcctcgatagtatgacaactaatgtgcgagattctggtatatacacgttccgggcacaaggcatgatgtaccacaatatcaagtcattcggtaaggaagtttttcatattgagctgcacaagtacagcacaagatatggccgcatatttacattacaaaggtgcaactttgctaacatcccactccgtccactcgagctctccaccagctttccccttctctccggtccgggaatcggaagctcagggcagaagataattggtgcctttcttgataagttgatatacaaccgtggatccttggacttcgatttagttagtgactccgtaggtatcagataaccaaaaaaagaggaatcacgtgaactactggttatatttcccctggatttcgacaaagctttttaggaaatttcgtactttttttcatggagaaatttcgaagacaccaatgaagttctcgcataaaataataaaaaaaccctaagcatgctcgattttcatttttttgccatgaacaactgctagtcaagcacaaaacaaggatttcctaattctccacactcgacaaccattattttcacagcttcaagaactctcaacttccccccaccccaacccaaaagaagtgaatacaaccataaccttcacagcttcaagaacttttcaacttcaaggaaatttctaaacagtaattcttttttaagctggtgaggtgtcccggccctcctgtttcctgaaaaaaaagcacgactgaactagatgttattaggtccgcacatgaattgcatacgaaatgttttcctgactggggctaaattgctagtttagccatggggcagacgcatcttttgttgctcgcttgtttctgggtcctgtcaacatgctccttgctacttgatgcttcctccgatggactgttaagaatcaacctgaacaagaagagactggacaaggaagctttgactgctgcgaaattggcgaagaaggagagcaaccttcgaaggtctgtgggtgctgaccagtatctcagtgcctcaactgatgacatagtccctttggacaactacctggacacccagtactttggacagatcagcatcggcacgccaccacagaacttcacagtgatattcgacactggaagctccaacttgtgggttccctcatccaagtgctacttttcgatagcatgctacttacaccacagatacaagtcaaccaagtcgaagacttacacaaagaatggagaatcttgtacgataacatatggttctgggcaaatcgctggcttcttcagtgaggacaatgtgttggttggcaaccttgttgtgcaaaatcagaaatttattgagacaactcgagaaaccagccctactttcatcattgggaagtttgatggaattcttggtctcggatttcctgaaatttctgtaggaggagcccctccaatttggcagagcatgaaacagcagaaactggtcgcaaaggatgtcttctctttctggcttaatcgtgaccctgatgcatcttctggaggaggcgagcttgtctttggtggtgttgacccaaaacactacaaaggggaccatacatatgttcccgttacacgcaaaggctactggcagtttgacatgggagatcttattattggtggccactcaactggtttctgtgctggtggctgtgctgctattgtggactcagggacttcattgcttgctggtccaactaccatagtggctcaagtcaatcatgcaattggggctgagggaatcatcagtacagaatgcaaagaagtggtgagcgagtatggagagatgatccttgagttgctcatatcgcagacaagcccacagaaagtgtgcactcagattggtctctgtgtatttgatggtgcccattctgtcagcaatccaattgaatctgttgttgagaaacagaagcgtggttctgatcttttctgtactgcttgtgagatggctgttgtctggatacagaatcagctccgtgaaaacaagacaaaagaactcattttgaattatgctaatcagctctgtgagcgtctccctagccccaatggcgagtcaactgttgattgccatcagatctcaaagatgccaaatcttgcattcaccatagcaaacaagactttcaccttaacaccagagcagtacatagtgaagctggagcaagcaggacaaactatctgcatcagtgggtttatggcatttgacgtaccgcctcctcgtggtcctctctggatacttggtgatgtttttatgggtgcctaccacactgtttttgacttcggtgagaacaggattgggtttgccaaatctgcatgaggactggagttctgcgctttagtagcatgtccagtttgttatccgggtattgtacatatatatgttgccaactggtgtaatccgcagtgtttaatagtatatattcatgcagaaatctagaagattgtggcatgatatgtgtttgcaaatggagctatgctatgtatggagctccaggacctagagttttatgtaaagggagacgatgaggattagggcttttaacctattctcatcacgttattgtcctgattactatg

SEQ ID NO: 145273 - DNA, 1939 bp, Zea Mays
aatttattacgccttgacgggttgcatctagacggcgccacacgacggatggcttcatccgattggtgtggtctatttgtctcccagtcccactccgtccactcgagctctccaccagctttccccttctctccggtccgggaatcggaagctcagggcagaagtttagccatggggcagacgcatcttttgttgctcgcttgtttctgggtcctgtcaacatgctccttgctacttgatgcttcctccgatggactgttaagaatcaacctgaacaagaagagactggacaaggaagctttgactgctgcgaaattggcgaagaaggagagcaaccttcgaaggtctgtgggtgctgaccagtatctcagtgcctcaactgatgacatagtccctttggacaactacctggacacccagtactttggacagatcagcatcggcacgccaccacagaacttcacagtgatattcgacactggaagctccaacttgtgggttccctcatccaagtgctacttttcgatagcatgctacttacaccacagatacaagtcaaccaagtcgaagacttacacaaagaatggagaatcttgtacgataacatatggttctgggcaaatcgctggcttcttcagtgaggacaatgtgttggttggcaaccttgttgtgcaaaatcagaaatttattgagacaactcgagaaaccagccctactttcatcattgggaagtttgatggaattcttggtctcggatttcctgaaatttctgtaggaggagcccctccaatttggcagagcatgaaacagcagaaactggtcgcaaaggatgtcttctctttctggcttaatcgtgaccctgatgcatcttctggaggaggcgagcttgtctttggtggtgttgacccaaaacactacaaaggggaccatacatatgttcccgttacacgcaaaggctactggcagtttgacatgggagatcttattattggtggccactcaactggtttctgtgctggtggctgtgctgctattgtggactcagggacttcattgcttgctggtccaactaccatagtggctcaagtcaatcatgcaattggggctgagggaatcatcagtacagaatgcaaagaagtggtgagcgagtatggagagatgatccttgagttgctcatatcgcagacaagcccacagaaagtgtgcactcagattggtctctgtgtatttgatggtgcccattctgtcagcaatccaattgaatctgttgttgagaaacagaagcgtggttctgatcttttctgtactgcttgtgagatggctgttgtctggatacagaatcagctccgtgaaaacaagacaaaagaactcattttgaattatgctaatcagctctgtgagcgtctccctagccccaatggcgagtcaactgttgattgccatcagatctcaaagatgccaaatcttgcattcaccatagcaaacaagactttcaccttaacaccagagcagtgaagctggagcaagcaggacaaactatctgcatcagtgggtttatggcatttgacgtaccgcctcctcgtggtcctctctggatacttggtgatgtttttatgggtgcctaccacactgtttttgacttcggtgagaacaggattgggtttgccaaatctgcatgaggactggagttctgcgctttagtagcatgtccagtttgttatccgggtattgtacatatatatgttgccaactggtgtaatccgcagtgtttaatagtatatattcatgcagaaatctagaagattgtggcatgatatgtgtttgcaaatggagctatgctatgtatggagctccaggacctagagttttatgtaaagggagacgatgaggattagggcttttaacctattctcatcacgttattgtcctgattactatg

SEQ ID NO: 145274 - DNA, 2467 bp, Zea Mays
aatttattacgccttgacgggttgcatctagacggcgccacacgacggatggcttcatccgattggtgtggtctatttgtctcccagtcccactccgtccactcgagctctccaccagctttccccttctctccggtccgggaatcggaagctcagggcagaagtttagccatggggcagacgcatcttttgttgctcgcttgtttctgggtcctgtcaacatgctccttgctacttgatgcttcctccgatggactgttaagaatcaacctgaacaagaagagactggacaaggaagctttgactgctgcgaaattggcgaagaaggagagcaaccttcgaaggtctgtgggtgctgaccagtatctcagtgcctcaactgatgacatagtccctttggacaactacctggacacccagtactttggacagatcagcatcggcacgccaccacagaacttcacagtgatattcgacactggaagctccaacttgtgggttccctcatccaagtgctacttttcgatagcatgctacttacaccacagatacaagtcaaccaagtcgaagacttacacaaagaatggagaatcttgtacgataacatatggttctgggcaaatcgctggcttcttcagtgaggacaatgtgttggttggcaaccttgttgtgcaaaatcagaaatttattgagacaactcgagaaaccagccctactttcatcattgggaagtttgatggaattcttggtctcggatttcctgaaatttctgtaggaggagcccctccaatttggcagagcatgaaacagcagaaactggtcgcaaaggatgtcttctctttctggcttaatcgtgaccctgatgcatcttctggaggaggcgagcttgtctttggtggtgttgacccaaaacactacaaaggggaccatacatatgttcccgttacacgcaaaggctactggcagtttgacatgggagatcttattattggtggccactcaactggtttctgtgctggtggctgtgctgctattgtggactcagggacttcattgcttgctggtccaactaccatagtggctcaagtcaatcatgcaattggggctgagggaatcatcagtacagaatgcaaagaagtggtgagcgagtatggagagatgatccttgagttgctcatatcgcagacaagcccacagaaagtgtgcactcagattggtctctgtgtatttgatggtgcccattctgtcagcaatccaattgaatctgttgttgagaaacagaagcgtggttctgatcttttctgtactgcttgtgagatggctgttgtctggatacagaatcagctccgtgaaaacaagacaaaagaactcattttgaattatgctaatcagctctgtgagcgtctccctagccccaatggcgagtcaactgttgattgccatcagatctcaaagatgccaaatcttgcattcaccatagcaaacaagactttcaccttaacaccagagcagtacatagtgaagctggagcaagcaggacaaactatctgcatcagtgggtttatggcatttgacgtaccgcctcctcgtggtcctctctggatacttggtgatgtttttatgggtgcctaccacactgtttttgacttcggtgagaacaggattgggtttgccaaatctgcatgaggactggagttctgcgctttagtagcatgtccagtttgttatccggaaatctagaagattgtggcatgatatgtgtttgcaaatggagctatgctatgtatggagctccaggacctagagttttatgtaaagggagacgatgaggattagggcttttaacctattctcatcacgttattgtcctgattactatgtgtaggtatagttgctgagcttgtttgggagcaagacaattggaggggatgagtggactaaaattcccttcctatcaaaattgaatatgaagagtattttagctctttcaatcttctccaattctcttgctcccaaacatgtccttatagtttggggtgtgcctctttttgtgttgtagtttggttttgatgttcgatataacataatcttgagtcgtgcaggttaaggtttctctaatttgtacaccaagtagatggtccctgaatatggaccacaagacgtgacctgcctaaaaaaacctgatcctaccaatgcaatgggtaggtatgtgctttagtttttgatccgtaatgggcataggcactggctatgatatttaacctaaaacccgacctagatttttaacctaaaatccgacctaacctgaaaaacccaactgtaaagcctaaattttgtataaaaataaatataaatataattatgtagtattttgggattatggaacctttgaggattatttgggttttcttttatttgtgcatattcagttaatggaattatattggttacataacaaataaataaa

SEQ ID NO: 145275 - DNA, 2462 bp, Zea Mays
aatttattacgccttgacgggttgcatctagacggcgccacacgacggatggcttcatccgattggtgtggtctatttgtctcccagtcccactccgtccactcgagctctccaccagctttccccttctctccggtccgggaatcggaagctcagggcagaagccatggggcagacgcatcttttgttgctcgcttgtttctgggtcctgtcaacatgctccttgctacttgatgcttcctccgatggactgttaagaatcaacctgaacaagaagagactggacaaggaagctttgactgctgcgaaattggcgaagaaggagagcaaccttcgaaggtctgtgggtgctgaccagtatctcagtgcctcaactgatgacatagtccctttggacaactacctggacacccagtactttggacagatcagcatcggcacgccaccacagaacttcacagtgatattcgacactggaagctccaacttgtgggttccctcatccaagtgctacttttcgatagcatgctacttacaccacagatacaagtcaaccaagtcgaagacttacacaaagaatggagaatcttgtacgataacatatggttctgggcaaatcgctggcttcttcagtgaggacaatgtgttggttggcaaccttgttgtgcaaaatcagaaatttattgagacaactcgagaaaccagccctactttcatcattgggaagtttgatggaattcttggtctcggatttcctgaaatttctgtaggaggagcccctccaatttggcagagcatgaaacagcagaaactggtcgcaaaggatgtcttctctttctggcttaatcgtgaccctgatgcatcttctggaggaggcgagcttgtctttggtggtgttgacccaaaacactacaaaggggaccatacatatgttcccgttacacgcaaaggctactggcagtttgacatgggagatcttattattggtggccactcaactggtttctgtgctggtggctgtgctgctattgtggactcagggacttcattgcttgctggtccaactaccatagtggctcaagtcaatcatgcaattggggctgagggaatcatcagtacagaatgcaaagaagtggtgagcgagtatggagagatgatccttgagttgctcatatcgcagacaagcccacagaaagtgtgcactcagattggtctctgtgtatttgatggtgcccattctgtcagcaatccaattgaatctgttgttgagaaacagaagcgtggttctgatcttttctgtactgcttgtgagatggctgttgtctggatacagaatcagctccgtgaaaacaagacaaaagaactcattttgaattatgctaatcagctctgtgagcgtctccctagccccaatggcgagtcaactgttgattgccatcagatctcaaagatgccaaatcttgcattcaccatagcaaacaagactttcaccttaacaccagagcagtacatagtgaagctggagcaagcaggacaaactatctgcatcagtgggtttatggcatttgacgtaccgcctcctcgtggtcctctctggatacttggtgatgtttttatgggtgcctaccacactgtttttgacttcggtgagaacaggattgggtttgccaaatctgcatgaggactggagttctgcgctttagtagcatgtccagtttgttatccggaaatctagaagattgtggcatgatatgtgtttgcaaatggagctatgctatgtatggagctccaggacctagagttttatgtaaagggagacgatgaggattagggcttttaacctattctcatcacgttattgtcctgattactatgtgtaggtatagttgctgagcttgtttgggagcaagacaattggaggggatgagtggactaaaattcccttcctatcaaaattgaatatgaagagtattttagctctttcaatcttctccaattctcttgctcccaaacatgtccttatagtttggggtgtgcctctttttgtgttgtagtttggttttgatgttcgatataacataatcttgagtcgtgcaggttaaggtttctctaatttgtacaccaagtagatggtccctgaatatggaccacaagacgtgacctgcctaaaaaaacctgatcctaccaatgcaatgggtaggtatgtgctttagtttttgatccgtaatgggcataggcactggctatgatatttaacctaaaacccgacctagatttttaacctaaaatccgacctaacctgaaaaacccaactgtaaagcctaaattttgtataaaaataaatataaatataattatgtagtattttgggattatggaacctttgaggattatttgggttttcttttatttgtgcatattcagttaatggaattatattggttacataacaaataaataaa

SEQ ID NO: 145276 - DNA, 1955 bp, Zea Mays
aatttattacgccttgacgggttgcatctagacggcgccacacgacggatggcttcatccgattggtgtggtctatttgtctcccagtcccactccgtccactcgagctctccaccagctttccccttctctccggtccgggaatcggaagctcagggcagaagtttagccatggggcagacgcatcttttgttgctcgcttgtttctgggtcctgtcaacatgctccttgctacttgatgcttcctccgatggactgttaagaatcaacctgaacaagaagagactggacaaggaagctttgactgctgcgaaattggcgaagaaggagagcaaccttcgaaggtctgtgggtgctgaccagtatctcagtgcctcaactgatgacatagtccctttggacaactacctggacacccagtactttggacagatcagcatcggcacgccaccacagaacttcacagtgatattcgacactggaagctccaacttgtgggttccctcatccaagtgctacttttcgatagcatgctacttacaccacagatacaagtcaaccaagtcgaagacttacacaaagaatggagaatcttgtacgataacatatggttctgggcaaatcgctggcttcttcagtgaggacaatgtgttggttggcaaccttgttgtgcaaaatcagaaatttattgagacaactcgagaaaccagccctactttcatcattgggaagtttgatggaattcttggtctcggatttcctgaaatttctgtaggaggagcccctccaatttggcagagcatgaaacagcagaaactggtcgcaaaggatgtcttctctttctggcttaatcgtgaccctgatgcatcttctggaggaggcgagcttgtctttggtggtgttgacccaaaacactacaaaggggaccatacatatgttcccgttacacgcaaaggctactggcagtttgacatgggagatcttattattggtggccactcaactggtttctgtgctggtggctgtgctgctattgtggactcagggacttcattgcttgctggtccaactaccatagtggctcaagtcaatcatgcaattggggctgagggaatcatcagtacagaatgcaaagaagtggtgagcgagtatggagagatgatccttgagttgctcatatcgcagacaagcccacagaaagtgtgcactcagattggtctctgtgtatttgatggtgcccattctgtcagcaatccaattgaatctgttgttgagaaacagaagcgtggttctgatcttttctgtactgcttgtgagatggctgttgtctggatacagaatcagctccgtgaaaacaagacaaaagaactcattttgaattatgctaatcagctctgtgagcgtctccctagccccaatggcgagtcaactgttgattgccatcagatctcaaagatgccaaatcttgcattcaccatagcaaacaagactttcaccttaacaccagagcagtacatagtgaagctggagcaagcaggacaaactatctgcatcagtgggtttatggcatttgacgtaccgcctcctcgtggtcctctctggatacttggtgatgtttttatgggtgcctaccacactgtttttgacttcggtgagaacaggattgggtttgccaaatctgcatgaggactggagttctgcgctttagtagcatgtccagtttgttatccgggtattgtacatatatatgttgccaactggtgtaatccgcagtgtttaatagtatatattcatgcagaaatctagaagattgtggcatgatatgtgtttgcaaatggagctatgctatgtatggagctccaggacctagagttttatgtaaagggagacgatgaggattagggcttttaacctattctcatcacaaaggagaaaaagaaaattaaaaaaatgaa

SEQ ID NO: 145277 - DNA, 1916 bp, Zea Mays
atctagacggcgccacacgacggatggcttcatccgattggtgtggtctatttgtctcccagtcccactccgtccactcgagctctccaccagctttccccttctctccggtccgggaatcggaagctcagggcagaagccatggggcagacgcatcttttgttgctcgcttgtttctgggtcctgtcaacatgctccttgctacttgatgcttcctccgatggactgttaagaatcaacctgaacaagaagagactggacaaggaagctttgactgctgcgaaattggcgaagaaggagagcaaccttcgaaggtctgtgggtgctgaccagtatctcagtgcctcaactgatgacatagtccctttggacaactacctggacacccagtactttggacagatcagcatcggcacgccaccacagaacttcacagtgatattcgacactggaagctccaacttgtgggttccctcatccaagtgctacttttcgatagcatgctacttacaccacagatacaagtcaaccaagtcgaagacttacacaaagaatggagaatcttgtacgataacatatggttctgggcaaatcgctggcttcttcagtgaggacaatgtgttggttggcaaccttgttgtgcaaaatcagaaatttattgagacaactcgagaaaccagccctactttcatcattgggaagtttgatggaattcttggtctcggatttcctgaaatttctgtaggaggagcccctccaatttggcagagcatgaaacagcagaaactggtcgcaaaggatgtcttctctttctggcttaatcgtgaccctgatgcatcttctggaggaggcgagcttgtctttggtggtgttgacccaaaacactacaaaggggaccatacatatgttcccgttacacgcaaaggctactggcagtttgacatgggagatcttattattggtggccactcaactggtttctgtgctggtggctgtgctgctattgtggactcagggacttcattgcttgctggtccaactaccatagtggctcaagtcaatcatgcaattggggctgagggaatcatcagtacagaatgcaaagaagtggtgagcgagtatggagagatgatccttgagttgctcatatcgcagacaagcccacagaaagtgtgcactcagattggtctctgtgtatttgatggtgcccattctgtcagcaatccaattgaatctgttgttgagaaacagaagcgtggttctgatcttttctgtactgcttgtgagatggctgttgtctggatacagaatcagctccgtgaaaacaagacaaaagaactcattttgaattatgctaatcagctctgtgagcgtctccctagccccaatggcgagtcaactgttgattgccatcagatctcaaagatgccaaatcttgcattcaccatagcaaacaagactttcaccttaacaccagagcagtacatagtgaagctggagcaagcaggacaaactatctgcatcagtgggtttatggcatttgacgtaccgcctcctcgtggtcctctctggatacttggtgatgtttttatgggtgcctaccacactgtttttgacttcggtgagaacaggattgggtttgccaaatctgcatgaggactggagttctgcgctttagtagcatgtccagtttgttatccgggtattgtacatatatatgttgccaactggtgtaatccgcagtgtttaatagtatatattcatgcagaaatctagaagattgtggcatgatatgtgtttgcaaatggagctatgctatgtatggagctccaggacctagagttttatgtaaagggagacgatgaggattagggcttttaacctattctcatcacgttattgtcctgattactatg

SEQ ID NO: 145278 - DNA, 189 bp, Zea Mays
ttacttcaatggaagaaaacagtaatacttttgtgctgcattcggagcaagaaaggaaagacaaagtaaaacctgtgcatattattgatgttcctggtcatgctaggctcaaacccaaacttgatgaagtcctgcctaaaactgctgcggttgtctttgttgttgatgctcaagatttcttgtctagca

SEQ ID NO: 145279 - DNA, 258 bp, Zea Mays
atggctagggtaggggtgagcgccagggaggagaggctgggagtggcggctggcaagctgctgagatggagagaggagcagagaagatggggcggcgtcaagctgctggaaccagggcaaacgcagctagggctgatggcggccatgggagagacgccgagagagagggctagagaggatgaggctgggcgtgcacaagagataatgctgggcaacgacatcttcgcgaaagtgccaggggcggtgaagacaggataa

SEQ ID NO: 145280 - DNA, 707 bp, Zea Mays
acatttaagcataaaacatgtcatttcttcagaaatttaagcattccatccaattcttgatacatatttttttccaaaatttaagcatgtaatagacttagtataaactagattttatccagaaatttaagcatgtcatataagtcttgcaacaaccttccttcagttctattacatggtgagcccaaacatggagaaatgcaacatatatatagctcataccggcacatgcagactcagaacgccgtgcagaactgtctccatatgaccaatatttcctgtccgcaaagtttaaataaggaatcaaaagcagaaatcaacagataaaaaaatggaatttatgcagaaagaaaaacagcagggaacccatatcaattagtaaacatcgggtcctcaaaatatgcaagcgcatgttgttgttgctgctacacttttcttgagtgagcacaaatggaggctgattaacaacagtaacaacaaagaactcaccagctgcagggaaccaagtacaactactcccaaccatgggattcagtctctctcaagcaataaaaatgtagtacccctgttgcattcatccccatgcatcacccaaatcgacgcaggactagcaacaaactagtacaaggtatgaaatcatagattatacttaccttagagcttatcaatcttccgtcttaaccataggagggcagtttctggttcat

SEQ ID NO: 145281 - DNA, 261 bp, Zea Mays
atggggagaggtaagagctccttttttgcatctctgttcggctgcaagaagcaggtctccgccggcgggaggcaggaggaatcggcggcggcgaggccacctttgacgcatcgggcctatcaagggtgcggcggagcgatgacgacgatcgacgactactacggtcagaactggtatgccgatcgcgacatcaaccggagggcctctgattacatcgagagggtgcaccgcgtaatactggctagcgaacagggcgaatag

SEQ ID NO: 145282 - DNA, 1000 bp, Zea Mays
atgccggtgctgccgggcaacaagcggcgaccgaggcagcacgtgcagccactgcccggcgcgccgcttgtcccccggatcttgcctccccctcccaccaccaatcacctctcgtcgacctaccctgccgcgcgccgcgctgtgctcatactcatagctcccatcatcccctcgccccttcgccatgatttatactcgcgtgacgcccacacaacgcccatgattagaagtcgcccggccgcccgcgcgctgccgagatccatcagctcttatcctcaacatccttccagcttcctggagcagtgccgcctttcatataaacgtacacccgctagctagctagcttcttcatttggcctgcaggcggccagcctgcgccagagccagacagagatctctgttccggcagagcttgaccctcctgttacgtgctgcagcttatatgggttcttgggtgcgcaccatcacaacgcccttcaggaaagcctgcaccatcttcggcccacacaaggacggcggcggcaagaagcagacgcagcagcggccaaactcagcagcggtggtgcagcacgtcgacgccgagagggccaagctccacggggaggtgatggcgtgcgcctacgacgacgtgcaggtcatgtggtccatgctcgaccaggcaaggatccgggatctcagtgccagctcgtgacctagcttcgtgcatctagcttcgcctagagccgcgaaaatggactagtacatagcaaaatatcctctctctctctctctctctctctctctctctcctcctcaccaattaaacgttcccaaacctgcactcgctcgcttttcttgtacacgtagctgcttagatttagcttttctcttttatttggaggttttgcagctcagtcaagtgtttgaatccccacaggcactctcttctcttctctttgagcgaggggcttgattggagagatgtacattattgccacctattggaatcttgatttgttgc

SEQ ID NO: 145283 - DNA, 999 bp, Zea Mays
atgccggtgctgccgggcaacaagcggcgaccgaggcagcacgtgcagccactgcccggcgcgccgcttgtcccccggatcttgcctccccctcccaccaccaatcacctctcgtcgacctaccctgccgcgcgccgcgctgtgctcatactcatagctcccatcatcccctcgccccttcgccatgatttatactcgcgtgacgcccacacaacgcccatgattagaagtcgcccggccgcccgcgcgctgccgagatccatcagctcttatcctcaacatccttccagcttcctggagcagtgccgcctttcatataaacgtacacccgctagctagctagcttcttcatttggcctgcaggcggccagcctgcgccagagccagacagagatctctgttccggcagagcttgaccctcctgttacgtgctgcagcttatatgggttcttgggtgcgcaccatcacaacgcccttcaggaaagcctgcaccatcttcggcccacacaaggacggcggcggcaagaagcagacgcagcagcggccaaactcagcggtggtgcagcacgtcgacgccgagagggccaagctccacggggaggtgatggcgtgcgcctacgacgacgtgcaggtcatgtggtccatgctcgaccaggcaaggatccgggatctcagtgccagctcgtgacctagcttcgtgcatctagcttcgcctagagccgcgaaaatggactagtacatagcaaaatatcctctctctctctctctctctctctctctctctcctcctcaccaattaaacgttcccaaacctgcactcgctcgcttttcttgtacacgtagctgcttagatttagcttttctcttttatttggaggttttgcagctcagtcaagtgtttgaatccccacaggcactctcttctcttctctttgagcgaggggcttgattggagagatgtacattattgccacctattggaatcttgatttgttgcaa

SEQ ID NO: 145284 - DNA, 1657 bp, Zea Mays
atggaaatggcatctctgattgctggtcgagtggttgcgctgcatcggagtttaccgccacccgttgaagggacggtggcggacattattgtcatttcgtctcgtcctgttcttttaaatactcccaaatatcatctcctcggaaagaggagcgaagagagcgaaatccagagcacacggcgtcgcatttggaacgctcctgctcgtcgcacgtacgaagcccacgcgtccgcgcacgtgccagagccgagcccccgcgccggcgccccgccggagaggatgacgcggcggtgctcgcactgcagcaacaacggccacaactcgcgtacctgccccgtccgctccgccggcggcggcagcggcggcggcggggtgaggctgttcggcgtgcggctcacgacggcgccggcgccggcggtgatgaagaagagcgccagcatgagctgcattgtgtcctcgctcggcggcggtttcggcggctcgtcgccgccggtggaaggagtgggtgctggcagaggaggggaagacagtgggaccggctacgtgtccgatgatcccgcgcacgcatcctgctcgacgaatggccgcgccgagcgcaagaaaggtacaccttggactgaagaagagcatagaatgtttctgatgggtctgcagaagcttggtaagggagactggcgcgggatatccagaaactttgttgtttccaggaccccgactcaagttgcaagccatgctcaaaagtactttgttagacagacaaactcatcgagacggaagaggcggtcaagcttatttgacatggtcccagaaatgccaatggatgagtccccagctgctgtggaacaatttactctccaaaatactcaagatgaagatacaagttcaaatcacgtgccaaccttacatcttggacaacggaaggaaacagagtttgctaagcagctacaaacttttcagccagggcaccatgagaaatctgaatacgcagaaccttcattgctgctaccagatttggagatgaaccccagtgtaccattcaagaccataactgatccaacaggaccagcattctacccatcattggtccctgttccactaactctttggcctccaagtgtttcccacgtggaggaagcagccagaacccatgaaatcctaaaaccaactcctttgaatggtaagggggtggttaaggcagatgatgttgttggtatgtctaagctcagcatcgacgaagctagctctggctccatggaacccactgctctttcccttgagcttattggatccacagatacaaggcaatcagcttttcatgtgagtccaccgatgaatagacctgaactaagcaagagaaacagcagtccaattcatgcagtttgaggaagcatgaaacatgcccgctgggtcaagtcttacaaattatactgatggtctcaatacctcagaacgtgaccatgtactttgtaacgactttttagttatcctgtttccagcttatgttccttgccatcgacaaatgtagagagatacatgtgtcaatggaagtagcatgccattagtttcagcactgaattgttgcctgttgggacgccatatgcacctaccttttctggttcatcctccatgcttcaggaaatcgatgtggaaattctga

SEQ ID NO: 145285 - DNA, 1963 bp, Zea Mays
atggaaatggcatctctgattgctggtcgagtggttgcgctgcatcggagtttaccgccacccgttgaagggacggtggcggacattattgtcatttcgtctcgtcctgttcttttaaatactcccaaatatcatctcctcggaaagaggagcgaagagagcgaaatccagagcacacggcgtcgcatttggaacgctcctgctcgtcgcacgtacgaagcccacgcgtccgcgcacgtgccagagccgagcccccgcgccggcgccccgccggagaggatgacgcggcggtgctcgcactgcagcaacaacggccacaactcgcgtacctgccccgtccgctccgccggcggcggcagcggcggcggcggggtgaggctgttcggcgtgcggctcacgacggcgccggcgccggcggtgatgaagaagagcgccagcatgagctgcattgtgtcctcgctcggcggcggtttcggcggctcgtcgccgccggtggaaggagtgggtgctggcagaggaggggaagacagtgggaccggctacgtgtccgatgatcccgcgcacgcatcctgctcgacgaatggccgcgccgagcgcaagaaaggtacaccttggactgaagaagagcatagaatgtttctgatgggtctgcagaagcttggtaagggagactggcgcgggatatccagaaactttgttgtttccaggaccccgactcaagttgcaagccatgctcaaaagtactttgttagacagacaaactcatcgagacggaagaggcggtcaagcttatttgacatggtcccagaaatgccaatggatgagtccccagctgctgtggaacaatttactctccaaaatactcaagatgaagatacaagttcaaatcacgtgccaaccttacatcttggacaacggaaggaaacagagtttgctaagcagctacaaacttttcagccagggcaccatgagaaatctgaatacgcagaaccttcattgctgctaccagatttggagatgaaccccagtgtaccattcaagaccataactgatccaacaggaccagcattctacccatcattggtccctgttccactaactctttggcctccaagtgtttcccacgtggaggaagcagccagaacccatgaaatcctaaaaccaactcctttgaatggtaagggggtggttaaggcagatgatgttgttggtatgtctaagctcagcatcgacgaagctagctctggctccatggaacccactgctctttcccttgagcttattggatccacagatacaaggcaatcagcttttcataggggttttctatcaactttcaaggatcaaggtatgatggtgcagcggcaaaaatctggctggacatcaaacaagattagaagggttgcagttgtcaacttggtgatcagttcaagatactctattaactgcaaaatgcagggtgatcaagtcagatgtgttgtgccagtacccacgatttcagaggaagaagccggtgccgggatcgccaatgcaaagcaaaatatgacagcatcgagatcacgattcggcttgatctgcaatctcaggatattcagtacgtgacgagagaacactatgactcctgaattgaggtcgtcaatataaataatgcaggatcgctgcaaagattgcactgccgtagagtagtgcgagttaagcagacggccgtgtcaaacaagcaggcaggttcttcatcgatcggcatcatccgagatgtctagctcgatctaatagagtctccagttttgtgcgaagatcttcagctacagcttccttactagctgacgtcttttttttccccaaagatctccaaatgtggaagatcttgcagagagtttgcagccaagatctcttcaaagatcacctgtaccttgccggactgatcttgaagccaataccaactcttccagaacatgtgtgcctt

SEQ ID NO: 145286 - DNA, 227 bp, Zea Mays
atcataaagatcaaagaaaatatatttgtttatgtgcaagatcgtgtgacactcaccatgagtctttatagtttccataagccaccccatgccactgagttgtgatgtcattggtggtgctttttccatgtacatgtacacataagcttgagctagtttaccacacttttcaaccatattaaaaaatcatcatcatcataagagtcaccactatcacttctagacat

SEQ ID NO: 145287 - DNA, 1793 bp, Zea Mays
gtaaaaaccctattagggcacgggtatgtcagattttgatacccatgagtattttattgggtcatttgttatgcccatcgggtatggtgggcgtgggtatgttctctgttgccccatacccgctacccgatggggaacccgctaatatatgacatgtgagtccggatttatgtctcatataaaatgaatttgctcccgatgggtaaaaaccctattagggcacgggtagaatcaatgctatgttttgtgtgatttgaaggcatgatattgccatttaatgttgaatattgttgaatctgtgataaaattatgttaggttcgatacatttattatgctgatacttatttttgcgattcaaatgatcatgtctatcgtaatgttaatgggtatgggtacccgctatccatagtgggtataggtatggcgtaattttgtacccatgatgggtagtgggtatgggtatgggtcaattttttcctagtgggtatgggtatggcttcatgtgcctactggttaccttacctactgccatccctactctagtctgtctactgcatatgcatttggtcgtgcaactagtgatggcgcgcgcggtggaccagtgcgctcaccaccagtcaccgcctcaccaccaccaccaccaccaccaccaccatcggccggcggccggccggccgttcttgtctcttccatgcgtcccgacgctcctccactagagcagaattaaaacctctatatatatgtagagcgagcacgcctgtgcgaacatgccgctccagcacacacagcacccattaattccgtaatccaaggggaacccgacgcacagatcacttgtggcaggcacccggccgtgacttgatcgcaatcacaaccatcatcatcgacaatggcggcgtattcttgcgccttgtggactgctgcttccgtggtcgctttccttgtcatcggcgtagcagaggcgaggtacggcggccctgggcagtggaggaggcctgcccctgcccctgttgtccctgtggcggccctcgtcagcgagcagctgtacggctccctgttcctgcacaaggacgacgacgcctgccccgccaagggcttctacacctatgcctccttcatccaggccgccaggacgttccccacgttcgccgccactggcgacctcagcacccgcaaacgcgaggtcgcggccttcctcgcgcaaatctctcacgagaccacaggcgggtgggcgacggcgccggacggccagtacgcgtggggcctgtgctacaaggaggagatcaagccggcgagcaactactgcgacgcgacggacgagcagtggccgtgctacccgggcaagtcctaccacggtcggggccccatccagctctcctggaacttcaactacgggccggcgggccaggcgctgggcttcgacggcctgcgcaacccggagctggtggccaactgctcccagaccgcgttccggacggcgctctggttctggatgacgccgcgccgccccaagccgtcgtgccacgaggtcatggtcggagagtaccgccccacgcccgccgacgccgcggccaaccggacgcccggctttggcctcgtcaccaacatcgtcaacggcggcctcgagtgcaaccgcaccgacgatgcccgggtcaacaaccggattggcttctaccagaggtactgccatatcttcaacgttgacgccggccccaacctcgactgcgcacaccagcagccctactagtgtagtgtctacggggttacgttctaagctgtttgcctgtttcta

SEQ ID NO: 145288 - DNA, 515 bp, Zea Mays
gggatagatggtgttggaaggctgttgaaattaacgatttggtctctcgaacaaatacactattttctatgcatatgttatgtattagtaatatataatgatagagagccgacaatctgtctttttcacacactagattttagggttttcctgtgaggctatgaaaaaactctttatgtgaggaaaaaaatattttatgagtaagcatgtcatgtcagctaaatcaagtggatattgtgaactttgagtctgtgaacttgtggtctttataaacttgttatactgtaaacttattatattgtgaacttgtgatctttgtaaaccttttatattataaatttgtgatacttgtgaacttgttatatcatgaattgtgaacttgtggtctgtgtgatcttttgtcaactttgttgtattgtgaagtttgatatgtttaccgatcgtattttagatttcgaccgttaccggtgtattttccgcaccgaactttcgtttccgatgtttccgaaataccg

SEQ ID NO: 145289 - DNA, 950 bp, Zea Mays
ccggtcgaacctggcgccgcccacccgccgtctgtctcgctgctccccatcgctcttggcctttcgtcgtgactcgctccctccccgactccctgcatcgctccccatcccatcttgtcctggacacctgggaagcctccttctgttctttttcgtttcattcttggccacagacttcacatgcccacaaccccatggaggagaaaccagactaggaccaatacccatcaattccttcagtgttttacgccggtcaccgtggagctccgtgtggtggggttcggcaaggaggtggtgctaaagcagtggtggcggatgcgctggagacttcgcctggccatgctactccgcctagaagcgcccacatccggtcgtcgccccattcgctggtgccgcgctccgatccaccccgcccctattccgcctaggctgagctccgcctccactgtagctccgcctcaacgtctggcccaaagtggtctttgccacgttcttgaactcccccaacaccacgacggggtaggtccttctctccaatccaaaatgctttttagctagtcctcaaagctcttgttttttaatggcgaaggaatattgttgttctttacaaaatctgtgtggcaccattctaagagttggccatttagaatagaggttggtatttgtcatcagcaacaaggattgttgttcactccttcctatgcatttcccggtcgattgttgggctctgaaggacacaataaccaaatgtgtaactaaatgaaggtgtcttttttttgtgaattcgtcagtttatattctgcaagttagtattagataaataatctgtccatccaaaatttcgtactgaagaggttgtgcctgtgcggttaggcgcacatgcatcatctaactaataatatgcacctgagttgtgtccttgttgggcataatatccataaactgcaagt

SEQ ID NO: 145290 - DNA, 312 bp, Zea Mays
ggtgttcactatgcttatggatgcaaatcgtataaatggtataaaatatctctaaaggatatgatgtccaatcttttttcggagggttactgctgagctgctaaaacaagcgctaacagggattatggtactacctctgttcataaaaaggatacaaataccaatactccaaagctgttctttttcagtcatattgcgagctgagagtattcagggcaatggatttggcgtgtcgttcttccttctctttctccacagcttcgttaacttgttcctttcctcgcaatgactgaaactgaactgattcatgac

SEQ ID NO: 145291 - DNA, 2510 bp, Zea Mays
tgagcaaggagccctgctgctcccatcaccttcatcaagccaagcgtgtgtcctctgtcctctcccagctgcgagctccgacccccggcaccatgtccgacagcagcgacttcgccgagctgctatgggagaacggccaggcggtggtgcacgcgcggacgaggaaacacccgccccagcaggccgccttcccgcccttcaccttcacctgcagcagcagagctcaacaaaggcagccggtgccgccgctgctcaagacgggaggaggtctctttgccgacttctcctcggccaccgccggcctagacgccccccgtgacaacgccgacctcgacgacaccgtgccgtggatccactaccccatccccatcgtcgacgaagccagtcccgccgcgcctgccctggcagatagcttcatcccagatttcttctcggagctgcatgcggcggcggcgacgacgagcctcggccctctgccaccaccaccaccaccaccaccagcagtccagcacaccggcgacgacaacgacaaccggagcaccccggttcccaatcccaccaccggcagaggaccagagccctcaaaggaaacccaccgcgcaccagtaccaggtccagccggcaggcctgagccacaaccacaagctgagctcgcgcccgccaggaagcctcggcaggagagcggcggcggggaggctttgatgaacttctccatcttctctaggccggcagccatggcgcgtgccagcctgcggcagaggccgccacagacaggcaccgacaaggcgtccaatgccaccacgagcacccgcgtggagtcgacggtgctacagtcggccagtgccagtgggccgagaactgcagctgcccccgccgtgttcgtggaccagaggacggcgtggccgtcgcagcagcccaaggaggtgcggtttccatgcgcagcagcagcgccaccgccgacgccgacggctggtaacctgcagcaagaaagacctagcaacaacaacatgactcctccgcagaaagaagtagagaccaggaaggcgtcagaggctgcgggcgccaccgccacctcatcggtctgctccggcaatggtgctgggacaggaaaggacgacgagtcctggcgccaacagaagaggaagaccctgcaggccgagtgttccgcgagtcaagatgatgatcctgacgatgagtccggtgggatgagaagatcgtgcagcagaggtgcgaagcgcagccgcaccgcggaggtgcacaacctgtccgaaagggtaagtcccatgccaatatgccatgcgatcgatctcgagctggagcctggagctgtgcacttgaactcaccgcactgtaatgcatgcaatgcaatgcaacaacaaacctgcagaggagaagggacaggatcaatgaaaaaatgcgtgccctgcaagagctcatccccaactgcaacaagattgacaaggcctccatgctggacgaagcgatcgagtacctcaaaaccctccagcttcaagtgcagatgatgtccatgggaagtgggctgtgcattcctcccatgctgctgccaccagccatgcagcacctgcagattcctccggctgctgctcacttccctcatctcggcatgggattgggttacgggatgggtgtcctcgatatgaacagcgcggcggcggcggcggcggcggttccatttccgcacatgcccggtgctcacttcccttgcccgatgatcccaggcgcgccactaccacggggtctcggaatcggaatgcctgccagaaacacgatgccggtgttcggagtccctcctgggcaaccaatccagccaccattcccatctttggcgggccttcctgtcaggccaaacctggcacctcctcacgcctcctcagccgccatggctaacatggtgcaggagcaacagcagcagcagcagcatcagagcctgaataatggagcatcaacagcagcagcaacagcatcagatcctcagactatcgtgcaggctgagagacagcattttagtgtgccctcttcagcacaaaccgagagcgatcagtttttggatggtggtggcaacagggctatttgtacaggaagaaatgaggctgaaacatgaaaaacactcagcaggtctcgactaacaggctgcagatgtgaatatcagcgccaactcatcctggaaaagagcctaacgagtttcaagatccacgaagcagatccgtcagttgaaaagagtccaatcaatcaagacagggccatgacaggacgtctagctttagcgagctaagatgctcctaagttttgtgtcaaatgtagatggtagatggaacctggttacaagaaacatttcttggcagccggtgctttttttctttttttttgggattcactgaagttttcttggatcagtatgtcttatttcctcaggcattcagtgatcatatgcacaaagatatttgtgtccatatactggctctgctttaactatatctctttgcaaataa

SEQ ID NO: 145292 - DNA, 2397 bp, Zea Mays
tgagcaaggagccctgctgctcccatcaccttcatcaagccaagcgtgtgtcctctgtcctctcccagctgcgagctccgacccccggcaccatgtccgacagcagcgacttcgccgagctgctatgggagaacggccaggcggtggtgcacgcgcggacgaggaaacacccgccccagcaggccgccttcccgcccttcaccttcacctgcagcagcagagctcaacaaaggcagccggtgccgccgctgctcaagacgggaggaggtctctttgccgacttctcctcggccaccgccggcctagacgccccccgtgacaacgccgacctcgacgacaccgtgccgtggatccactaccccatccccatcgtcgacgaagccagtcccgccgcgcctgccctggcagatagcttcatcccagatttcttctcggagctgcatgcggcggcggcgacgacgagcctcggccctctgccaccaccaccaccaccaccaccagcagtccagcacaccggcgacgacaacgacaaccggagcaccccggttcccaatcccaccaccggcagaggaccagagccctcaaaggaaacccaccgcgcaccagtaccaggtccagccggcaggcctgagccacaaccacaagctgagctcgcgcccgccaggaagcctcggcaggagagcggcggcggggaggctttgatgaacttctccatcttctctaggccggcagccatggcgcgtgccagcctgcggcagaggccgccacagacaggcaccgacaaggcgtccaatgccaccacgagcacccgcgtggagtcgacggtgctacagtcggccagtgccagtgggccgagaactgcagctgcccccgccgtgttcgtggaccagaggacggcgtggccgtcgcagcagcccaaggaggtgcggtttccatgcgcagcagcagcgccaccgccgacgccgacggctggtaacctgcagcaagaaagacctagcaacaacaacatgactcctccgcagaaagaagtagagaccaggaaggcgtcagaggctgcgggcgccaccgccacctcatcggtctgctccggcaatggtgctgggacaggaaaggacgacgagtcctggcgccaacagaagaggaagaccctgcaggccgagtgttccgcgagtcaagatgatgatcctgacgatgagtccggtgggatgagaagatcgtgcagcagaggtgcgaagcgcagccgcaccgcggaggtgcacaacctgtccgaaaggaggagaagggacaggatcaatgaaaaaatgcgtgccctgcaagagctcatccccaactgcaacaagattgacaaggcctccatgctggacgaagcgatcgagtacctcaaaaccctccagcttcaagtgcagatgatgtccatgggaagtgggctgtgcattcctcccatgctgctgccaccagccatgcagcacctgcagattcctccggctgctgctcacttccctcatctcggcatgggattgggttacgggatgggtgtcctcgatatgaacagcgcggcggcggcggcggcggcggttccatttccgcacatgcccggtgctcacttcccttgcccgatgatcccaggcgcgccactaccacggggtctcggaatcggaatgcctgccagaaacacgatgccggtgttcggagtccctcctgggcaaccaatccagccaccattcccatctttggcgggccttcctgtcaggccaaacctggcacctcctcacgcctcctcagccgccatggctaacatggtgcaggagcaacagcagcagcagcagcatcagagcctgaataatggagcatcaacagcagcagcaacagcatcagatcctcagactatcgtgcaggctgagagacagcattttagtgtgccctcttcagcacaaaccgagagcgatcagtttttggatggtggtggcaacagggctatttgtacaggaagaaatgaggctgaaacatgaaaaacactcagcaggtctcgactaacaggctgcagatgtgaatatcagcgccaactcatcctggaaaagagcctaacgagtttcaagatccacgaagcagatccgtcagttgaaaagagtccaatcaatcaagacagggccatgacaggacgtctagctttagcgagctaagatgctcctaagttttgtgtcaaatgtagatggtagatggaacctggttacaagaaacatttcttggcagccggtgctttttttctttttttttgggattcactgaagttttcttggatcagtatgtcttatttcctcaggcattcagtgatcatatgcacaaagatatttgtgtccatatactggctctgctttaactatatctctttgcaaataa

SEQ ID NO: 145293 - DNA, 351 bp, Zea Mays
atgggtaggatcgaccggccatggagggataggaaaatccgagctgggcaccgaggaagaaatccggcgtggcaaccgagaaactgcgcaggccaacagggagcagcgcacgcgaagggagagagacagggcgcgcagaggctcacgcgcagtgagcctgaacccgagcagaagtccgagcgccatgagagctcgagaccactcgccggccagtacggaagcagggacgccgacatggagaagcttgacgaggcgctgggcgtgcgtcgcgagcagacaggagagcgccaaggagcatcgcggcaagccaggcgcggcaggggagcttcagctgggctggacgccgggtag

SEQ ID NO: 145294 - DNA, 1193 bp, Zea Mays
gtgccggcctgccggccatgctctgactcctccaggcccaacgatagcccaacaacaattaagggccctctgccacaccgcaggctaccccaacatgccaatccttgttgcctccggagacctggcctcagccccttccccggccattcgagcgccgccctgctcgcctgcccttgcccactacgccctcttgatttctccctccattccgatatatttaagcgaaaaaaaatccgataagccaagccaaacccaaacccaaccatggcgtgcatgccggctgtgtctgccccctccgtcctcgcgccggcaccggcgtcgacccgcacccacctctgctactcaacggaaatgcgacgcggcgcgctctccctccgtcccgcccgcgctatccccacgttgaggctcggcggccaccgcgacgcccgtggcgctgtcgtcgtccgcgccactgcggcagagggagccgtggagctgcaggccaaggtgacgagcaagtgcttcttcgacgtggaggtcggcggggagcctgcgggccgcatcgtcatcgggctcttcggagaggtcgtacctaagaccgtcgacaacttccgtgcgctctgcactggtgagaaagggtacggctacaagggctgctccttccaccggatcatcaaggactttatgattcaaggcggggacttccagcaaaacaatggtactggtgggagaagtatttatggtgaatgctttgatgatgaaaattttacactgaagcatgttggccctggtgtgctaagcatggcaaatgctggccccaacacaaatggaagtcaatttttcatttgcactgtgaagacaccgtggttggacaaccgtcacgtcgtgtttggacacgtattagaggggatggacgtggtgaagcagcttgaatcgcaagagaccagcaggtccgatactcccaagcagccttgccgaatcgttaactgtggcgaggtccccctggacagctgagcgagcgaaatgctcttggtgagtttgaacctgaggtaccgcgaagtcttctcttacgttagagcgtcgacgcccatttgtggtagcatcattcggtcagttgagttatgtgtacgtgccgtgacggaagtttaattactcagatgtggacacattaccagttaatagcaacgaattggcaagggacatctcaaaaaaaa

SEQ ID NO: 145295 - DNA, 2381 bp, Zea Mays
gtgccggcctgccggccatgctctgactcctccaggcccaacgatagcccaacaacaattaagggccctctgccacaccgcaggctaccccaacatgccaatccttgttgcctccggagacctggcctcagccccttccccggccattcgagcgccgccctgctcgcctgcccttgcccactacgccctcttgatttctccctccattccgatatatttaagcgaaaaaaaatccgataagccaagccaaacccaaacccaaccatggcgtgcatgccggctgtgtctgccccctccgtcctcgcgccggcaccggcgtcgacccgcacccacctctgctactcaacggaaatgcgacgcggcgcgctctccctccgtcccgcccgcgctatccccacgttgaggctcggcggccaccgcgacgcccgtggcgctgtcgtcgtccgcgccactgcggcagagggagccgtggagctgcaggccaaggtgacgagcaagtgcttcttcgacgtggaggtcggcggggagcctgcgggccgcatcgtcatcgggctcttcggagaggtcgtacctaagaccgtcgacaacttccgtgcgctctgcactggtgagaaagggtacggctacaagggctgctccttccaccggatcatcaaggactttatgattcaaggcggggacttccagcaaaacaatggtactggtgggagaagtatttatggtgaatgctttgatgatgaaaattttacactgaagcatgttggccctggtgtgctaagcatggcaaatgctggccccaacacaaatggaagtcaatttttcatttgcactgtgaagacaccgtggttggacaaccgtcacgtcgtgtttggacacgtattagaggggatggacgtggtgaagcagcttgaatcgcaagagaccagcaggtccgatactcccaagcagccttgccgaatcgttaactgtggcgaggtccccctggacagctgagcgagcgaaatgctcttggtgagtttgaacctgaggtaccgcgaagtcttctcttacgttagagcgtcgacgcccatttgtggtagcatcattcggtcagttgagttatgtgtacgtgccgtgacggaagtttaattactcagatgtggacacattaccagttaatagcaacgaattggcaagggacatctcaaaaaaaataaatgttgtcagccttccttcatttcagacaagttagcaccagctgtcggtaggacaaaaacgctggaccatcagatgtttcgctttctttcttttttttctgtagattcaacacatgaatgacaacacctgtaaagcagttgggtcgccttgcacaccccacccgctgcccaaacattaacaacatggtgtggagacgactgctaaataatctgtcctgtggacgtgtacgcatgcatggtgtgtttgcatcggtcttgatcggttgcttggttggtgcctcacctcaggaaccgagacgagatgcggacgcgagcgccaccgcctgcgcccacaccttgagccgcgccttcacgtccttgggatcgtcccctgtgacgggcagcagtgtgagaacagtgccgcagatagcacgaaggcgcggcccgcggggcaagggaagcagcgttggcgcagccttggttgatcgccacgagtccaattccattccacacccacagccgctggtgaatcacattcccatgcacagcgcgtgctttttgctgcatgaccatgacacctggcgcgcgtgctctttaaacttgggtaccgtttggttcagatatttgtaacgtaatgggtaagtgataacgttaaatcatgtttgttttagttccaccgtaatcagataccatactaaaaattgataccggactactcaaacttgttaccgacagtaatcgaatgtaaaccattaccattacctttgcgttacatttcttgaaccaaaccgcaccttggttcgttccagtgcactgcctgccaaggcagggcaaagaaagagagagaggggaggcggccgtcggatgcgattccgcgccgcgcgaggtgctgtgcgtgcaaatgcccccccgtccccgtcggcttgatgccaaatggacgtgcgcgcggcgacgaattgacctggttggtgacgcggggcgagcgaggagcgacctcatcggctcggccggaccgacgcgactcgcgtgcgtacggacaagccgatcggccggagcactcgttgacaaaacagatggttgcgcctactaagcaacagaaaagaaaactgctagctataggcagagtaattaacgtcaatgattgggccggggtgtcacggtttagtcgacgattaccggggctggagatgcgccagctgccggagg

SEQ ID NO: 145296 - DNA, 267 bp, Zea Mays
atgaaatcgaattcgacctataaatgggaccatggggtgggcgggcgcgtcgttaccgatctcctctagtgtggagaagttgcggcggccggtgggctttcccttgaactttcccctccccatggcggcggcgagcaaagggcgagcgaggctggtgcaggtagagagcgagctggaaggagcggagggcggaggggttctgcgtgggcggtgattgaaccgcagaatggggcggctgctgctcagcctgtggagaatgaggagagt

SEQ ID NO: 145297 - DNA, 1269 bp, Zea Mays
ataaaaagaggttatcaaactagcccttcaaatggggcaaaaaggcaatgttctttgaccaccgagcaaaccccagcctccgttactctccttcctcttggctcgcctcggctcccgtcgtccccttccttgagatctctaggatacgagcgcattcgcatcgcttcgcctccgccgcggcctggggagatggcgggtttgggaaaggcgatgtacgcggtgggattctggatccgggagaccggtcaggccctcgatcgcctcggctgccgcctgcagggcaagtacttcttccacgagcagatttcaaggcatcgcaccatcatgaacatctttgacaaaaccccacatgttcatagggatgcatttgttgctccaagtgcatcccttattggtgatgttcaagtcgggcaaggagcttccatttggtatgggtgcgtcttaagaggggacgcaaacaacatacaaattggatctgggaccaatatacaagacaattctcttgtgcatgtggctaaatctaatctaagtgggaaagtctttccaacaatcattggcaataatgtcacaataggtcacagtgctgtgttacaaggatgcacggttgaggatgaagcttttgttggcatgggggcaaccctattagatggtgtcgttgttggaaagcatgggatggtagctgcaggatcccttgtaagacagaatactaggatcccttgtggagaggtatggggagggaaccctgccaaatttctgaggaagctcacagatgacgagatcgcatttatcacggaatcagcttccaactattccaatctgtccaaggtgcatgctgccgagaatgccaagcctcttgaaaagattgagtttgagaaggtgttgcgcaagaagtttgctcaccaggatgaggagtatgattcctccatcggcatcactcgagggtccccaccggagctgacatccccaaatccagcccaataaacctctgtttttgtttctgttttctctttgacgccttaattattttgtattggacagcgctggattttgaccgggccatagttccatgacttaggtggtttatgtttacttttcctccccaataatcttgggtcgagcgatgttataaagctggtcatgcacttcttccagattctgtattcggtatgtttaagatgtgctccctggagagttccaccaaataaactgaaatgcattgttttgacaggtaacatggactgaattacatacttccattacctttgatgg

SEQ ID NO: 145298 - DNA, 1031 bp, Zea Mays
gttatattgttgtcatccaatgcacaattattaaataaataaacgctaagattactgccctttcagtttcaaggcatcgcaccatcatgaacatctttgacaaaaccccacatgttcatagggatgcatttgttgctccaagtgcatcccttattggtgatgttcaagtcgggcaaggagcttccatttggtatgggtgcgtcttaagaggggacgcaaacaacatacaaattggatctgggaccaatatacaagacaattctcttgtgcatgtggctaaatctaatctaagtgggaaagtctttccaacaatcattggcaataatgtcacaataggtcacagtgctgtgttacaaggatgcacggttgaggatgaagcttttgttggcatgggggcaaccctattagatggtgtcgttgttggaaagcatgggatggtagctgcaggatcccttgtaagacagaatactaggatcccttgtggagaggtatggggagggaaccctgccaaatttctgaggaagctcacagatgacgagatcgcatttatcacggaatcagcttccaactattccaatctgtccaaggtgcatgctgccgagaatgccaagcctcttgaaaagattgagtttgagaaggtgttgcgcaagaagtttgctcaccaggatgaggagtatgattcctccatcggcatcactcgagggtccccaccggagctgacatccccaaatccagcccaataaacctctgtttttgtttctgttttctctttgacgccttaattattttgtattggacagcgctggattttgaccgggccatagttccatgacttaggtggtttatgtttacttttcctccccaataatcttgggtcgagcgatgttataaagctggtcatgcacttcttccagattctgtattcggtatgtttaagatgtgctccctggagagttccaccaaataaactgaaatgcattgttttgacaggtaacatggactgaattacatacttccattacctttgatgg

SEQ ID NO: 145299 - DNA, 1855 bp, Zea Mays
cactaaatggcacaacggcaaatgtgcaaatcaagcagctaggtgaaagagggcaagtggtagcatacagcatgctacccacgaaagtactactacatcatacccatcatagcatgttcgaatacaacaaccaaacctaagctccagcttgaaagaaagccaggtccagagacggtacaatatgcagcagggtccaagatcaccttactcgtcatggacctcctcctcgtcctcgtactcctcctcatcggcagtggcatcctggtactgctggtactcagacaccagatcgttcatgttgctctcagcttcggtgaactccatctcatccatgccctcgccagtgtaccaatgcaagaaagctttcctcctgaacatagcagtgaactgctcgctcacacggcggaacatctcctggatggaggtggaattgccaatgaaggtggaggccatggagaggccgcgcggcgggatatcacaaacactggacttcacattgttggggatccactccacgaagtaggacgagttcttgttctggacattgatcatttgctcgtccacctccttggtgctcatctttccacggaacatggcagatgctgtgagatagcggccatgacgcgggtcagcagcacacatcatgttcttggcatcccacatctgctgggttagctcagggacagtgagagcacggtactgctgcgagccacgcgaggtgagtggcgcaaagccgaccataaagaagtgcaggcgagggaacggaatcaggttgactgcgagcttgcgcaggtccgagttcagctgtccagggaagcggaggcagcaagtcactccactcattgttgcactgatcaagtggttcaggtctccaactctaggcgtcgtaagcttcagagttcggaagcaaatgtcgtaaagtgcctcattgtcaagaaccatgcattcatcagcattctcaaccaactgatggactgacagtgttgcattgtatggctcaacaacagtgtctgaaaccttgggtgagggaaagacagaaaaagtgagcatcatccgatcagggtactcctccctgatctttgagatgagaagggtgcccattccagatcctgtgcctcctccaagggaatggcaaacttggaatccttgaaggcagtcgcagttctccgcctctttcctcacgacgtcaagcacagagtcgatgagctcagcgccctctgtgtagtggcccttggcccagttgttccctgcaccagactggccgaagacgaagttgtcgggccggaagatctgtccgtacggcccggtgcggacgctgtccatggtgccgggctcgaggtccatgagcacagcgcgcggcacgaagcggccgcatgaggcctcgttgtagtagacattgacgcgctcgagctggaggtcggaggtgccgacatagcgtccggtggggtcgataccatgctcgtcgcagacgacctcccagaacttggaaccgatctggttgccgcactgtccaccctggatgtggagaatctccctcatggctggatcttggctggatctcaaggttgctacctataggtgagaagggagcggaagggtggtcactggtcagtagcgagaaaatgttggagatattagtccaagagagagtggagaaccagatttacggagaataacaagctccggcacgaatttaaacagatccgggcacagcatggaaaaagtgcaaataaaaaagaggctcgtagaaaaaaaaatcatttgatgtagctccacaaggcaagggaggagcagcttgagatctatctgaaattctattagaatatctcagtgaagcggtttcacctacgaacaa

SEQ ID NO: 145300 - DNA, 3430 bp, Zea Mays
ctctctcctcctcccctccgctccctcccagtcccagatcccgattcgccgccgcctccggcagatccagccagcagctcccgccgcagaaccgccgcgggcgccatggagaagccatgctctctcctggtccacttcgacaagggctcggcatcgatggcgaacgagatcaaggcggatctggagggcagcgatggccccgccaaggctgacgccatgcgccgcgccatctcgctcctcctcaacggagagaccctccctcagctcttcataaccatcgtccgctacgtgctcccctccgaggaccacaccgtgcagaagcttctcctcctctacctcgagatcatagaccgccgggatccggccggccgcgccctgccggagatgatcctcatctgccagaacctccgcaacaacctccagagccccaacgagtacatccgcggcgtcactctgcggttcctctgcaggctctccgagcccgaggtgctcgagccgctcgtgccgtccgtgcttgcgaacctggagcacaggcaccaattcatccggagacacgctgtctccgcggtttccgcgatctaccgcctcccgcatggtgaccagctcatccccgacgcgccggagctcgtcgagcggttcctcgcatctgagcaggacgcgtccgcgcggaggaacgcattccttatgctctgtgcctgcgcacaggaccgcgccgtcgcctacctgctctccaacgccgatcgagtcgctgagtggcccgatctgctgcagatggccgttgtggatcttatccgcaaggtctgccgatcacaaaaccgtgccaacaagggaaggtatatcaccatcattacgtcgctgctctccgcaaccagcactgcggttgtttatgaatgtgctggtgccctggtgtcactctcttcggcacccacggctgtgcgggccgctgccaacacctactgccagttgctctcgtcgcagagtgacaacaatgtgaagctcattcttctggatcgcctcaacgagctgcgaaccctgcaccgggatgtcatggtgggtgtggtgatggacgtgcttcgtgcactggccagccccaatttagatgtcaagagaaaggttctcgatttagttctcgatttgctcaccccgcgtaatgttgaggaggtggtgctttatctcaagaaggaggtggtcaagacgcaggctggagacctcgagaagggtggcgagtaccgccagatgctggtgcaggccatccatgcttgcgctgttgagtacccagaggtggctggatctgtagtgcacctcctcatggactttcttggtgataccaatgttgctgcagctgttgatgttgtgctgtttgtacgtgagatcattgagaccaatccgaagctgcgtgtttccatgatccagaggcttattgatacattctatcagattcgggcatcccgtgtctgctcatgtgctctctggatccttggggagtactccctctctctatcagaggttgaaagcaccattgctaccattaaacaatgtcttggtgatctgccattctacactgtctctgatgaaggggaggtaactgattccaccaattcagcccaggcggtggtgaacactgtcactgtatcttccaggaggcctgttgttcttgcggatggcacttatgccacacagagcgccgctaccgagaccatttcagccccatcagttgctcatgggtcattagcatctaccctgaacctcagatcactcattttgtcaggtgatttcttcctggctgctgttgttgcatgtaccctgaccaagcttgtgttgaggctggaagaagtgcagccatccaaggttgaatcaaacaaagcttgcactggagcattgctgatcatgacatcgattctgcagctgggccagtcttcttaccttccccacccgattgataatgattcatatgacagaattgtgctgtgtttgagattgctttgcaatactggtgatgatgtcaggaagatttggttgcattcatgcagacagagctttgcgaaaatgcttgctgagaagcagttcagggagacagaggagatgaaggcaaaggcacagatctctcatgcccagccagatgatcttattgatttttaccacctgaagagcaggaagggcatgagccagcttgagttggaagatgaggtgcacgatgatttgaaggctgcaactggtgggtttactaaggatgcagatgatgcaaacaagctcaaccgcattcttcagttgactgggttcagcgatcctgtgtatgctgaagcatttgtaacagttcaccattatgacattgtacttgatgttactgtcattaaccgcacaaaggagacacttcagaacttgtgcttggaattggctacaatgggagacctcaaacttgttgatcgccctcagaactacaccttggctcctgagtctagcaaacagatccgtgctaatatcaaggtttcatcaacagagacgggggttatatttggcaacatagtttacgagacttcaaatgtgatggaacgatcagtggttgtcctaaatgatattcacatcgacatcatggattacatctcacctgctacgtgtgcagatgttactttccggaacatgtgggcagaatttgaatgggaaaataaggtggctgtgaatactgtgattcaggatgagaaggaattcttgaatcacattatcaagtcaacgaacatgaaatgtctgacaccaccgtctgcactggatggggaatgtggtttccttgctgctaacctttatgcaaagagtgtgtttggcgaggacgctttggtgaacatcagcattgagaagcaacatgacggcaagctcagtggctacattcgaataaggagcaagacccagggaattgcactcagcttaggggacaagatcactctcaagcagaaaggtggcagttaactgtgacaagtaatcgcagttgtatcatcatttttcgcatttaggaaatccacgtgccagagagagaccagtgccgtggcattgaactgagtataaatgcttttttgtacaaaaggatcgatcaaggagagagataagaggacagttatgaggaagtcacgaagttgtcggtcgaagatatatgttgctgtagtaacgaagctgttccaaacttccttgaaatagttgtgaagtttatgttgatttctcgacaggtagttcaattgtgatcttgtactactattatgaatccctcttgttttaatgttttatttgcctttattttagttgtctggacttggaaacagaagcttggaggcggtgttgtcacgttatttttgtagagatgaattggagctcattttctgttgcatatagatttgccaattgtgttagggtacttttatggtgtttatttaagaaatgaggtagt

SEQ ID NO: 145301 - DNA, 654 bp, Zea Mays
atggaagacctcgccgcctcgctcacgccttacccgcacagcgcgccgctctacctgctctacgacgccactagtatcgccaacgccagccgcgggctagcgccgccgccgctcctgggcgacggcgacgacgacgacggcggcttcgagttcgccacgacgacgacgcttcttaacggcggcggcgcggcgctgcgcgcgtgcgccagcgacgtgtcggcggcggccttcgcgggcgagctgttcccgctgagcctgccgccgcggctgcagcggcggcccgcgcgctcggcgggggcctcggccgcgacgtcgcccacgccgtcggccgcggcgctgcaggccggatgcaggaagcacaggggcttcgacccgttcgcggcggcgctggagaaggtgcgcagcgacggcggcgcgccgcgcgcgaggtcgctctctccgccgccgctgccgctgcgtggcgctgcagcacaaacggacagcagcgagtcgcgcgccgcggcgaggaagggcggccgcggtatcaggcacctgctgtgcagggccttgatggccagcaccgctgcggcgcccaaggccctgtggccgcgtaggaaagacggcggcgtgtcttaccgtacaggtctgctggtctgcctcggatatggcgtgtga

SEQ ID NO: 145302 - DNA, 101 bp, Zea Mays
aatttttctaaccctggtcaaacaatattcctatttttccttctaatattgagttttgagtggttttcttatttaattcaaaacttcagaaagaaatacag

SEQ ID NO: 145303 - DNA, 1446 bp, Zea Mays
gagagatgcgtgttcgtcttccttcccacccatccctgtttctagctcctcctccttccccagcgggtggccgcagcaatttgcaagcagaggaagaaagcttccgggcgtctcggcgcgaagaacagcgtcacgttctgacggaggagaacaggagaaggtctcgggtttcggccggctgcctgtatgagcgccaccatggcgtggtatccattaccgcagagcggaggcacaggcacgccgtcgggcggcggcgagctgttggacgaccagagcggcggctgggcgctctggagcttcggctcagctgacgacgaccacggcgctggcgtggtgcgcgcggagacgcacgggagttcagacgagcggacggaggagggccggcccgcgccgccgcagcagcagcagcaggcaacagacgacatcttcatgagccagttctcggacgaggaggtgaggaagatggacgacgccccgttcgaggcgctgggcatgttcccggactccatgcaccagctgctgtcctacgagaacatgctgagcggcggggcgctgctgagctgctgcagctcggaggacctgctcctgaacgccacgctgggcgtggacgccatggacacctgcggcttccctctcttcagccacgacctgcagctgcagagcgcggcgccggatctcacgctcacgcctgaggaccaggtactggtttgcgcaagtgacgtgtggtgctgctctcgactcgatcacgcacggcactgctctgatgagccgagccctgggtgttcgttccgttggtgccaggatggggcgagctttgctgcgacgaaaaggagcaggtcatccgtcgcggatgaagggggcttcctcttccaagcgctggtgctccgggagctcgaggacgtcgtgttccagctgaccaagcggacgcgggtatgcttccgggacgccttcttcaggctggccgagagttcgagtgccaagtgcggcgctgcgaacggaacgccgccgccttcctctgcaactgcaactgcaaccggcggtaggatctcaacaccagggccaggccgcccggaacgggagacgaacgccatcgacaggacggtggcggacctcaccatgcgccccgctgtcctcgcgagccgctgccccgccgacggcgactcaggggcggaggcgcactccgcaaccaccgaccggcacgacgacggcgtagaaagggcaccgcgcgactgatccgtcttttttttgccggctactgctacgattcgttcggccatgttgggcgcagagagagagagagatgtacatatatatgatgaagagaaccggctgtcgtttatgcatttctacggaacttcgatatagtgaagtcactgtctgatgcagctgaacactggcaccgtttatacagtggtatttggaactggggtacacgactgttattaa

SEQ ID NO: 145304 - DNA, 1349 bp, Zea Mays
gagagatgcgtgttcgtcttccttcccacccatccctgtttctagctcctcctccttccccagcgggtggccgcagcaatttgcaagcagaggaagaaagcttccgggcgtctcggcgcgaagaacagcgtcacgttctgacggaggagaacaggagaaggtctcgggtttcggccggctgcctgtatgagcgccaccatggcgtggtatccattaccgcagagcggaggcacaggcacgccgtcgggcggcggcgagctgttggacgaccagagcggcggctgggcgctctggagcttcggctcagctgacgacgaccacggcgctggcgtggtgcgcgcggagacgcacgggagttcagacgagcggacggaggagggccggcccgcgccgccgcagcagcagcagcaggcaacagacgacatcttcatgagccagttctcggacgaggaggtgaggaagatggacgacgccccgttcgaggcgctgggcatgttcccggactccatgcaccagctgctgtcctacgagaacatgctgagcggcggggcgctgctgagctgctgcagctcggaggacctgctcctgaacgccacgctgggcgtggacgccatggacacctgcggcttccctctcttcagccacgacctgcagctgcagagcgcggcgccggatctcacgctcacgcctgaggaccaggatggggcgagctttgctgcgacgaaaaggagcaggtcatccgtcgcggatgaagggggcttcctcttccaagcgctggtgctccgggagctcgaggacgtcgtgttccagctgaccaagcggacgcgggtatgcttccgggacgccttcttcaggctggccgagagttcgagtgccaagtgcggcgctgcgaacggaacgccgccgccttcctctgcaactgcaactgcaaccggcggtaggatctcaacaccagggccaggccgcccggaacgggagacgaacgccatcgacaggacggtggcggacctcaccatgcgccccgctgtcctcgcgagccgctgccccgccgacggcgactcaggggcggaggcgcactccgcaaccaccgaccggcacgacgacggcgtagaaagggcaccgcgcgactgatccgtcttttttttgccggctactgctacgattcgttcggccatgttgggcgcagagagagagagagatgtacatatatatgatgaagagaaccggctgtcgtttatgcatttctacggaacttcgatatagtgaagtcactgtctgatgcagctgaacactggcaccgtttatacagtggtatttggaactggggtacacgactgttattaattatt

SEQ ID NO: 145305 - DNA, 89 bp, Zea Mays
ggatctcttggagatgctctaagagaaggagaccccaacaacccgaagttgaggccgtttcaaacggcacagactcactcggccacccc

SEQ ID NO: 145306 - DNA, 1628 bp, Zea Mays
atggccagcgtcggcgacgacgcgccgctgctcggcggcggcgggaaggcggccgtgtggcgcgagcgctgccccgggtgcaggcagcagaggagggtgcaggccagtgacgggatcccttacgcggacttcctctacgtctggatcgcctgcctctgcgcctctctgccggtccagtcattgtttccttatgtatacttcatgatcagggacttgaaggtggcaaaagaagagcaagacattggattctatgctggttttgttggggctacctatttcctcggaagaaccatcagtgccgtgccatggggcatgtttgccgacaagtatggaaggaagccatgcatcgtgatcagcatcctctcagtgattgtgttcaacacactttttggacttagcacaacttactggatggcaattgtaactagaggactacttgggttgctatgtggcatactaggacccatcaaggcttatgcttcagaagtctgcaggaaagaacaccaagccctgggaatatctcttgttacatcttcacgagcgatagctcttgttattgggccagctcttggcggctttcttgcacagcctgcacaaaagtacccaaatcttttctccgaagagtccatatttgggaggtttccatactttcttccttgtttcataatatcattgctagcagcaggatcatgtatcgcatgcatttggcttccggaaacgctacactttcatgatgatgacaaagtagaagtttttgaagaactggaggcacaagttggtggctccgaatctacaacaaatctgctaaagaattggcaactgatgtcagcaatgatcctctactgtatcttttctctgcatgacacagcttatatggagatattttcactctgggctgtgagcagtacaaaattccggggccttagcctcacatcccaggatgtcggtactgtgctatccttctcaggttttggagtactcgtataccaacttgctatttatccttcccttgcaaagtatttcggaccaatcaagacatttcggcctgcggcgatcctgtcgatcattctcctcgctacgtatcccttcatggccaatctacatggcctggagctcaaaatacttatcaacatggcatcagttttgaagaacatgtttgctgctactattactaccacgtgcaacattctacagaacactgcagtgacacaagagcagagaggtgttgcaaatggcatctctgttactctaatgtcaatgttcaaagctgtagctccagcagcagcaggaattctgttctcatgggctcagaagcacataagcggactgttcttaccaggagatcagatcttgtttctattgctaaacatggtgtcggtgattggtctggtgctgacgttcaagccatttttctccctaccaaattcaatgaggcattcataatttgtatatatgaagtttcttcttaatataatgatgcgcaatctcctataggttcgagagagaaaaaaatatatatcagggacactgtttgggttttgaacggcaagagttcatgtattgtgttggtccatacttttcgccttatgatgaattaagtcgttatatataaagggttctctgagttt

SEQ ID NO: 145307 - DNA, 541 bp, Zea Mays
ctctgctctccaaggcttatccggttattattatccctacctctcgcaggcgcagccgcagcaaggcaaagaatgccacacccacccatggcgctcctcctctccccgaccgtttccttcctggtctccccgtctgctccacgccctcgagctctctccgctgccgccaatgtatcctaccccggtaagctccgctgatgcgcatcctcgatccccgtcgtcttgttcgagttcaactcccttctgtatgctgtcctggctggttggggtcggttcctgggatggatgccatgccctatcagctgcaatccccgcatggaactgaggatgcgaggtatttggtcgctttgattgtgcgctggtccagccccaggcatttctgcgcctatgtgatgctgctggctcgttcggggatttcttcgaacattaatcgtgcagcagcaatttcttcgtcagcgctcccaatattctagagctgtatcaatcgggtcaggaacgctagaacaccaaattttgctccttccctgctttatttgatgcc

SEQ ID NO: 145308 - DNA, 687 bp, Zea Mays
ctctgctctccaaggcttatccggttattattatccctacctctcgcaggcgcagccgcagcaaggcaaagaatgccacacccacccatggcgctcctcctctccccgaccgtttccttcctggtctccccgtctgctccacgccctcgagctctctccgctgccgccaatgtatcctaccccgcctcaaggctgcaatgcaagaacctgtcctcccaacagagccctctgaatgtgactgctacttgtgcttctttcgctgagaagaggctggttcttgtccatgccacggcagagggttctgaggctggtgcggagcagccagaagagccgaaaccagcgaccaagatcgaggaaatgccactcgagtcgaagcagaagatgatcatggagcaaagagcgcggatgaagcttgccaagaaactgaggcagcggcgcaagcggcttctccgcaagaggaagcttaggaagaagggcaggtggccaccgtccaagatgaagaagctcaagaatgtatgaacaacgtcaacgttgactgccactctgccttggttttatgtgttgtgattgtgattgcccagcttacgaattttgctgttcagaatctgagacacggtacctacaaaatgtaactctgttttcacgtaatttgaatcttcttacagtctagcgtgctcgttgtgtctg

SEQ ID NO: 145309 - DNA, 122 bp, Zea Mays
caaatcaagaacaaattggatttacagttttcttaaaatcaagaaatcatcttctcctagctaaaataaacagcttcgctaacaactcggaacggcctcagaaaagaaccagtaataactag

SEQ ID NO: 145310 - DNA, 1920 bp, Zea Mays
gctcactcccgctgcccagtcctcgccaccgcccagtccatcgccaaccaatggcctccgccatggagctctcgctcctcaaccccgccgcgacgcaccgccaccgcggcggcctcgccggcctgcccctcgcgcggcgctccgtggtccgctttcgcgtgtccgcctccgccgcggccgcggcgccgcccaagtcctcaggccccaagaagcggggcaagacggagatccaggagacgctgctcacgccccggttctacaccacggacttcgacgagatggagcgcctcttcaacgccgagatcaacaagcagctcaaccaggcggagttcgacgccctgctacaggagttcaagacggactacaaccagacccacttcgtgcgcaaccccgagttcaaggccgccgccgacaggatggagggcccgctccgccagatcttcgtcgagttcctcgagcgctcctgcaccgccgagttctccggcttcctcctctacaaggagctcggccgcaggctcaagaaaaccaacccggtcgtggcggagatcttctcgctcatgtcaagggacgaggcgcgccatgctgggttcttgaacaaggggctgtctgacttcaacttggcgctggacctggggttcctgaccaaggctaggaagtacaccttcttcaagcccaagttcatcttctacgccacctacctgtccgagaagatcgggtactggaggtacatcaccatcttcaggcacctcaaggcgaacccggagtaccaggtgtaccccatcttcaagtacttcgagaactggtgccaggacgagaacaggcacggcgacttcttctctgccctgctcaaggctcagccgcagttcctcaatgactggaaggccaagctctggtcacggttcttctgcctctcggtgtatgtgaccatgtacctgaatgactgccaacgcactgcattctatgagggaattggtctggacaccaaagaattcgacatgcatgtgatcatcgagaccaaccgcacaacggcgaggatcttccctgctgtcctagacgtcgagaacccagagttcaagaggaagcttgacaggatggttgagatcaaccagaagatcattgccgtcggagagtccgacgaaatccccctagtgaagaacctgaagaggattcctcttgtcgcctctctggtgtccgagatcatcgccgcctacctcatgccccccatcgagtctggctcggttgatttcgccgaatttgagccccggctcgtttactgattctgtacaaagatttatccttgagttattcaccctgaaagacaagctgctggtgctttctgccgaaggggccttggatgaatggtgaaaaccgctggatggttagaggatctacatcttcttgtgttcttctgtaaaatactgagacttgggcagcataaaaagcttggcaaatttctgttgtgtggcatctccatgtaagtaacagtggactgcatcagaagcgagccttccagttttgcgacagaagggggcgtccgaagttgttgtactgctaatgaacgtcgaactagcatgataaatgtatcccagcacatttggttgattgtgtaacactagaaagccattgaacagcgtttggctatgatgctgtaccatctgaatttacatagctccttttgttttagcgatgtcattgtcatgcatcatgagtgacgtctacaaacatttgtaagaaaatcgtggtaaaagattgtcagtattagcatagtcctttcatcacaatcatattacgttcggaaactctaccatttgcgttgttaaaccacacacatttttagaaggtaaaacacgtaagtttaatgtaacaaagttgaattcatatacatggttataagacataggagtgcccgtgggcatttgt

SEQ ID NO: 145311 - DNA, 2113 bp, Zea Mays
gctcactcccgctgcccagtcctcgccaccgcccagtccatcgccaaccaatggcctccgccatggagctctcgctcctcaaccccgccgcgacgcaccgccaccgcggcggcctcgccggcctgcccctcgcgcggcgctccgtggtccgctttcgcgtgtccgcctccgccgcggccgcggcgccgcccaagtcctcaggccccaagaagcggggcaagacggagatccaggagacgctgctcacgccccggttctacaccacggacttcgacgagatggagcgcctcttcaacgccgagatcaacaagcagctcaaccaggcggagttcgacgccctgctacaggagttcaagacggactacaaccagacccacttcgtgcgcaaccccgagttcaaggccgccgccgacaggatggagggcccgctccgccagatcttcgtcgagttcctcgagcgctcctgcaccgccgagttctccggcttcctcctctacaaggagctcggccgcaggctcaagaaaaccaacccggtcgtggcggagatcttctcgctcatgtcaagggacgaggcgcgccatgctgggttcttgaacaaggggctgtctgacttcaacttggcgctggacctggggttcctgaccaaggctaggaagtacaccttcttcaagcccaagttcatcttctacgccacctacctgtccgagaagatcgggtactggaggtacatcaccatcttcaggcacctcaaggcgaacccggagtaccaggtgtaccccatcttcaagtacttcgagaactggtgccaggacgagaacaggcacggcgacttcttctctgccctgctcaaggctcagccgcagttcctcaatgactggaaggccaagctctggtcacggttcttctgcctctcggtgtatgtgaccatgtacctgaatgactgccaacgcactgcattctatgagggaattggtctggacaccaaagaattcgacatgcatgtgatcatcgaggtataaatgagctgcattttgtcatttcatttccacctgtttgccatacatagttcatacttttctgaacaatgtcattacaaaaggttaggaattcacatgaaatttcttagagttcgccgtcgacgcttgggagaatctatgatttgcttctagaaatgttggcgtgaattaaatatgcgtacccatgcagaccaaccgcacaacggcgaggatcttccctgctgtcctagacgtcgagaacccagagttcaagaggaagcttgacaggatggttgagatcaaccagaagatcattgccgtcggagagtccgacgaaatccccctagtgaagaacctgaagaggattcctcttgtcgcctctctggtgtccgagatcatcgccgcctacctcatgccccccatcgagtctggctcggttgatttcgccgaatttgagccccggctcgtttactgattctgtacaaagatttatccttgagttattcaccctgaaagacaagctgctggtgctttctgccgaaggggccttggatgaatggtgaaaaccgctggatggttagaggatctacatcttcttgtgttcttctgtaaaatactgagacttgggcagcataaaaagcttggcaaatttctgttgtgtggcatctccatgtaagtaacagtggactgcatcagaagcgagccttccagttttgcgacagaagggggcgtccgaagttgttgtactgctaatgaacgtcgaactagcatgataaatgtatcccagcacatttggttgattgtgtaacactagaaagccattgaacagcgtttggctatgatgctgtaccatctgaatttacatagctccttttgttttagcgatgtcattgtcatgcatcatgagtgacgtctacaaacatttgtaagaaaatcgtggtaaaagattgtcagtattagcatagtcctttcatcacaatcatattacgttcggaaactctaccatttgcgttgttaaaccacacacatttttagaaggtaaaacacgtaagtttaatgtaacaaagttgaattcatatacatggttataagacataggagtgcccgtgggcatttgt

SEQ ID NO: 145312 - DNA, 1765 bp, Zea Mays
gagccggggtctggtttccagacctagcccaaactgaaaaaattgttcttgcttcccgatttccagtcctctgtcgtttgttgtcccatactcccatctgttctccgcgaggcgcaacgaaggcacaaaacccttacctccatcaaaccctagcgctcgtgtccccgtttagctcccgtcgccgctaccatgggctcagatgcggatatggaggactacgggttcgagtactcagacgaggagccggaggagcaggatgtcgatatcgagaaccagtattacaactctaaaggtttggttgagacagacccagagggtgcacttgctggttttgatcaagtagtcagtatggagcctgaaaaagctgaatggggatttaaagctcttaaacaaactgtcaagctttactataagctgggaaaatacaaagaaatgatggatgcctatagagagatgttaacatacataaaatctgctgtcacccggaactacagtgagaaatgtataaacaacataatggattttgtttctggatcagctagtcagaactttagtcttctgcaagagttctaccagacaacactgaaagcgcttgaagaagcgaaaaatgagagattatggttcaagacaaacttgaagctctgcaaaatttggtttgatatgggcgaatatggtcgcatgagcaagatattgaaggagctgcataaatcttgccaaagggaagatggttctgatgatcaaaagaaaggcacacagcttttggaagtctatgctattgaaatccaaatgtacactgaaacaaagaataataaaaagcttaaggaattgtatcaaagggctctttccatcaaatcggcgataccacatccaagaatcatgggtataattcgtgagtgtggtgggaagatgcatatggctgagaggcagtgggatgaggctgccactgatttctttgaagctttcaagaactatgatgaagcaggcaatccgcggagaattcaatgcctaaaatatcttgtccttgccaatatgttgatggagtctgaagtgaatccttttgatggacaagaggccaagccgtacaagaacgatagtgaaatccttgcaatgacaaacctgattgcagcgtaccagaagaacgacatcatggagtttgaaaagatcctgaagagtaatagaagaacaataatggatgatccttttatccgtaactatattgaggatctgttgaagaacatcagaacccaagtgctgctcaagcttattaaaccgtatacacgaatcaggattccattcatttcgcaggaactcaatttcccggagaaggatgtggagcagctgttggtatcgctcatcctggacaaccgaatccaaggccacatagaccaggtcaacaagttgctagagcgtggagagaggtccaaggggatgaggaagtacaatgccatcgacaagtggaatactcagctcaagtccatttaccaaacattgtccaacagagtttgatgagacgaatcgtggctgctgtatgtttgcacacctagaattgttgatagcctgttttggggatttgagggcaactgcaaagagctgtatggcaacgcttgcagtagaatcttggatctgggtaaaatgagatgtccatgtaagcatttgatattagctttttcagttatattgactatgaggatgtccatgtagcgatttcgttaggactgctttcaacgtctaatctcgagaatgtcactggtgccttttactgttg

SEQ ID NO: 145313 - DNA, 1220 bp, Zea Mays
ggggtctggtttccagacctagcccaaactgaaaaaattgttcttgcttcccgatttccagtcctctgtcgtttgttgtcccatactcccatctgttctccgcgaggcgcaacgaaggcacaaaacccttacctccatcaaaccctagcgctcgtgtccccgtttagctcccgtcgccgctaccatgggctcagatgcggatatggaggactacgggttcgagtactcagacgaggagccggaggagcaggatgtcgatatcgagaaccagtattacaactctaaaggtttggttgagacagacccagagggtgcacttgctggttttgatcaagtagtcagtatggagcctgaaaaagctgaatggggatttaaagctcttaaacaaactgtcaagctttactataagctgggaaaatacaaagaaatgatggatgcctatagagagatgttaacatacataaaatctgctgtcacccggaactacagtgagaaatgtataaacaacataatggattttgtttctggatcagctagtcagaactttagtcttctgcaagagttctaccagacaacactgaaagcgcttgaagaagcgaaaaatgagagattatggttcaagacaaacttgaagctctgcaaaatttggtttgatatgggcgaatatggtcgcatgagcaagatattgaaggagctgcataaatcttgccaaagggaagatggttctgatgatcaaaagaaaggcacacagcttttggaagtctatgctattgaaatccaaatgtacactgaaacaaagaataataaaaagcttaaggtatggcgtccttgtttgcccatttgcaagtgactctttggtgggtattatcttattaaattatccttgtgaattgtgatgatgtatgtttctgaaaaatcattattctatcactttattgtggctttcaattacttgatctggtcccttcttcatgtatatgtaaagtcctattgtttgagttgttagctgttatgcaattgcattatacatattttttttcctgtttcataaaaggattcttcactcttagcttaaaaagggtgcgatatatctagtacattactgttgttgactagtaagaataattgccacatgctaattgtatggttatgctgcctgaaattggatggtgttatggactgcgatggaattggggaattggagagggagttgtagttgc

SEQ ID NO: 145314 - DNA, 1709 bp, Zea Mays
ttccagtcctctgtcgtttgttgtcccatactcccatctgttctccgcgaggcgcaacgaaggcacaaaacccttacctccatcaaaccctagcgctcgtgtccccgtttagctcccgtcgccgctaccatgggctcagatgcggatatggaggactacgggttcgagtactcagacgaggagccggaggagcaggatgtcgatatcgagaaccagtattacaactctaaaggtttggttgagacagacccagagggtgcacttgctggttttgatcaagtagtcagtatggagcctgaaaaagctgaatggggatttaaagctcttaaacaaactgtcaagctttactataagctgggaaaatacaaagaaatgatggatgcctatagagagatgttaacatacataaaatctgctgtcacccggaactacagtgagaaatgtataaacaacataatggattttgtttctggatcagctagtcagaactttagtcttctgcaagagttctaccagacaacactgaaagcgcttgaagaagcgaaaaatgagagattatggttcaagacaaacttgaagctctgcaaaatttggtttgatatgggcgaatatggtcgcatgagcaagatattgaaggagctgcataaatcttgccaaagggaagatggttctgatgatcaaaagaaaggcacacagcttttggaagtctatgctattgaaatccaaatgtacactgaaacaaagaataataaaaagcttaaggaattgtatcaaagggctctttccatcaaatcggcgataccacatccaagaatcatgggtataattcgtgagtgtggtgggaagatgcatatggctgagaggcagtgggatgaggctgccactgatttctttgaagctttcaagaactatgatgaagcaggcaatccgcggagaattcaatgcctaaaatatcttgtccttgccaatatgttgatggagtctgaagtgaatccttttgatggacaagaggccaagccgtacaagaacgatagtgaaatccttgcaatgacaaacctgattgcagcgtaccagaagaacgacatcatggagtttgaaaagatcctgaagagtaatagaagaacaataatggatgatccttttatccgtaactatattgaggatctgttgaagaacatcagaacccaagtgctgctcaagcttattaaaccgtatacacgaatcaggattccattcatttcgcaggaactcaatttcccggagaaggatgtggagcagctgttggtatcgctcatcctggacaaccgaatccaaggccacatagaccaggtcaacaagttgctagagcgtggagagaggtccaaggggatgaggaagtacaatgccatcgacaagtggaatactcagctcaagtccatttaccaaacattgtccaacagagtttgatgagacgaatcgtggctgctgtatgtttgcacacctagaattgttgatagcctgttttggggatttgagggcaactgcaaagagctgtatggcaacgcttgcagtagaatcttggatctgggtaaaatgagatgtccatgtaagcatttgatattagctttttcagttatattgactatgaggatgtccatgtagcgatttcgttaggactgctttcaacggttcccgccgccctcctgtttagggggcctcttggttcacaa

SEQ ID NO: 145315 - DNA, 1458 bp, Zea Mays
attttaccatcacttcgttatctttgcacttctgatgctttactctgtaatgttatctttataggggatttaaagctcttaaacaaactgtcaagctttactataagctgggaaaatacaaagaaatgatggatgcctatagagagatgttaacatacataaaatctgctgtcacccggaactacagtgagaaatgtataaacaacataatggattttgtttctggatcagctagtcagaactttagtcttctgcaagagttctaccagacaacactgaaagcgcttgaagaagcgaaaaatgagagattatggttcaagacaaacttgaagctctgcaaaatttggtttgatatgggcgaatatggtcgcatgagcaagatattgaaggagctgcataaatcttgccaaagggaagatggttctgatgatcaaaagaaaggcacacagcttttggaagtctatgctattgaaatccaaatgtacactgaaacaaagaataataaaaagcttaaggaattgtatcaaagggctctttccatcaaatcggcgataccacatccaagaatcatgggtataattcgtgagtgtggtgggaagatgcatatggctgagaggcagtgggatgaggctgccactgatttctttgaagctttcaagaactatgatgaagcaggcaatccgcggagaattcaatgcctaaaatatcttgtccttgccaatatgttgatggagtctgaagtgaatccttttgatggacaagaggccaagccgtacaagaacgatagtgaaatccttgcaatgacaaacctgattgcagcgtaccagaagaacgacatcatggagtttgaaaagatcctgaagagtaatagaagaacaataatggatgatccttttatccgtaactatattgaggatctgttgaagaacatcagaacccaagtgctgctcaagcttattaaaccgtatacacgaatcaggattccattcatttcgcaggaactcaatttcccggagaaggatgtggagcagctgttggtatcgctcatcctggacaaccgaatccaaggccacatagaccaggtcaacaagttgctagagcgtggagagaggtccaaggggatgaggaagtacaatgccatcgacaagtggaatactcagctcaagtccatttaccaaacattgtccaacagagtttgatgagacgaatcgtggctgctgtatgtttgcacacctagaattgttgatagcctgttttggggatttgagggcaactgcaaagagctgtatggcaacgcttgcagtagaatcttggatctgggtaaaatgagatgtccatgtaagcatttgatattagctttttcagttatattgactatgaggatgtccatgtagcgatttcgttaggactgctttcaacgtctaatctcgagaatgtcactggtgccttttactgttg

SEQ ID NO: 145316 - DNA, 985 bp, Zea Mays
ccgcgagtcacccaaaaatttccaggtacggctgcgtcactctcgtgcagctccccgcaaccatttcgtgttgccttgcatgctgaatctcatcgagaggtataaaagcccaacactgcggccaaagctataggtgcatctctgcccgcggccacatctctaatccttcaggcagcatccaccgatatcgtcgatgccatggatcccaacggtgtgcgcatccagatgcttacagcaggccaagacgtagaacccccctccgtccaggatgatgctacgaagaagaagccacagcagaccgacgacgccgccacgcctaaagcgccgcctgcgcggccggccctgtcaagcgcctcggacctcatgaagctcctgccgacgggcaccgtgctggcgttccaggcgctggcgccatccttcagcaaccacggcgtatgccacgcggcgaaccggtacctggtcctgtcgctcatcggcgcctgcgccgtctcgtgcgtgctcctctccttcaccgacagcctcgtcggccgcgacggcaagctctaccacggcgccgccaccttctggggcttctacccgtttaactacacggggacccgcgagcagcgggaggcggcgttcgatgacgaagacctctcccggttccgggtcacggcgctggacttcgtgcacgccttcttctcggcgctcgtgttcctcgccgtggcgctcgccgacgccagcatccaggggtgcctgttcccggacgccgggccggacgtgcgggagctgctggtgaacctgccgctgggagcaggcttcctgtcgagcatggtgttcatgatcttccccaccaccaggaagagcatcgggtacatggacatggcgccccacgcgcagtgagacgtcgtctctccacgctaagcatttgttatagtcttgtagagcacatgtgttaactatatctcgggacaaaatgttcgtcgtcgaataaaaccttcaaagt

SEQ ID NO: 145317 - DNA, 2408 bp, Zea Mays
ctcgacttgcaatatacaacacgcttgtggcctgaagaacggaagaactcggactcgagcaccccgaagcgagccaccgccgatctgctcctcctgagtcctgaccctcctccgtgcgctgcgcaggcatgaggctcctcctcgtcggcgccctactcctatgtgccaccgcggcggtggagtccaagccgcccctcgacaccctgggcatacccccgcaagatgaggcgtactacagaggcggcgtgattaaatgcagggacggatcaggcaggttctcccgggagcagctcaacgacgacttctgcgactgccccgacggcaccgacgagcccgggacatctgcgtgccctgaggcgaagttctactgcaagaatgcaggccacactccagtcacgatcttctcatcacgagtgaatgacggcatttgtgattgctgtgatgggagtgatgaatatgacagcaatatcacctgtaagaacacttgctgggaggctggcaaagcggcaagggagaaattgaagaagaaagtcgctacatacaaaagtggtgtagttattcggaatcaggaagttgagagggcaaaagaggcttatgctaaagacgaagcagagttagcaaaattgaagggtgaagagaaaatactccaaggacttgttgacaaactcaaagagcaaaagagacttatagagaaggcagaggaagaagaacgtttaagaaaagagaaggaagagaagagaataaaagaagctgaaaagcaagctgctgatgaaaagggaacacctgatgcctctccggatgtagattctaaggaaactcatgaccatgtgcaagaagatgaaaacaaggtagccgaagagcatgatgtacatgcaacggaccatgataatcatgcaacagaccatgataatcatgcagcagaaagcggagcatctgttgagcagggttctgtaaacaaagatgacattagcgttgaagctggaactttagatgaattgctgcacaaggagtctgcagtacctacattagagaaggatcatagctctgacaatcctgagggtttatcaagagaagagttaggtcgcatggtagcttcacgttggactggagaaagtgtaagtgaggttagtaaagatgataagaagggacatgaagatgagcaagaaataccagaacctgcaaaagaagcacttgaagacgaattagaaattccagaacctgctgaagaaaattatgatggttatcattcagaagttgaggatgacaggcataaatatgaagatgaagagtttgatcatgagtcagaagatgaatatgttgatgaccatgatgagcatgttgagtcctataaatctgatgatgaccagaaagatttaactgagccaggacatgcatcgtggttggacaaaattcagcagactgtacagaatgttttccaaaaattcaacttttttaggacccctgtagatttgtcagaggcttctcgtgttcgtaaggagtatgacgatgccaactcaaagctttcaaaaattcagtctaagatatccaatttagctgagaagctaaaacatgattttggcaaagacaaggagttctattccttttatgatcagtgctttgagaccaaggaaggaaagtatacttacaaggtctgtgcatataagaaagcatcacaggctgaagggcacagttccaccaacctggggagatgggacaaatttgaagaatcgtacagagtaatgcacttttcaggtggagacaaatgctggaatggtcctgaccgaagcctaaaggttaggcttagatgtgggctgagcaatgagcttaatgacgttgatgagcctagcagatgcgagtatgttgctgtattgtcgacgcccgcactctgcgtcgaggagaagctgaaggagctgcaaaacaaactggatgccatgtcttcgaagcagcccgggcatgatgaactttaaacggttccggcgtggacaaagaaaatttcaccaggaagcatagattgacagttacactcataaccttaagggtggaagtcaatgggggcatatggacaggaaagggccaagctgaagaaatgggaatgtagggttcaggtcgcctacctggcaatgttagctggcatagagctgtttttttagctgaatttgattggatgttgcaatttttccaggctcatcccgagttgtttggtggaggcgactgcaaccgtgcttttctttgtggtttaacattgctctatttaattagggagagacgctaggcttttgcgtctccagcttcattgccagccattacacatttgatggaatatatagtaagaaacagtacactctgaaccatcataatttgaagatgctagttaaccccgggttgttacatgatacaagtactttgtt

SEQ ID NO: 145318 - DNA, 2397 bp, Zea Mays
acttgcaatatacaacacgcttgtggcctgaagaacggaagaactcggactcgagcaccccgaagcgagccaccgccgatctgctcctcctgagtcctgaccctcctccgtgcgctgcgcaggcatgaggctcctcctcgtcggcgccctactcctatgtgccaccgcggcggtggagtccaagccgcccctcgacaccctgggcatacccccgcaagatgaggcgtactacagaggcggcgtgattaaatgcagggacggatcaggcaggttctcccgggagcagctcaacgacgacttctgcgactgccccgacggcaccgacgagcccgggacatctgcgtgccctgaggcgaagttctactgcaagaatgcaggccacactccagtcacgatcttctcatcacgagtgaatgacggcatttgtgattgctgtgatgggagtgatgaatatgacagcaatatcacctgtaagaacacttgctgggaggctggcaaagcggcaagggagaaattgaagaagaaagtcgctacatacaaaagtggtgtagttattcggaatcaggaagttgagagggcaaaagaggcttatgctaaagacgaagcagagttagcaaaattgaagggtgaagagaaaatactccaaggacttgttgacaaactcaaagagcaaaagagacttatagagaaggcagaggaagaagaacgtttaagaaaagagaaggaagagaagagaataaaagaagctgaaaagcaagctgctgatgaaaagggaacacctgatgcctctccggatgtagattctaaggaaactcatgaccatgtgcaagaagatgaaaacaaggtagccgaagagcatgatgtacatgcaacggaccatgataatcatgcaacagaccatgataatcatgcagcagaaagcggagcatctgttgagcagcagggttctgtaaacaaagatgacattagcgttgaagctggaactttagatgaattgctgcacaaggagtctgcagtacctacattagagaaggatcatagctctgacaatcctgagggtttatcaagagaagagttaggtcgcatggtagcttcacgttggactggagaaagtgtaagtgaggttagtaaagatgataagaagggacatgaagatgagcaagaaataccagaacctgcaaaagaagcacttgaagacgaattagaaattccagaacctgctgaagaaaattatgatggttatcattcagaagttgaggatgacaggcataaatatgaagatgaagagtttgatcatgagtcagaagatgaatatgttgatgaccatgatgagcatgttgagtcctataaatctgatgatgaccagaaagatttaactgagccaggacatgcatcgtggttggacaaaattcagcagactgtacagaatgttttccaaaaattcaacttttttaggacccctgtagatttgtcagaggcttctcgtgttcgtaaggagtatgacgatgccaactcaaagctttcaaaaattcagtctaagatatccaatttagctgagaagctaaaacatgattttggcaaagacaaggagttctattccttttatgatcagtgctttgagaccaaggaaggaaagtatacttacaaggtctgtgcatataagaaagcatcacaggctgaagggcacagttccaccaacctggggagatgggacaaatttgaagaatcgtacagagtaatgcacttttcaggtggagacaaatgctggaatggtcctgaccgaagcctaaaggttaggcttagatgtgggctgagcaatgagcttaatgacgttgatgagcctagcagatgcgagtatgttgctgtattgtcgacgcccgcactctgcgtcgaggagaagctgaaggagctgcaaaacaaactggatgccatgtcttcgaagcagcccgggcatgatgaactttaaacggttccggcgtggacaaagaaaatttcaccaggaagcatagattgacagttacactcataaccttaagggtggaagtcaatgggggcatatggacaggaaagggccaagctgaagaaatgggaatgtagggttcaggtcgcctacctggcaatgttagctggcatagagctgtttttttagctgaatttgattggatgttgcaatttttccaggctcatcccgagttgtttggtggaggcgactgcaaccgtgcttttctttgtggtttaacattgctctatttaattagggagagacgctaggcttttgcgtctccagcttcattgccagccattacacatttgatggaatatatagtaagaaacagtacactctgaaccatcataatttgaagatgctagttaaccccgggttgttacatgatacaa

SEQ ID NO: 145319 - DNA, 1232 bp, Zea Mays
atgaagtcatgactcatgagtgaccaggtcacgtcacgaggagcggaacacacacactcggggttccgatggcggcggccgcaccaacacacgcgcccgtgtcctcctcagcgtgccgcgcgggattctcctctagcggtgtatccttccccaattttcgctcggcagcggcttcggcccctgggtggcggcgcagggagccgtacccggcagtctccgtagtgtcgagctccccgcagtctgtggcaggagctataaccgtcgacaccgaggttgacacattgctagacagtgtgaagtgggacagcaaagggttggctgttgccattgcacaaaatgtggatactggagccattcttatgcagggttttgctaataaagaagcccttgcaaaaactatatcaaccaggaaagccacattctttagccgttcacggtcttccttgtggacgaaaggggagacatccatgaacttcattaatgtgcatgacattttcctagactgtgaccatgactctataatataccttggaaagccagatggacctacctgccatacaggagcagaaacgtgttattatacttcagtttatgatgctctacaaagttcaaagcccaatgaaggcaggcaggttatgacaaccctatactcacttgaagatacaattagtagacgccacgaggagaaagttactgatggaggtggcaagccatcatggacgaaaaagctactccttgataaccagctactttgctcgaaaatacgtgaagaagctggtgagctaattcaaacgctgcttgagaacgaggaccaatctcgtgcagcttcggagatggctgatctgctgtaccacgctatggtgctgctcagagtcaaggatgtaaagatggaacaagtccttgaggtcctgaggaagagattttcgcagtctggtatcgaggagaaggccagtcgcaataaatcttagcgtgattggttaataatgccttgatggtggatgactctgatttgctatcggtgcggaatgtgcactattgaagaattttgtgtttgatggatcagttgtgtttttgttttctccgacaagacatctatgaaatatgtggcaggtgtcaataaagttatctcatacagcagaccgtttactcattgagctcggctagtctccgtgtgtgttttatgcacaactttttaacatatcttttacaatatggttgcttgactttaatct

SEQ ID NO: 145320 - DNA, 1823 bp, Zea Mays
gaaaaccccaaagcttcgaccctggtcggtgtcacgccgaggagagagaaattccccatcgatctcggtctcctctctcctccctctcttggggcatggatcgcgccgccgcatcgccgcccgccgtggaggaacccgtcagggccacctccgttctcgacagcctcggcgcggaggtgctggcggtcatgtccccggtctccatctgcatggccctcgtcgtgctcctcatctccctcctctcgccgccgtcctccgggtccgcggcgggttcgcccccgccagtcaccgctgccacactcgtctacctcgagtcccctaacgactccccgggccagaagctcctcggggcgcttctcgacgccgccgtcttcgttgccctcgtcgccgctgtcaccttcgtcctcgtcgcgctctattactaccgctgcacgggcttcctcaagaactacatgcgcttctccgccttcttcgtcatcttctccatgggaggcgccatcgtagccgccgtgctccgccgcctcggggccccgctcgatgcggccaccgtgctcctgctcctcttcaacggcgccgctgtcggggtcctctctgtcttcgcctccgccgttcccatcctcgtccgccaggggtacatggttgcgctcgccgccatcgtcgccgcctggctctccaggctccctgagtggaccacgtggatcatgctcgtcgcgctcgccctgtacgacctcgtcgccgtgcttgcaccccggggaccgctcaggatgcttgtggagctagcctcctccagggatgatgagctaccggcactcgtctacgaatctcggcctactgtcggtccagccactagttcttcctcttatgcttcagtcatggggtctgtggagatgcaaaccatgtcagattctggtcagatctgtggcaatcgatatgaccgggtggagcaggaggaatatgccagccacgcctccttggaaatgagggatcttggaagaggccgatcaagcgttggtgagatgaaccgaccgagaggtcctgtgcttcaaatggagaaccttgaaagggaggtaccagcgacttcagcagagctgacggcaaatcaaggtgggggttcacagcatgccatcattcaaattgaacaacctgacgaagaagagacatcacctttggtgtctgcaccctctaccaacactgcagcattggatgtggaggagcatagacaaagttcatcgtcagagcctctggattttgagatgtttgagtctaccaggggcatcaagctgggccttggtgattttgttttctacagtgttcttgttgggagagctgccatgtatgatctgatgaccgtgtatgcatgctaccttgccatcattgctgggcttggttgcacccttatcttgctttccatatgccggcacgcacttcctgcactcccaatctctattatgctgggagtgacattctacttcttgacacggttgctgatggagccatttgtggttggtgcttcaacaaatttggtgatgttctgacttttcactgatctgctgttgcatttacatgtggatgaagccctcaaccaaaagaaagttgttggtcagcaactcagcattctatgtgagagtgactaatattttgttggttacttatcgtaaactgtcatttgtatttattgctaggagtgctcaagaccatagactccgtggtagcatcatagatagatttagctcatgtcttgtagttccatcaacctaacatggtattcgagaagagctattctacattctgaataatcaagtaattgatcatccattaggcct

SEQ ID NO: 145321 - DNA, 1263 bp, Zea Mays
aattgcgtgcgcggtgcgccctcgcctgtccccgcgtccccgcccctgtctcctgaagtcgtccgcgaccgccgccatgctcccctcgccccgtgccgcatccgtcgtgatagggatccgagaacaccccatggatgtgtccgggattcgaggcctctcccgtcccttcccctcccccacccccatcggcgatgcccggatccgcgaccaccgccgtccaaccccggcctccgtctgtgaccgctccgtggtggcgcaagcgctggaggcatccacagggggctaccgacggctgggacgggttcgtgctcaccaccgacggctgggacgtccatcgggggaccttcccggcatggatggtgtcttcgcaaggaaacgacagctcgctggtgctgctgaacacccgtccgggttcggctgcggacggcgcaggcatggcggagcacctgcagctgcacctggggcaggtgagcttacggagctggtcgagtttcgctggctactgggtggcccgctggaccttcccatccgactgcagatccagcgccttcttctgcgtccgtttcggcatttgcaccagcgtcggcacgtgtgcctgcgtcgacgaattcgagccttcgaaaccctgcgagtggcagcgcgggtactttgtggacgggtgcaccaccaggtctcacccgctgagctgcaccgcagacgatagtggccgccgcccgacgacggagcaggacgactcgtttctgctcctggacaacctgcgagggctcccttacagttccatcccacagcgaagggccacggctggccgcgcttcttcacggcggccgcggcgtggggaggcatcagctggatctggtgatggatgaagagcggaggggcccgacgccgcgtcctctgctcctcgccaccggactgcctcgctttctacggcaacattattgccaagaacatttttgatgatgtactgcattccatagcagcagcattgtccgtagcagatgatggcaattcactgctagcactagctgaagcttccttaacttgagtgggaatatcaatcttaactgaaggtctgattgctcgaattggagctgccagtgattccttttggccttgggtttgcgcatccttcaactaaatcggtatggcaactgttagtgatccacaagaggctagcgttatgtatcataatttactaggacagaaatcacaggagaagttgagctcttccttggttggtattgtacatcctttacctgaaaa

SEQ ID NO: 145322 - DNA, 1462 bp, Zea Mays
cacacagacacactcacacacaacctacccagacggccagaccccgcgccgccccgccgccacccccacccccaccccaaatcagtcaaacgcgccgccgccgccatgggctcctccgtcagccaggccggggcccctcctccccatccccccacatacgcgtcgactccaccctttgcgcccgctgccgctgacgctgctgacgccgccgccgccccgccgccgaaacctcatgaggaggaggcgactgaggagaaggtggactacctcaacctcccgtgccccgtcccatatgaggagatccagcgcgaggccttcatggcgctgaagccggaccttttcgagggtatgcgcttcgatttgaccaagatgatcaccccgtacttcgctttgactcacagcgttgccatgggatccattgagatcccggcacaggggagcgaggtgatcaaggttcccacctccaattatgagtttggtgccaactttatcaatcagaggacgatgctcatggggagggtctcacatgaagggagggagaacatccgtgtcaagcatgatattacggacaacctttctttaaagataaatgctcagttgacaagtgagccccactactcccaagggatgctgaattttgattataagggcaaagattttagatctcaggttcaattcggaaacaatggtttctatggagcaaactacatccagagtgtcagcaagaacctttccttgggaactgaagccttttggcttgggcagcaaaggaagtctggagtcggtgttgttgctcgctatgacacaaagaaaatggttgcgactgcacaaattgcaaccactggaatggtcgcgcttagttatgtacagaaagtttctgaaaaggtttcccttgcatctgatttcatgtacaatcaaatgacaaaggatgtaacagcaagctttggttatgattatatgctgagacagtgtcgattgagagggaaactggataccaatggcgtaatttcttctcttttggaggagcgattgactccaggtgtcactttccagttgtctgcagagctggaccactggaagaaagattacaaatttgggtttggtatggctctcggagagtaagacgatttgagcaaattctagacacatgtacaattagtggttggcattagtcgacagggattaaaacgattctactttatctttgcatttatttgtctcccagttattcgtttagctgctatggctgtgggccgtggagacatttcgaagttttgattttactgggctcatcacttgagtagtattaaactgaaacgggaatgcgtgaatagattgcgctccaccagattaggatttctgcatgccaaactcttgatttctagtctggaaataagttacgattttattccataagataaagatacattcctctgctaagttaggtgctgtttggtctggc

SEQ ID NO: 145323 - DNA, 822 bp, Zea Mays
aatctctatataaccggcaaatcctaacgctcccaacccttccaccacgcagtcactcccgggccgccgccgccgccgcctccgcgaaaaaccctagcaggcttcgccgctatcactccaaggggcgcgaccatggtggccacaaagaagacgaagaaatccacggacaacatcaataacaagctgcagcttgttatgaagagtggcaagtacactctcggctacaagaccgtcctcaggactctcaggaactctaagtcgaagctagtgatcatcgctaacaactgcccgccccttcgtaagtctgaaattgagtactatgctatgctggccaaggtcactgtccaccacttccatggaaacaatgtcgaccttggaactgcctgtggtaaatactttcgggtctgctgcctcagcattattgatcctggtgattctgatatcatcaagactacaccgggtgagcagtaaagaagcccctgcagtagggggatcttactgcatttgttcttctgtcttgttaaacagcatttacctgctagtaaactgagttattcggaacattgtcttgaattgaatttttgctccggtgttttgacacttaaatagagctttagcttataccgttgttcaggtcgcagctgtatgttgtcactatcaaaccgtcaaacgaatgctccaccagtggaggtatctcctataataaggattcattgtttgtagtaattgtatgatatctcgggtacgatcctcttgcacgcatgaatcaatccacagatcatggtattatttattcaattcaaagatgctgcaaattgaaag

SEQ ID NO: 145324 - DNA, 795 bp, Zea Mays
ttatttttcctaactgatcttctaggtggtgtcactttacccagctcttctgtgttgtataattcctttggcattcctgcttctttctgaaattttgaagtgtgaggagattactttcttttttcgacagaaatcatcacaatgcagtttgcctatttcctgtttttctacttattaattgtcaatctgttgcaacatgcctgtaatatatcgtatttctattgatttacagcgaagctagtgatcatcgctaacaactgcccgccccttcgtaagtctgaaattgagtactatgctatgctggccaaggtcactgtccaccacttccatggaaacaatgtcgaccttggaactgcctgtggtaaatactttcgggtctgctgcctcagcattattgatcctggtgattctgatatcatcaagactacaccgggtgagcagtaaagaagcccctgcagtagggggatcttactgcatttgttcttctgtcttgttaaacagcatttacctgctagtaaactgagttattcggaacattgtcttgaattgaatttttgctccggtgttttgacacttaaatagagctttagcttataccgttgttcaggtcgcagctgtatgttgtcactatcaaaccgtcaaacgaatgctccaccagtggaggtatctcctataataaggattcattgtttgtagtaattgtatgatatctcgggtacgatcctcttgcacgcatgaatcaatccacagatcatggtattatttattcaattcaaagatgctgcaaattgaaag

SEQ ID NO: 145325 - DNA, 104 bp, Zea Mays
ctcgtggaagtcggggtatgtgatgtaatcgtgttgttttataatgtccttgtaattagtaactttgagctctatgatatcaatctgtggtataattttctata

SEQ ID NO: 145326 - DNA, 3052 bp, Zea Mays
gacgatatatacccaccctccactgaaatatccattcatttccatacactactaccattctcccaggcaaggcgaggcagggagctttccaggctccgtcgtcccgatgactgcgcagctataacctcgggggcgcggcagcatgcgtcttaacgaaggataaagacctgctaagatggccatggccatggccaggttcctctcgtggttgttcacatgcttcgcagctctcgccgtcctggaggccacggtccctgctcgttcatggcgcgctccgagtcccaccccgaggcacgaagcgaggaggttcgagcagaagacggacaggttctgggagtaccaggagcagagcaatacctgggtacaagtacgcgcgccgttcgacctcatgtcctgcatcaacggcacctgcacaaaggtaggatcgatcgggcggctggcgagggagcctggacgacacggccttcctcccgtccagagccaggaggaggaggaggaagacacgcggcgggttcagggagatggtgcagaagaagaccctgtcctgcctgtaaggaggagaatttccttgacaagaatgtcagagtcgtcagtctgggtgacagggcagagcggctccatctacgagaggttctggaacggggtggtgtgggtgattgctcctcatgagctccctgcctcggctgggtatgccaccgcaactttcattgtcaatacaactatccttgctctgtctgaagctggaaccctctaccagttgcagctaaatgagcatgcccagcctatctggacagagatggcattcaactcaagccagcagtcagcgaatcttggattaaaaacacaaagtcaagctatgcgtataagaaatgggattgtatccaatgatggaaggaaacttttcctgtctatcatgaatggatccctgcttgaggtaacagaaattcagcctctaaggtggaattaccatgggcgtcctccaggtgcagacgtgtcgtatatatctgatgctggaaatctgcggccagggaccctgttcacatgcagttccactggagacctctatgagtttgacaaagaaacaaagccatcatggaaaaagcatatatggagtgaagaactggcgaaaaatatctcattaaaatcatcggctggctttgctttgcatggtttgtcagggtctaactcagtgtctcttttcctgataagcaaggtggttatagattggcaggatggccttttagtggagcggcgcttgcatagaaggaagtggaagtgggacaaacatggagctcctacgggtcagagacttagttcaattgcagaagttcagaaggatgaacttaatgatgcgacttcaatgtttttaacgacaaccacaggaaaagtatatgagtatcagtttccaaaatatacaggtggggcccagagcaataagataagaggacaatggataaatcacatgtcccctgagcatgcaaaggttgcaagaaacgtcccaggtgtacatgttcaagtcggcagaatggtattcccactagatgatggtaggcttggggaactacattttcctgggatggggggtactgattttggtccgagtgcccaaagtaccataagaagaaaactatcaaacaagtacgagtggtccatcctagacgcaccagaaacagaaggttggaatgcagaatattgcaccgaagagcacggtccgacaaattgtattagtggagcaaagaatatagctgcagacacagaatcaaatgacttgagcaataacccaccttccaggaggcgtaaagtagaagagaagcagcactacctaaatgttaacagataccagcagagtgatgaaactgaatcatacaactttctatcaaggaccattgatcttaacttccacatgcgggtgatgcatgcagacagatcgcttttccttatagcagacaatggattgacttttgaatatctaaacagcaatggtgtttggttgtggttaagacatgaacatgttacagccatgaaaggaacactaggaagctacaatggcagtttgtatcttgtcgacgtgcatgggaacttacacattagagaaagaaatggagatgaactgttgtggattaactgcacagcgatgaagaagggaagacaggttgcaagtgggtctccatgggatggcatccctggtttattgcgcagagtgacaacagatgatgcactcttctttgtcaacaagcgaggcaggctgctacagttcacggttgcgctgcggaaattcaagtggaaggactgccacagtcctcctgacaccaagattgctttcatagtggaccaggaggtcttcagaagaaacatcatcttcgtggtaggccgcaacggtcgcctctaccagtacaacaggatcacggagctctggcacaggcactaccaatcacctcacctgttcctatcgtgctccccagggacggccatgcggccatcgccgctgtccctggccggctccctgttcatggtgtccgagcacggggggctggtggagtaccacttcagcccacaggacgggtgggagtgggtagagcacgggacgccccaccggggcgtgaccctcgtcggcgcccctggcccgtgcttcgacggctcccagctgttcgtggtcggctccgacgggcacgtgtaccggcggcacatggaggggaggacgtggaggtggacgagccacgggcacccgccgtcggagccggccgccgttgacgaacagagctgcgccacaccggacacgggcgccggcgcgcactacgccgacgggttcagggggagctgcgacgggaaggtggcagccgtgcggccggtgccgttctcggaggacgccgtggtcttcgagctgcgagatggccgggtaagcaccgatagaaagcaacctcacgcaagctgctcctgatccgcctaatgagggcagagggcttacaattgcgccacgttgcatttcatgaatcggcttgtataattcctgttgtctggtttggtttcctggcgtgcagctggcggagctgcg

SEQ ID NO: 145327 - DNA, 3118 bp, Zea Mays
cggaaagaagcccggccgggtcggaaggggagcagttctcgccttctcggggaggtcgccagcgggttgggcagaggctttgcagcttttgggtcagacgcagtgttctccaaggctcactaaatggagtctcacaatggcgaggctgatgatttgcctccaccaccccctttggctgctggtgttgaaccacttaaagccgatgaaacaaagatgccattgaaacctaggagtctggtccagaggaatggctttggcagaaaggggcagcagataaagctgataacaaaccacttcaaagtttctctcatgaaggctgaagattttttctatcattactatgtcaatttgaagtatgaagatgatacaccggttgatcggaaagggtcgggaagaaaagtgatcgaaaaactgcagcaaacttatgctgctgaacttgcaaataaagattttgcatatgatggtgagaagagcctgtttacaattggtgcccttcctcaagttaaaatggaattcactgttgtggatgaagacgtttcaactggaaagactcctgcaaatggcagtccaggcaatgatagtcctcctggaagtgacaggaaaagggtccgaaggccttacaatacaaagacatataaggttgaactatcttttgcggcaaaaatccctatgagtgcaatctcacaggctttgaggggtcaggagtcagagcacactcaggaagcaattcgagtgattgacattattctgaggcagcactcagctaagcagggttgcctattagtaaggcaatcgttcttccacaataatccttccaattttgttgacctgggtggtggtgtagtgggatgtagagggttccattctagttttcgtgcaacccagagtggactttcactcaatatcgatgtgtccaccacaatgatagtgaaacctggtcctgtcattgactttctgattgccaatcagaaagttaatgatccaagcatgattgattgggcaaaggccaagcgctcactgaagaacttaaggataaaaacaagtccggcgaaccaagaacagaagattgttggtctcagcgacaggccttgccgtgagcaattattcacactgaaacataaaaatggtgaatctgaagagatcactgtttttgattactttgtaaagaaccgtggcataaagctggaatattctggtgatcttccttgtatcaatgtgggaaaaccaaagcgtccaacttattttccagttgagttatgcagtcttcttcctttgcaacggtacactaaagcattgagcacacttcaaagatcatcactcgttgagaaatctaggcagaaaccacaagaaaggatgtctgttttgtctgatgtgctgcaaagaagcaactatgatgcagaacccatgctgaaggcttgtgggattacaattgctagaaatttcatagaagttgatggtagggtactgcagccccctaagcttaaagctgggaacggagaagacatttttacgcgcaatggcagatggaatttcaataataagaagctcattagagctagcagtgtcgagaaatgggcagtagtaaacttttctgcacgatgcaatgtccgggatcttgtccgtgatctcatcaagtgtggaggcatgaagggcattatggttgatgcaccatttgctgtatttgatgagaatccttcaatgagacggtcacctgctgtaagaagggttgaagacatgtttgaacaagtgaaaactaagcttcctggagcacccaagtttcttttgtgtgttctagcggaaagaaagaattccgatatttatgggccttggaagaagaaatgccttgctgaatttgggatcgttacacagtgtgtggcaccaactagagtcaatgatcagtatcttacaaatgtcttgttaaagattaacgcaaagttgggtggcttgaattcgttgctccaaattgaaacatccccagcaattcctctcgtatccaaggtcccaactataatcttgggtatggacgtatcacacggatctcctggacattctgatataccgtctgttgctgctgttgttagttctcgtgaatggcctcttatctcaaaatacagagcatctgtccgcacccaatcaccaaaaatggaaatgattgactcgttgtttaagccacgggaaactgatgacgatggtctgattcgggagtgtctgattgacttctacaccagttcagggaagagaaagcccgaccaagtcatcatcttcagggacggtgttagtgaaagtcagtttaatcaggtgctgaacattgagttgcaacaaatcattgaggcttgcaaatttcttgatgagaaatggaatcccaagttcacattgatcattgcccagaagaatcaccacactaaatttttcattcctggaaagccagataatgttccagctggcactgttgttgacaacaaagtctgtcatccaaggaacttcgatttctacatgtgttcacatgctggaatgattggaactaccaggccaactcactatcacatcctgcatgacgagataggcttcaatcctgatgacctgcaggagctggtgcactcgctctcttatgtgtaccaaaggagcacaacagccatatcagttgttgctcccatctgctacgcccaccttgcagccgcccaggttgggcagttcataaagttcgacgagatgtcggagacttcatctagccatggggggcatacctcggcgggcagcgtccctgtacaggagctgccccgtctgcatgagaaagtgaggagctccatgttcttctgctgagcagcagggaatgtgtcccttggttttacctttttgggtgtatggtcgggggttctgaacccatgaacttgttgcctcacttggttccagcctcaggaagaactttgtaggatgctgaatggtaggatttttaagcatcgttgcagttgtgctgggtggcacgctgcaaccattttggctagcttgttgcagcacttggtgccttcctgagaggaagtagacttggaacctggtagcacgtccttaaaccatccttttaagcgttgctggttcggcctctgagctgtgtttgtcgtgc

SEQ ID NO: 145328 - DNA, 415 bp, Zea Mays
tccaggaagctgtgccactacttccaggcacacagggttgtggtgcgccacagctagagatggcaatgggtacctgcgacctgatacctgatggatatttactctattaggatatgtatgtgggctaaatattctacccgtgggtctgttattgggcaaaaatcttcacccaatgggtaaacgggtattagaacgttccgccttcacccatacccgttaacccgtgggtataaaatacccaatataaacttagcccaagcatgaactttgactttagtcatccatcttttttactatttaacaaccttttaggccataatatcatagaaggcttaacgacaatttaatgaccatgtaatggaaaaatgtaaatgtgctatgtagtactatcctattgttactactttatccaatt

SEQ ID NO: 145329 - DNA, 330 bp, Zea Mays
atgaagctgcgtgctgtgcagaggtggcagcagcgtgatgtgctgctgctgcttgtcgctttgcttgcgcgagtcctagcaacaaggggggggcgttgcaacagcagtttcgttggctcgcgggaaatctgcggcaacagtccagcgagcgacggaacccacggaagaaggaaccagggagaggactggagtgcagcgcaggggaagttccacgagaccctggccggctgggggtggtggatgggtgaaaatgacatgggggctggctggccggctgggggtggtggatggcatgagagaacgttgatgtcagagggttgttcttgttga

SEQ ID NO: 145330 - DNA, 1991 bp, Zea Mays
agggtaaaaagagagttagcagaggatctctgatctgcctttgtcctgcagtttgtgttacaagcggttttttcttcttctgcaaacatccacccatacccatcgtcgcccttgcttggtctggtggtgcttgcaaactcgtctctcccaacccaaagcagagagtaatcaccgtaccattactactagcaacatcagcagccgaacggatgcggagctgttagtctgcaatgccacgggcaccagttcaatggtggatcgccattctcctcctctctcaggctcaggccatgttctgttctcgatgatttaactcgggctctaaagctaaactacgcgcgggcacggcttcaccgccgccggggctctcgtcctttgaccgcctccgccctcctgtacaccgccgcctggccggcccgggccggcccccccatcacgccgcgccgacgccgaggaagtcgaagaagggcagcgagaccttgtcgtcggagcgcgccgtcgccggcggcgcggagaaggcggagcgcgcgctcggtgcgaacgccgcggcgcgcggggccacgtcgtagcctgcggaggaaggaacggacggacgcacgcacgccacggcaggcggtcagttcggggggaaaaaacacgacatgggagtgagacgacgacggccgaggcccgtgccgttgtacgtaccactctggtagaagcagggggcggcggaggcgagggaaaggtcggtggtgcacgtggaggcggtctcgtcggactcgccgccgctgtgcgcgcgggtgtccgccgcggccgccgtgtactgcgtgtgggcgtcggcggcgtgcaacggcggcatgggaggggagccgccggcgtagtggtggtggtggtggaggacgacgacgggcgccaggtgcggcgccggcgccggcgccggcgagggcgaggtcgaggagggcttgcggcggcggagcgcgcccgagtgctcccgctgcctgcgcgccatgaggacgtgccagtggttcttgacggcgttgtcggtgcggcccgggaagaggcgcgcgatgagagcccacttgttgccgtacgcgcggtgcgccgccaggagccgctcctcctcctcctccgagaaggcgcgccggttgatccgcgggtccagctggttgaaccaccgcaggcggcagctcttccctgcgcgcgcggttccattccatttccatcagacgacagagagagagagggagagagagagagagagaaaggcgcgcaatcaccggccgtcaggaacacgaagcaagcaggcgcatccgcattgcggtgcgtagtggctggcattacctgatctgccgtccagcctctcggcgatgaggttccagttctggggcccaaactgagcgacgagctccttgagcttggcgtcctcggcggggcgccagtggcccctggcgcacagcttcccctggccggcgccgccgtggccacggccgtcaccgctgccctcgtcgacatcgtccacgtggtacacctcctcggcggcgtcctgatgctgctcctcctcgtggcggaacgaagcgagagccggcggcggtgcagcaccgaagaaggcggccatcttgtccgggtccgaccgaggcggcttccaggagagaagatggggaagggagacggaggggaggggaggagaagagagggaaagggacaagccttagttcttgctgctgcaaaggaaggaagggaagtgggctaatataggaggaggaggaggcggcggcgcggcggcgggctaattgatcgcaactaaacaagcacaaaataagtgcttccttgtttgagttttactaacaaattagtatcccccttctctgctctatatacagtaggtctcttgttgattgattgatggactgcgcgttgttcttgttcttgtgtcatccttgcagactgcatccagaattccagatagaaagagagaggaggagggagagaatttgcacagatttgttttt

SEQ ID NO: 145331 - DNA, 679 bp, Zea Mays
atgtttatgcaatacatgctagctagcttttttggcagtgcagatagagatagaccatcgcgtgaagatgatgcggtagttagttaaagcgtgcggcgcgcggcggcgtaccttgagccaccgcctgacagtgctccggtagccggtggcgaagacgatggcgtcgaaagggtggcggctgccgtccccgaactcgacgacgttcccgcggacgctcttgacggcggcggggagcacccggatctcgccgctcctgatcttggcgtaggtgccgacgtccacgacggggtagcccggggtggtgagcttcatggtgaagggcccgatggcggggcggcggaggccgtgccgggacgtgtcgccgaacaccacggcgcacatgagcagcaccagcttgtctatgacccacacgggcaggtacgggtacagcgtcatcgccacgttccagatctccttggtcaccaggtggagctgcatatatgcgtgattattagttactgctgatcggattgcatcgatcgttagcagtagcggctgcgcatcatgattaattgatggaaaacttggcatccattccattcctgatggaatcctatactatataacttcaaactgcattgttccccattaaagatggcaatgtgcctccatcctcaatttctggtggagaatttcttca

SEQ ID NO: 145332 - DNA, 1783 bp, Zea Mays
gaaacgaaacagcagttgagcttatttactttttcgaagaaaccacaaccaaacctcggctgctcggtggtcggtgcccaggtgcgccgattatctccatcaaagccgcgcatcccgctgcccccttactcatcctccccgctgctcgaaggagagccaaatccagagcgccgccgcgatggcctcccctgacgcggaacagccggcgccgacggaactcgagcggtggcgtgacctcgacatgctcttgtcccgccctggaaacctcgtggaggccactttcgatcccagccccggcctgcgagacctactggggagcctcgtggaggttttggttgtgggcgcgggcgggcttggctgcgagctcctcaaggacctggctctctccgggtttaagaaactgcacgtcattgatatggacaccatagacgtctccaacctcaatcgccagtttctcttcaggattgaagataaagagatagagttctacagtcagttccacataattgtcctaggtctggattcaattgaagctcgaagctacatcaattctgtggcttgtggtttcttagattatgactcaagtgacaatccactccaagagacggttaaacctatggtagatggtggaactgagggcttcaagggacacgctagagtcattatacctggaacaacaccttgctttgaatgcaacatatggctttttcctccacaggttaagttccctttatgtactctcgccgagacaccaagaactgcagctcactgcattgagtatgctcacttgatcaaatgggatgaggttcatcctggaaaaccttttgatggcgatgatgcagagcatatgcagtggatttattcagaggctttaaagagagcagagcttttcggtatttctggtgttacatattctttgacacagggtgttgtcaaaaatataatcccagccattgcatcaacgaatgcaattatatcggctgcttgtgcattggaagccttaaagcttatttctgggtgcagcaaaagtgtgtcaaactatctcacgtacaacggtctggaaggaacacacattaaagtaactgagtttgtcagagacaaagattgccttgtatgtgggcctggtacccttgttgagctggatacgtcatctactctttcagatttcatcaagatgcttgaagagcaccccaagttgcggatgtcgaaagccagcgtgacgcacgaaggtaacaacctgtacatgcagtcaccggaggtgctggagcagatgacacggccaaacctgagcatccccatgtttgagcttctcaaagaggtcccatacaccactgtccatgccacgggcatggcagagaacaacgggaaaaaagtgtcctcgttgaggaagctccgtgtggccttcaagggcatcgaagacgcctccaagatggatacgaccgtgagctcatgatgccggtcgtcgtcgtcttgttgctaatttcaagtctcccaggaaagatgaggattaacccaatgtttttggacaggttaagtgtagttttcgagcgccatattacaaattgaaatgtgcgcctgatactgttcaaacatgaagaaatttatcgtagatgatactatggttttgtgagaatctacttcttggtgtttcgaatcttgctcgacaagtaaattaaatttattgtgcgtattctgagttttggagcgtgtacgcggtggagaatgtaagatttatactagttcggacagaacgttcttactttcagtcattgtggcttatgct

SEQ ID NO: 145333 - DNA, 1876 bp, Zea Mays
gaaacgaaacagcagttgagcttatttactttttcgaagaaaccacaaccaaacctcggctgctcggtggtcggtgcccaggtgcgccgattatctccatcaaagccgcgcatcccgctgcccccttactcatcctccccgctgctcgaaggagagccaaatccagagcgccgccgcgatggcctcccctgacgcggaacagccggcgccgacggaactcgagcggtggcgtgacctcgacatgctcttgtcccgccctggaaacctcgtggaggccactttcgatcccagccccggcctgcgagacctactggggagcctcgtggaggttttggttgtgggcgcgggcgggcttggctgcgagctcctcaaggacctggctctctccgggtttaagaaactgcacgtcattgatatggacaccatagacgtctccaacctcaatcgccagtttctcttcagagttcaagatgttgggaagtccaaggctgaagtagcagcgaagagggttatggagcgagttaatggggtgaacatagttcctcatttttgcaggattgaagataaagagatagagttctacagtcagttccacataattgtcctaggtctggattcaattgaagctcgaagctacatcaattctgtggcttgtggtttcttagattatgactcaagtgacaatccactccaagagacggttaaacctatggtagatggtggaactgagggcttcaagggacacgctagagtcattatacctggaacaacaccttgctttgaatgcaacatatggctttttcctccacaggttaagttccctttatgtactctcgccgagacaccaagaactgcagctcactgcattgagtatgctcacttgatcaaatgggatgaggttcatcctggaaaaccttttgatggcgatgatgcagagcatatgcagtggatttattcagaggctttaaagagagcagagcttttcggtatttctggtgttacatattctttgacacagggtgttgtcaaaaatataatcccagccattgcatcaacgaatgcaattatatcggctgcttgtgcattggaagccttaaagcttatttctgggtgcagcaaaagtgtgtcaaactatctcacgtacaacggtctggaaggaacacacattaaagtaactgagtttgtcagagacaaagattgccttgtatgtgggcctggtacccttgttgagctggatacgtcatctactctttcagatttcatcaagatgcttgaagagcaccccaagttgcggatgtcgaaagccagcgtgacgcacgaaggtaacaacctgtacatgcagtcaccggaggtgctggagcagatgacacggccaaacctgagcatccccatgtttgagcttctcaaagaggtcccatacaccactgtccatgccacgggcatggcagagaacaacgggaaaaaagtgtcctcgttgaggaagctccgtgtggccttcaagggcatcgaagacgcctccaagatggatacgaccgtgagctcatgatgccggtcgtcgtcgtcttgttgctaatttcaagtctcccaggaaagatgaggattaacccaatgtttttggacaggttaagtgtagttttcgagcgccatattacaaattgaaatgtgcgcctgatactgttcaaacatgaagaaatttatcgtagatgatactatggttttgtgagaatctacttcttggtgtttcgaatcttgctcgacaagtaaattaaatttattgtgcgtattctgagttttggagcgtgtacgcggtggagaatgtaagatttatactagttcggacagaacgttcttactttcagtcattgtggcttatgct

SEQ ID NO: 145334 - DNA, 94 bp, Zea Mays
ctgacggttcggccctgcttgtcagggcgctttgcgcgagaggagtgctataggtcaaccttagctattagcgtgtgtgcactgtgcacaccag

SEQ ID NO: 145335 - DNA, 260 bp, Zea Mays
ggtcgcggcccatggacgggcacgagcacgacccgtttaaggcagacacgaaatggcctatatagagacacgaaatggcccatatagaggcacgaaaaggctcatatatttattaaaatcacacttcattccacacattcatgtacttgataaagaacacaaagctagaaataatgttagttatatgttttttgtagctttgaattagagtatgtgatgtaatttaatttttgttatgaacattagataatgaactgaac

SEQ ID NO: 145336 - DNA, 666 bp, Zea Mays
aacttctccggcccacaaggccacaatccaagccgaagaaccctaggcggtggcggcgcatcctgcataccccaccgtagtggcagcgagccagcgacctcgagtagcagcagaggctccgcaggggcgaaaaggtgtgaagcttccttcggagatcccagtagcagaagcaacgcaggcatcggcttgcgacaggagaggacggagatgacgcagaagcagaccctgttcaaggggcagagcaagaagaagactatccctcccaaccgccacggcaaggcgcctcatgttcgtaaaggaaagagagccgtcaagcccaccaagttcacaaaggacatggacgccgagaaggtatcctagagtgtagttaagcgtagaattagcaaacgcctgtgtctatcagcacttcttcctttgcgatataagattaagattattcgaggtatttgctctggttcagtgaaactgggtgtttggatgattcggtttaattgtgtgtgttttagctaccctagctgttgaatgggactaggaaggttgtcagctcaattctggttgccacgaccctgtttcctatcaattagcatattttgtcgttgattctttaagattgtaccaattttgaatcgtcctttaagagaatataagagggtactaaatttcaaa

SEQ ID NO: 145337 - DNA, 690 bp, Zea Mays
aacttctccggcccacaaggccacaatccaagccgaagaaccctaggcggtggcggcgcatcctgcataccccaccgtagtggcagcgagccagcgacctcgagtagcagcagaggctccgcaggggcgaaaaggtgtgaagcttccttcggagatcccagtagcagaagcaacgcaggcatcggcttgcgacaggagaggacggagatgacgcagaagcagaccctgttcaaggggcagagcaagaagaagactatccctcccaaccgccacggcaaggcgcctcatgttcgtaaaggaaagagagccgtcaagcccaccaagttcacaaaggacatggacgccgagaaggaactcaccaagttcatcaaccagtgcaacgaaataaaagctgcgaatcttgctagcaaagagggcggtgacctcaacatagtgaaggcggatggtgaggaatctaaatcaaagaaataggaagccagaaactgaaaacgagtgtgtgaaacgtgatgcgtggtaaactgttaatgcgatgtattctgctgaagaaaattcagttccgtatggctgggtagatgaacatgtttagcgcaaagtgacggtgtaactgcaaccggggtaatggcttgcaagttttgttctgtgccatctctatttctccaattattatattgatgaagtttgtgtgcaata

SEQ ID NO: 145338 - DNA, 1455 bp, Zea Mays
agccgcttccctccagtcccaagtcccaacccgaactcgcacgccaagaattctagaatctctctttaagagggatacagagtaggaaagagacagagggggcaaagagcgatggacgccgcggtgcggaaggccgcgggcgccggcatcgcgcgcgcgccggcgctggtgctagcgctggtggcggcgggggcgttcctgatctcctacaacttcttcaccatgctgttccacggcggcggcggaataggcgcggcggtgaccgctgggacgagggaccctgtggtggccatgccagcgtggatgcgcgcggcggcggacaccgaggcgcgacggcggccgttccatgtggcgctcacggccacggacgcgccctacagccggtggcagtgccgggtcatgtacttctggtacaagcggatgcaggcgcggccgggcggagaggccatgggcgggttcacgcgcgtgctgcactcggggaagcccgacgggctcatggacgagatccccaccttcgtcgtcgacccgctgcccgctggcaaggaccacggatatgtggtcctaaataggccgtgggcatttgtgcagtggcttcagaaagcaaagattgaagaagagtatatactaatggcagaaccagaccatatatttgtgaaacctctaccaaatttggcccatgacgatgacccagcagcatttcccttcttttacattacaccatcagaacatgaaaaaattatcaggaaatactatgctaaagaaagaggtcctgtcacagatatcgatccgattgggaattctcctgtgatcattaagaagacaattcttgagaagattgcccccacatggatgaatgtgtcaattcaaatgaaagaggatgaagagacagataaagtttttggatgggtgttggaaatgtatgcatacgctgttgctagcgcattgcatggagttcatcatatccttcgtaaagatttcatgatccagccaccttttgatacaaagctccagaatacatttataatccacttcacttatggatgtgactactcactaaagggtgaactgacctatggtaaagttggtgaatggcgatttgacaaaagatcattcccagataggccaccaccaagaaatcttacattgccccctcctggagtaccagaaagtgtggttactctagtgaaaatggtcaatgaagctagtgcaaaccttcctcggtgggatgatggaatataaactttggatgatgtcaattatatcttaggttcctttgatctgcccttgtatatggggaatatcaaagtatcaggtgcagtcggttgtttggtttacatccaaaatagctgcttgcacttgcacaccatacctgatagaagaagatacataattttctcattgtactttttaggaaaagaaaagaaatgaaagtaaagttagcatcgatttatcttt

SEQ ID NO: 145339 - DNA, 758 bp, Zea Mays
atgttattgattttctgaccattcatttggtgcattagcattcacagcctttacttcgcttgttactatttcggtttagtaacttcataagacctcacttcacacaatttcttttcctgtgagagcttctcagacaattcttgagaagattgcccccacatggatgaatgtgtcaattcaaatgaaagaggatgaagagacagataaagtttttggatgggtgttggaaatgtatgcatacgctgttgctagcgcattgcatggagttcatcatatccttcgtaaagatttcatgatccagccaccttttgatacaaagctccagaatacatttataatccacttcacttatggatgtgactactcactaaagggtgaactgacctatggtaaagttggtgaatggcgatttgacaaaagatcattcccagataggccaccaccaagaaatcttacattgccccctcctggagtaccagaaagtgtggttactctagtgaaaatggtcaatgaagctagtgcaaaccttcctcggtgggatgatggaatataaactttggatgatgtcaattatatcttaggttcctttgatctgcccttgtatatggggaatatcaaagtatcaggtgcagtcggttgtttggtttacatccaaaatagctgcttgcacttgcacaccatacctgatagaagaagatacataattttctcattgtactttttaggaaaagaaaagaaatgaaagtaaagttagcatc

SEQ ID NO: 145340 - DNA, 864 bp, Zea Mays
cgctacataaatgatacgtaaaaattgtatttattaattttgaaactaataaatttgaaatgtcaatattaattacattgcttgttttgttgttgtgtaattgttgtcgataacgtgacacatagtataatatcgttggcaaaatatgttttcaaatggacaagcttgcaccgtaagccagtactcttcttcgagaagccatagcctagcttcccttgcacgacaactgcatggcttctatctgaagcgtacttcctctataaataccaagtgagccttccatacttcactcaaccttgcctttacaaactccacaaccatgaatccctacttagaaaacaattttcttgtgtggttgatggaagaaatggaagaggaagaagaagagttgcagttggcgaggcacattgtgaataggaggcgacgtgcacgcaatgagcgtcgtcatggtggttcgattccagggcgtgttaggattcatcgtgatcacatgagcggcgatgcaagaatccgagcggactactttggagcgaaccccgtgtacacggatgctcaatttcgtaggaggttccgcatgcgtcgccatgtctttgagcgccttgttgatgttgtgcaacaagtggatccttattttattcagcgtccaaattgtgcgggtgagattggtctttctgctctacagaaagttgttgctgctgttcgaatccttgcttacggtattccggctgatgccgttgacgaatacgtacgcattggggaatctactgctcatgaggcattgaaacacttttgcacggccgtccaaaccacgtttgctccgtattatctccgtgcaccaaatgcagaagatatcgcatgccttct

SEQ ID NO: 145341 - DNA, 1264 bp, Zea Mays
cacacggcccccaaacggtaactagagagcagaagaaactcgcattcccattcccagccaatcgcctctcgcttttaaatcctgcgccctaccgccgcctccactcccaccgctctcaatcctcccgcctcttcctaatccgcctcctcccgctcagtcgccgccgtggaggaaggagcaactcgatcgccagtcatgacccggggagagaaccaggagtcgcagaccgggaacgtctccgccgcatctgcggctgcgccgggaccgaagccggcatcggcgggggccgggaagggcgcggagggccagtcggtggtgcggcggctgcagtcggagctgatggcgctgatgatgggcggcgacccgggcgtgtcggcgttccccgagggggacaacatgctccactgggtgggcaccatcgcgggatccgccgggacggcctacgagggcacctcctaccgcctcgcgctggccttcaccgccgagtacccgtacaagccgcccaaggtgcggttcgacaccccctgcttccaccccaacgtcgacgtgcacggcaacatctgcctggacatcctccaggacaagtggtcctccgcctacgacgtgcgcaccatcctcctctccatccagagcctgctcggaggtaacggatcgctactgattgctagattccttcgtttgttcggtcggtccatggatctcgtgcgtcgccttcggttctcaccgacggattatgatttgttcagagccgaacaacgactcgccgctcaacacgcaggcggcggcgctttgggcgaaccaggaaggtacgcgattcgacatcacgcttcgcgtctcgttctgtctgaatctcgttccctatcgttctgaatctcgctttttctcgtttcctctcgttcttcgctgttcagagttcaggaagatggtggagaagctctacaaggccgccgcgtagaggacagcacacggcgcagatgccgactcaggttcttcaagcaccgatctcacttggatcgattgacgtggatggttttgttgggttgggttcccagtctggtgctgtagcggtgtagcaggaacgcgtgggtagccttgagcctggcgattctgtaattgtcctttgagttctgaaatgttaagagattcatttttacatgactttttgttttttcatttttacactctggatatggacgggactagttgaatttaggaagatcgtatgatctcgaaaatgttcagtaactgcatcaacacaatgttc

SEQ ID NO: 145342 - DNA, 1219 bp, Zea Mays
cacacggcccccaaacggtaactagagagcagaagaaactcgcattcccattcccagccaatcgcctctcgcttttaaatcctgcgccctaccgccgcctccactcccaccgctctcaatcctcccgcctcttcctaatccgcctcctcccgctcagtcgccgccgtggaggaaggagcaactcgatcgccagtcatgacccggggagagaaccaggagtcgcagaccgggaacgtctccgccgcatctgcggctgcgccgggaccgaagccggcatcggcgggggccgggaagggcgcggagggccagtcggtggtgcggcggctgcagtcggagctgatggcgctgatgatgggcggcgacccgggcgtgtcggcgttccccgagggggacaacatgctccactgggtgggcaccatcgcgggatccgccgggacggcctacgagggcacctcctaccgcctcgcgctggccttcaccgccgagtacccgtacaagccgcccaaggtgcggttcgacaccccctgcttccaccccaacgtcgacgtgcacggcaacatctgcctggacatcctccaggacaagtggtcctccgcctacgacgtgcgcaccatcctcctctccatccagagcctgctcggagagccgaacaacgactcgccgctcaacacgcaggcggcggcgctttgggcgaaccaggaagagttcaggaagatggtggagaagctctacaaggccgccgcgtagaggacagcacacggcgcagatgccgactcaggttcttcaagcaccgatctcacttggatcgattgacgtggatggttttgttgggttgggttcccagtctggtgctgtagcggtgtagcaggaacgcgtgggtagccttgagcctggcgattctgtaattgtcctttgagttctgaaatgttaagagattcatttttacatgactttttgttttttcatttttacactctggatatggacgggactagttgaatttaggaagatcgtatgatctcgaaaatgttcagtaactgcatcaacacaatgttcaaatgaccttcgtccttgttgccgactgggaaggaaaagccacctcgtttcctcttctaacggcgcagtgttgctcggatgatgtatcaaatggaccctatagccaaactacgaatggtgttttgaattgggattttttttataaagacaatcatttttttct

SEQ ID NO: 145343 - DNA, 594 bp, Zea Mays
atggcaagtgggcccgtgccaaatgcaccacgacaggagcccaacaacccatggacgccgctccataggggacagggaaaacgaaacacagggaaagcggtttcaacagctgcggggtggaactattttactcatcctaatccgccaaccaacctggctacaaaaagtcgtactgaggcccctcaagcgatagcggtggtggatctgctcgccaccggtggcctgacgcccctccagatactccgactcgcctacgtcctccaaggcctgttcaccgagttcgtgttgcgttcgtgggacctaatggagaccgacgctgctggaatggagggcatcgacgccggcatagggggcagcgcggcggtgttcggtaccacatggatctgtggcacgacgcccaccgcggtaacatcggggagggtccatatgactgatttacttcgttcaaccattgattgcattgcagatattattctagttcttggtaatgtagcactgttcagtaatagtgtcaaaacatatttcggaccataccagaaagacacagatatgctaataagctacaaccagcaatcaagtacagcaaagcagtaa

SEQ ID NO: 145344 - DNA, 2713 bp, Zea Mays
gcccgatctatatgtacactatgagggcgtcccgggtgcaaaaatagacagtcgttgttgctgctcctccgatcttcttccctcttctcctttccttcctcccagccgcgcgcgcggagggaaggagaagaagagattagaagggcgccggaaggagaagaacacagctacattgactagccaataactaggaaaaaaacaaaattagggtcggctgggcaggccgcggcgcgcggtgggcgaggacgggagcaggcttccacgcgctcttctctctgccttcatctgatcgatcggttcaagaacacgccggaattgaagtctcgcattgcacttgcacaccgccgagagcctcgatccatgcctccgcctgcccctgccatcgccgtcgtgccgctgccgccgagccgccgccgcttaccggctgcgacggctgctactgactgatcgctctggatgtagctataggtacctctcgctcgattgacatgctgttcatataacctctaacaagcctcaagaatcaaacgcaaacaaagccgccctgccagcggctgccactggcgccggaggcagcaaccgctcgttagccaggatggcaatcgcggtcggccattttcacgacctcaagccccccgccgtgcggaaccggcactacagcctccacaccgtcgcgctgctcgacagcccgctgctcgacagggatcatagggagcacggcgccgccggagggggccacaccggcctgtccccgcggcgccggagccagtcctccccgtgcttcacgaccgtggcgcctgctgccggctcggagcacgcggaccggtccgagaacaagatgccgcgcgtggagatcgtcgcgggccgccacgcccgcggcgtgcgcgagctcatcgctggcgccgcggccgccatcacgtccgggacccggcttgtccccgcgcagaacggcctcagtggtgcgctgctgctcaacggcagccgcgctggcgagcacgtcgccgtcatcaagccgctggacgacgcggcgacggcgaacggtggcggtggtgggtatgcaagcaagaccgtgctgcgggaggtggccgccttcctcctcgaccacgacggcttcgccagcgtggagccgaccgcgctgatcaagatctcgcgccccgcgacggcgacgacgaccgtggcgtcgatccagcgcttcgtggcgcacgagtacgacgccggcgagctgggcccctcgcggttctcggtggcttccgtgcaccgagtcggcatcctggacgtccgcctcctcaacatcgatcggcacgccggcaacatcctcgtcaaggacccgccgcggggcttacagcgcgcccacggaagctcatccacgccggcgcggctcgacctcgtgccgatcgaccacgggctctgcctgccggagcagctcgacgacccgtacttcgagtggctgcactggccgcagtcctccctgcccttctccgacgacgagctggcgtacgtggcgtcgctggacccgttcaaggacgccgagacgctccgcgccgagctgccgtccctgaaggagcccgccatccggatactcaccgtctgcaccatcttcctgaagcgcgctgccgctgccgggctctgcctcgccgacatcggcgacatgatgacccgcgagttcacggctcagcaggatgggctgagcacactcgaggcgctatgcaagcaagcgcacgactccgtcctcccacacccctcgcccgacggcgacggcgacggcgtcgacgagagtacaagcgtctccggcgggcggaaacacgtgtcgttcggcgacctgagcctcgcggagtggacgtcgttcctggagatgttcgagcagctgctgccggcggcgctcgaggacaagaagtgcgctgtgctagggacgtcgtcgtcgttttgaccgtgctacgtacaagtcaatcactaccgccaccatttgcatgcatacatgcgtgagtgcgtgcgtgcgtgcgtgcttgcgtggatgcaaaataatacacgtgtgcatgccagcttgacgggtaactgggcctgcatgtgcatgcacctactagctccgtctggatgccttttgtgtgtctactacgtagggtacgaccttgtacggtggcattggcatgcatgctgttgggatgggacttgggacttggtgggagctgctgtggaacacccttccaaagaagctgacgtgtcgggcaatgccacccgtcacccgataccttgaacagcaacgactcttcccaggcgggcgtgtctccacaaatctgtcatcacatacacaacacgtacgagaagtaccctggaaattgtatctacgacagtagttcgatcagtgtggatttttccgcaatgacggccacacgccggagactacattatggtacacaataaaaccccgtgcttttcggcgggattacattagaaagcagatagagaaatgtatagttgttattgccttttggaaatacatggaggatggaaactgttcaaggtgtgtgatggcagaaaatttagcagagcatgtataaatgggagttgctgaatcacaggtgtctgattttttttctctttatatattttttagacaacaaacaacatccatctatcctaaattcaaccatcatagtttcttgaaaataaaaccaatttagtgatgaaccaattggttctgacaataagaaaagat

SEQ ID NO: 145345 - DNA, 2041 bp, Zea Mays
aatagacagtcgttgttgctgctcctccgatcttcttccctcttctcctttccttcctcccagccgcgcgcgcggagggaaggagaagaagagattagaagggcgccggaaggagaagaacacagctacattgactagccaataactaggaaaaaaacaaaattagggtcggctgggcaggccgcggcgcgcggtgggcgaggacgggagcaggcttccacgcgctcttctctctgccttcatctgatcgatcggttcaagaacacgccggaattgaagtctcgcattgcacttgcacaccgccgagagcctcgatccatgcctccgcctgcccctgccatcgccgtcgtgccgctgccgccgagccgccgccgcttaccggctgcgacggctgctactgactgatcgctctggatgtagctataggtacctctcgctcgattgacatgctgttcatataacctctaacaagcctcaagaatcaaacgcaaacaaagccgccctgccagcggctgccactggcgccggaggcagcaaccgctcgttagccaggatggcaatcgcggtcggccattttcacgacctcaagccccccgccgtgcggaaccggcactacagcctccacaccgtcgcgctgctcgacagcccgctgctcgacagggatcatagggagcacggcgccgccggagggggccacaccggcctgtccccgcggcgccggagccagtcctccccgtgcttcacgaccgtggcgcctgctgccggctcggagcacgcggaccggtccgagaacaagatgccgcgcgtggagatcgtcgcgggccgccacgcccgcggcgtgcgcgagctcatcgctggcgccgcggccgccatcacgtccgggacccggcttgtccccgcgcagaacggcctcagtggtgcgctgctgctcaacggcagccgcgctggcgagcacgtcgccgtcatcaagccgctggacgacgcggcgacggcgaacggtggcggtggtgggtatgcaagcaagaccgtgctgcgggaggtggccgccttcctcctcgaccacgacggcttcgccagcgtggagccgaccgcgctgatcaagatctcgcgccccgcgacggcgacgacgaccgtggcgtcgatccagcgcttcgtggcgcacgagtacgacgccggcgagctgggcccctcgcggttctcggtggcttccgtgcaccgagtcggcatcctggacgtccgcctcctcaacatcgatcggcacgccggcaacatcctcgtcaaggacccgccgcggggcttacagcgcgcccacggaagctcatccacgccggcgcggctcgacctcgtgccgatcgaccacgggctctgcctgccggagcagctcgacgacccgtacttcgagtggctgcactggccgcagtcctccctgcccttctccgacgacgagctggcgtacgtggcgtcgctggacccgttcaaggacgccgagacgctccgcgccgagctgccgtccctgaaggagcccgccatccggatactcaccgtctgcaccatcttcctgaagcgcgctgccgctgccgggctctgcctcgccgacatcggcgacatgatgacccgcgagttcacggctcagcaggatgggctgagcacactcgaggcgctatgcaagcaagcgcacgactccgtcctcccacacccctcgcccgacggcgacggcgacggcgtcgacgagagtacaagcgtctccggcgggcggaaacacgtgtcgttcggcgacctgagcctcgcggagtggacgtcgttcctggagatgttcgagcagctgctgccggcggcgctcgaggacaagaagtgcgctgtgctagggacgtcgtcgtcgttttgaccgtgctacgtacaagtcaatcactaccgccaccatttgcatgcatacatgcgtgagtgcgtgcgtgcgtgcgtgcttgcgtggatgcaaaataatacacgtgtgcatgccagcttgacgggtaactgggcctgcatgtgcatgcacctactagct

SEQ ID NO: 145346 - DNA, 1254 bp, Zea Mays
gcatctccgctggtccacgcgtccgctcacgtgtccccgcaaccgcccttgatggcttaaaacgctgacggcctgaccccacccgttcccctcccacgaagcaaagcaaagccaaagcaatctcaagtgaatcaaaccgccagacttcgcagtcctcctccccactaccagagcatgcgcgttgccgcgacccgagccgccgccgccgctcaccctccgagcgccttcctgctcctcctgttactcctcggttgcgcgtccctcgcgatcggaggagcagccatggccggccacgtcctcggcggcgtgaaggagaacccagccgcggccaacagcgccgagtccgacgggctcggccgcttcgccgtcgatgagcacaacaggcgcgagaacgcgctgctggagttcgtgcgcgtggtggaggccaaggagcaggtggtggccggcacgctgcaccacctcacgctcgaggccgtcgaggccgggaggaagaagctctacgaggccaaggtctgggtcaagccatggctcgacttcaaggagctccaggaattcagccacaagggggacgccaccgccttcaccaacgccgacctcggcgccaagcaaggtggacatgagcctggttggcgtgaggttccagtagaggatcctgtggtcaaagatgctgcacaccatgctgtgaaatcgatccaagagaggtccaactccctgtttccctacgaacttctcgagatccttcgtgcccatgcacaggttagtttctgcaaaatggatcttaagacccccaagccctttcccaaatattgccagttatggatcaaggttcacgctacttttttctttgagtaggttgtggaagactttgcaaaatttgacattctgatgaaactgaagagaggcagcaaggaggagaagatcaaagccgaggtccataagagcctggaaggggcctttgtgctaaaccagcatcagccggcggagcatgatgagtcgagcagccagtgaactgacgtaactgtgtgagctgtagtagtaacgtacttcgtgttacgtagaagaataaggagaaaacgaccaatccggttttatctggatgtcatgtatggtcgacggtcgttgctggcttggcttccgaacgcagcaggcatactggtgctggaagacggtacctgctgtcgcacttgccgttataataggcattggaacttgtcgatttcgggagctgatctgtttgtaccgtattgtttattt

SEQ ID NO: 145347 - DNA, 1287 bp, Zea Mays
gcatctccgctggtccacgcgtccgctcacgtgtccccgcaaccgcccttgatggcttaaaacgctgacggcctgaccccacccgttcccctcccacgaagcaaagcaaagccaaagcaatctcaagtgaatcaaaccgccagacttcgcagtcctcctccccactaccagagcatgcgcgttgccgcgacccgagccgccgccgccgctcaccctccgagcgccttcctgctcctcctgttactcctcggttgcgcgtccctcgcgatcggaggagcagccatggccggccacgtcctcggcggcgtgaaggagaacccagccgcggccaacagcgccgagtccgacgggctcggccgcttcgccgtcgatgagcacaacaggcgcgagaacgcgctgctggagttcgtgcgcgtggtggaggccaaggagcaggtggtggccggcacgctgcaccacctcacgctcgaggccgtcgaggccgggaggaagaagctctacgaggccaaggtctgggtcaagccatggctcgacttcaaggagctccaggaattcagccacaagggggacgccaccgccttcaccaacgccgacctcggcgccaagcaaggtggacatgagcctggttggcgtgaggttccagtagaggatcctgtggtcaaagatgctgcacaccatgctgtgaaatcgatccaagagaggtccaactccctgtttccctacgaacttctcgagatccttcgtgcccatgcacaggttgtggaagactttgcaaaatttgacattctgatgaaactgaagagaggcagcaaggaggagaagatcaaagccgaggtccataagagcctggaaggggcctttgtgctaaaccagcatcagccggcggagcatgatgagtcgagcagccagtgaactgacgtaactgtgtgagctgtagtagtaacgtacttcgtgttacgtagaagaataaggagaaaacgaccaatccggttttatctggatgtcatgtatggtcgacggtcgttgctggcttggcttccgaacgcagcaggcatactggtgctggaagacggtacctgctgtcgcacttgccgttataataggcattggaacttgtcgatttcgggagctgatctgtttgtaccgtattgtttatttataatatgatggatcgtatgttgatatatggtatcccacactacccttcggttgcttatgatcatagtatgccaagttagcttaaggtgccaatgtcaccatcacatacgtatcttcaaattattctcc

SEQ ID NO: 145348 - DNA, 1668 bp, Zea Mays
cgctaatggcacgggttcgcgatttggcggcagagtgccccgacggcgggaggtattgtgccgccagcacggtgaactgcccactcgttgagtcgttgttgctgcggacctgcggtactctattgatccctagatttcccaacaaatatggcggaggcgggggccgactcctccaacgcggccgtcgacggcggtggcggtagcgtccaaaacgactatcccaccattgacccgacctcgttcgacgtggtgctctgcggcacgggcctcccggagtctgtcctcgccgccgcctgcgccgccgctgggaagacggtcctccacgtcgatcccagcccgttctacggctccctctactcttccatccagctctcctccctcgcctccttcttatcccgtgaggccaccccgcccacctcgaccgtggcagcggccgcctccgattggcataccgtcgtcgatctccaccgacggatcgtgtactccgaggtcgagacctcgggggcggcgccagagccggcgaggcggttcaccattgacctggtggggccccgggtgctgtactgcgccgatgaggcagtggacctcctcctgcggtcggggggcagccaccatgtggagttcaagagcgtggaggggggcagcctcctctactgggaaggctgcctctacccggtgccagactcgaggcaggccatcttcaaggacaccacactgaagctcaaggagaagaacatcctcttcaggttcttcaagcttgtgcaggcgcacattgctgccgcctcagcttctgctgatgagacgggacagggggatgcacctgccaggatacttgaggaggacctggatcttccctttgttgagttcctcaagaaacaggggcttcctcccaagatgagagcggttgtgctgtatgccattgccatggcggattacaatcaagatgtcttagcaacacgttttattatccaggtgttgcggatgccagtggttgcacttcttatggatgaggaaaagaaacattttgtaggcgctagattggtatctggtcaggatattttatgccaacaattgataattgatccgtcttataagactatcttggatgtcccatttgatggttcagattctcattttccaagaaaagttgtgagaggggtatgcataattagcaagtccgtgaaacagggatcatcaaatgttctggttattttccctccaaaatcactagaagagcagcaagttacagctgttcgacttcttcagttgagcagcaatctcgcagtatgccctcctgggatgtttatgtcatatctgtctactccctgtaccgatgtctcagtcggaaagcaatgcataaaaaaagcaatagatgctctttacagtcctcaggcttcagatggttcagaagaccatcttgagacagccagtgaaagcaccgaggatgtgaagccaacactaatctggagttgtgtgtatgttcaagagatcacacagggaacagctggtcctttattgtcatgccctatgcccgatgaatacctggactacagaaacatactgggatcaacaaaaaagttattcgcaagtatctatgctgatgaagagttcttgcctaaaaagtcagctcctgtatatgccaatgatgactctgattctgcagagtaa

SEQ ID NO: 145349 - DNA, 2017 bp, Zea Mays
ccgagtgctgcaaacacaggcacacagctgctatcggatgtcggaggccaaaacccagacgcaacgcaacccaccccctctctgtcctctccgtcctgaactcgcgcctcgcttcgtctctcccattcccacccgctgaagcttcaaggagcttctcgtctgagaccgagctaacgagctcaccggcgggcaggatgctggcggcgtccaccaaggtcggctctaggctggcctctccgcacgcctccttgtccgccggtgctgcggcggcggcactggcgagctcccccgtgctgggctctgggatgctcccaggcgccgggttcggcgagacggggagtcaccacgcggcagacgcgccgccggcgctgccttgcagttcctcgggcgattcaagggaatattatcagtggaagagactggtgaatcaaaggcagtcaacgctagatggaggcaaagtgcctgctgcattgggccaccatgtttttggtgcgggctgttcctcacggaaccaacatatctacagatatttttcatcttctcatcaagggagtatatgggccgggagcaaggttctacatgacctgccagggtatgtaaaaattgtggaagtagggccacgagatggtctacagaacgagaaggacatcgtgccaacacctgtaaaggttgagcttatacgaagattggccacatctggattacctgttgtggaggcaacgagttttgtatctccaaaatgggtacctcagttagctgatgcgaaggatgttatggaagcagttcggactatggggggtgtacgttttcctgtattgactccaaaccttaagggatttgaggcagctattgcagcaggggcaaaagaaatcgcaatatttgcatcagcttctgaaggattttccaagtcaaacataaactgcaccattaaagagagcattgcccgttataatgacgttgctcttgctgcgaaagagaaagaaattcctgtccgagggtacgtttcttgtgtggttggatgcccagtagatggaccagtgccaccttcaaacgtagcttatgtagcgaaagaactttatgacatgggctgctatgaggtttcacttggtgataccattggagtcggtactccaggcaccgtggttccgatgcttgaggcagctatctccgtcgttcccgtggagaagctcgctgtccacttccacgacacctacggccagtccctctcgaacattctcatctctcttcagatgggagtaagcgtggtggactcctccgtcgccggcctcggtggctgcccgtacgcgaagggtgcgtcggggaatgtggcgacggaggacgtagtgtacatgctcaacgggctgggcgtcaagacgggcgtcgacctgggcaaggtgatggccgccggcgagttcatctgcaggcacctgggacgccagtctgggtccaaggcagcgaccgctctgagcaaagttaccgcgaacgcctccaaactctgacaatttaccatgatcccctactgcagataattgcagtaaaattagcgcatggtaataaatagactgaggctattcaaataaatacggcctcggagctagtagtgagtagatttttatttatgtccatctagctagcaaaataagcgcgacactgccaacactgccggtctagcaagcaaaatgagcaaatatgtgaccacctctacgggaaagattcccccaacactctcagcaaacggaagtggtgcatcagttcgttccagcttccagtcatcacatgttcactcagcaaacagaaatggagcatcagttcgttccagcttccagtcattacatgtttacaacatccagatctcacctacgctatggacacaatgggaaatgtctagtgctgtaatgcattccacgaaagttgatgggttagctatgatctcaaacttacagcagattcaaagcatttttgggagggctcccaaactggccctggctctgctttctctaggtgcaaaaaaaaaaca

SEQ ID NO: 145350 - DNA, 944 bp, Zea Mays
atccaaccgccgcatgccaacctgcccccgctcgaccgcggcgctgccacatggcagcgccgaccgcctcatgacacagcctgcacggcgatcgacgatctccacggagaccatcgagatcgccttccaccccacttccgctgccgcctgccggagatgcccttcatgcacgcttcaacgccgcccccgcctccaccgccggcgccgttgccgccgaagcagaagcacggcagcggaaagcagcggccgcggccggggcgcgtcatacggtcgatgcgcgcggcgttccggtccttcccggccatgcaggctccgacctgccgcggcatgccgtcgctgcaccacctcccgggcctgcagggctccggcgtccggagccacttccacggcgcgatgcatgccacggggactctgtacggccaccgccgggcgcgcatcaccatcgcgctgcacgagagccccggtagcccgccgtgcgtgctgctggatgtcggcgtgcccacggccaagttcatccaggacgtgagcgcggcggggatggtgcgcgtcacgctcgagtgcgagaagcagcaccatacggtggacgtgggggcgcggaggctgctcgatgagccggtctggacggccgaggtgaacggcgagagcgtcgggcacgcgtcgcggcgggaggcgacagagcgggacgactgcgtgatgcggatgctccactccacgtccatgggcgccggcgtgctgccgtccgatatgtcccacccgtccgacggcgagctcacctacatgcgcgcgcatttcgaccgcctcgtcggttccaaggactccgagacgtactacatgcacaaccccgagggcggcaccgccgggccggagctcacaatcttcttcattaggacttagaatcaaattaaaccaacaacctcatctctggtatgtgttctttcctgccc

SEQ ID NO: 145351 - DNA, 1084 bp, Zea Mays
cgaccgaccacccgtttctggtctttttggatgagtgcttacccgcctgatttcaaaaaataatctgaaagtaaaaattccaaaaaatctatttttttaaaaaaaaaggatgtggcggctgatagtggaggcagtaaaaaaaagttcacgcgcatggtcggtctgcgactgcctctgaccgctgaccgcactgctcccttctcctgttctctctccccacttcgagacttcctccattcgcggtttgcctctctgcctgcctccctcagatcctccctaagattgccatggcggaccagctcaccgacgaccagatcgccgagttcaaggaagcattcagcctcttcgacaaggacggcgacggctgcatcaccaccaaggaacttggaactgtgatgcgctcgttggggcagaaccctactgaggctgagcttcaggacatgatcaacgaggttgatgctgatggcaatggaaccatcgacttccctgagtttctcaacctgatggcacgcaagatgaaggacaccgactctgaggaggagctcaaggaggccttccgcgtgttcgacaaggaccagaacggcttcatctctgctgctgagcttcgacatgtcatgaccaacctaggtgagaagctgacggacgaggaggtggatgagatgattcgtgaagccgacgtggacggtgatggccagatcaactacgaggagttcgtgaaggtgatgatggccaagtgagatgatgtgcctgttttgaagctagttcctctcttgatggtagtagctagtctagtgttggagactgactgcatttggtccgccttgttcctctcgctgcatcaatggacatatccgtttgttttctcccaagggattttaccatgtcggtaatttcgttcaaatttgtttatggttgtattaacatttgtgttatcttggtacaatgatcatgcctttcccttctaaatttaggtgttgaatttcttgtagaaatacgtggcatgcatgtgcagatatatccgattttgtttggttttctcgttacttgtgctgtaattctttcgcagcattattacccaacgatt

SEQ ID NO: 145352 - DNA, 1801 bp, Zea Mays
gagagagagagagagggagaagaaaatcacaagaggaaagagagggagaagaaaatcacaagaggagggaaacagcgagtaagccactttagcgttcaatctcattgcttggtgtgttaggtttgttttctctctctacgtactgttggcattttccttgagaagacaaaatatgttctttaggggaccagagcaacagcaccatcatcatcaccctctttctctctctagattagagcaatctttctctctcaaaaaaaactgcaatgatcaactttaccacaccctcctcttcctttgatgatccttgccgcctttgcccccctctttgccctttattccctgcctctagttgctttgcttgccgctaacgaactgctttccattgctaggtcctagccccctcttccagcaacacgcaatgcccgcagccatagctgcacctgctagcctagccatgaaggagttctcgtacgaggaggtggaggcggcgacgggcgggttcgcggccaagaacctggtgggaaagggcagccacggcagcgtgtacagggccaggctgaaggaagaaggcggcaggacggccgtcgtcgccgtgaagcggccgtcgcacgcgcagggggaggccaagctcggcaacgagatcgccgtgctctcggccgccccgcgccacccgggggtgatcggcatcgtcggggtttcgtcgtcccccgccggcgccgccgcgccggggcctcggctgcctccgctgctcgtcatggagttcatgcccaacgggtcgctgcacgacctgctgcaccggtcgccgaggccgccgccgtggccgcgccgcgtggagatcgcgctggacgtggcgcgcgccgtgcgggcgctgcacgccgcggcgccgcgcgtcatccaccgggacgtgaagtccgccaacgtcctcctcggccgcgacggccgcgcccggctcgcggacttcagcctcgccgtcagcgtccaggacgacgacgaaggagaaggctcggcgtcggcggggccagcgccagcgccagccccggcgggcacgatcgggtacctggacccctgctacacggaggccgggcggctgggccccgcgagcgacgtgttcagcttcggcgtggtgctcctggagctggtgagcgggcgcagggtgatggacgtggactcgtgcccgtcgtccatcgtgtcctgggccgcgccgctgatcggcgccgggcgcgcgcgggaggtgctggacggcagggtggccgcgccgcccacggcgtgcgcggaccgcgtcctcgccgtggcggcgcggtgcgtgtcggacagcgcggagctgcggccggccatggacgaggtggtgtccgagctgcgcggcgcgctcgagagcgccgggtggcggcgccaccgcgacggcggcgtggtggagcgggtgtgcaggcgcgtcgcgtcgtggggccagcgcgcgcggcggaggagcaagaggagggtgcgggccacggccaccaaggtcgagtgcgccgagcactccggcggcggcgtagcactagcagtagcacccgatcgcgacggctcgtcgcggaacaacggcatggtgagcggcgcggcggcacactcgaaagcagaagaggacgcgttggctcgattcgagagcgaattggatctcgttttcaggtagttgattggtaaaacctttggacggatgtttactgttgcttgctactgttactgtcacagcgcgcagttaggagactgactgactgactaatctacggctgtttaatttgatcgttgttcacctcgtgcaagagac

SEQ ID NO: 145353 - DNA, 1462 bp, Zea Mays
tccggaagaaacaaatcctgttcgctcttcttgtcgagaccagaccaccgtatactggagagaaagaatcctccctcgcctccccaccccgccccacccatggcctccgccgccagcactgccgccgccgccggggccccgctgcgcctcctctcatcctcttccaaccgtatctccaagcccttccttccccgcccccaccgcctcaccctctcctcccccatctccttccagcgcctcacagcccggtccgcggcctccccttccccatccaccgccacctcgtccccgtccggctctgtcgacccggcgcaactgccccccgcgctacgcgacatcgtcggcctcttccagtccgtcccggacgcgcgcacccggtacaagcagctccttgcctatgccgcgcgcctgccgcccatggacccggcgctcaagaccgacgccaaccgcgtccggggttgcgtctcacaggtctgggtccacgccgagcccgacgagggcgacgccggccgccgcagcgtcaggttccacgccgactccgacgcgcagctcaccaagggcctcgccgcgctgctcgtgctagggctctctggcgcgcccgccgcggatgtggccagggtgcccgttgacttcatcgagctgctcgggatcaggcagagcctctctccctccaggaacagcggcctgctcaacatgctcagcctcatgaagcgcaaggcacttgagatcgccggtggtgactcaacgtcaagtcagcaatctgtccaagaggttaccagaccgcgtctagtgaacgggaaagagcctgaatttgcagctttcgaggtgcaagaaaaggaaaaggaaaggccacaggatgcagagaggcgcgacgaggatgaacaattgggtcaacttctaccacttgatgcagaagtgaatggtgctgcgggcggtgggaggaaggagaggataagggagagtttggagagggcactttctccggtagagttggagattgaagacatatcacacctccacaagggccatgctggcgtggctgggaccaatggggagacacatttcaatgtgagggtggtgtccaaggagtttgaggggaagagcttgctcaagaggcacagggctgtctatgatctcctgcaggaggagctcaagaccgggttgcacgccctgtcaatcgatgcaaagactccatctgaagtttaggtactagcttgccatgaaatatatatattcttctgtaagaacatcacttgcatgctctttttgtcatatctactcctgttccaagtatatgacgttttgacttttctagacagataacttttggtatgcatttagatatgcattatgtctggatacatagaaaaaacaatatatctagaaaagccaaagcattttataatttgtaatagagggagtatatgattgcttcaagaagttacaaaattttgattggtag

SEQ ID NO: 145354 - DNA, 1952 bp, Zea Mays
aaagaatcctccctcgcctccccaccccgccccacccatggcctccgccgccagcactgccgccgccgccggggccccgctgcgcctcctctcatcctcttccaaccgtatctccaagcccttccttccccgcccccaccgcctcaccctctcctcccccatctccttccagcgcctcacagcccggtccgcggcctccccttccccatccaccgccacctcgtccccgtccggctctgtcgacccggcgcaactgccccccgcgctacgcgacatcgtcggcctcttccagtccgtcccggacgcgcgcacccggtacaagcagctccttgcctatgccgcgcgcctgccgcccatggacccggcgctcaagaccgacgccaaccgcgtccggggttgcgtctcacaggtctgggtccacgccgagcccgacgagggcgacgccggccgccgcagcgtcaggttccacgccgactccgacgcgcagctcaccaagggcctcgccgcgctgctcgtgctagggctctctggcgcgcccgccgcggatgtggccagggtgcccgttgacttcatcgagctgctcgggatcaggcagagcctctctccctccaggaacagcggcctgctcaacatgctcagcctcatgaagcgcaaggcacttgagatcgccggtggtgactcaacgtcaagtcagcaatctgtccaagaggttaccagaccgcgtctagtgaacgggaaagagcctgaatttgcagctttcgaggtgcaagaaaaggaaaaggaaaggccacaggatgcagagaggcgcgacgaggatgaacaattgggtcaacttctaccacttgatgcagaagtgaatggtgctgcgggcggtgggaggaaggagaggataagggagagtttggagagggcactttctccggtagagttggagattgaagacatatcacacctccacaagggccatgctggcgtggctgggaccaatggggagacacatttcaatgtgagggtggtgtccaaggagtttgaggggaagagcttgctcaagaggcacagggctgtctatgatctcctgcaggaggagctcaagaccgggttgcacgccctgtcaatcgatgcaaagactccatctgaagtttagttcaaatgagccttgcgtggtgggtgactcgatggtgcctagcgtacctgacgacgaagaaaggtcgaatatccctcaaaagaggaaatccatgttttgcattgcactggatccatttattaagcgaattttgatttatatatttgaaaacaagtgaaaaaatacccaaagtaaataagttcgaacatggtaacccacatgtttcttgtatgctacaatattggcctcatggtccaatctggtagacatccaaaactagttcaaatgagcctgactgcttattgattcttacagaaggtgaatcattggattcctcacgtttgatattgatggtgggtcgctggatccattatgcctcacgctgcaatagcattctaatattcattggcattagggtttgtttggaatcaaggaatacaaaatggaataccaaacacgggaatagaaaaaaaaataacgaaggaataagatgaagtggatagtgaagagctatggtttctaaacaataggaatggatatttgaagctgtttgcattggatgaaaagaagtacaggaacatgagcaagcatagcaagaaggagagcaaagattctttcccttaggttggagtggatgttctctttcctatattttgtactaccatggttttctttcatttggaagggaactcaacattctttcattccaaacacaatgaactaattcctttcctttagaatttattccttcaaaatctcttcgaaaaatcctttgatctatataggcccttcagtgatctgatgcagtctttttaggtggcaattcaca

SEQ ID NO: 145355 - DNA, 546 bp, Zea Mays
ccatttgttgtcggtggagattttaacattattcggtattctcatgaaaagaacaaaatgggacatgttcataaacatactgatgctttcaatgaccttattcaataccatgagttacatgaggtacatatgtttggaggtggattcacctggtccaataaccagagtgatccaacacttgtgaaactggatagaattcttatcagcaaggcctgggagattatctttcctctagctaagatcaagaagtttcccagagaactctcggaccacaatcctcttatgttagtgactggtcctgaactagtccatattcaacattcctttaagtttgaaatgggttggctgagtcatcctgattttaaaaagattgttgacaatatttggagtaaaccttgcaaagccaagagtgctcttgataaaattcatcaaaaattaaaactatgtaaacaatatctgaaaggttgggattggaacatgaaggggcagaaaaagaagagaaaagtccagattcaagttgatcttggtaacttggaaaaaacttga

SEQ ID NO: 145356 - DNA, 1166 bp, Zea Mays
cgtcttcattctttctccctgcccctgccctcgcctgctgaaggaagccgcctttttggagtttggactcgggaggacagcctccgcactttccgtccgtcgcgaggaattcctgcccgggcgggcgtagagcagggcgaagcattcgttggggacgaacgtttagggccggggatcggggaacacgaggctgcgcgttggcgcaagcaagcaaattttgggtcctagcttgaaggactgccatctttttttttggttgggatggctggaaaaggaagctatgtacctccacaatatattcccttatacagcctagataccgaagaggatcgtgtccctgccgtggaagagaaccatgctacgcgccctaaactaaaccaggatccaacacaatggtcatctggcatctgtgcctgttttgatgacccccagagctgttgtattggtgcgatttgcccctgtttcctttttggaaagaatgcacaattcttgggatctggaactcttgctggatcatgcactacgcattgcatgttgtggggccttctcacaagtctatgctgtgtatttactggaggtctagtattagcagttccaggatctgccgttgcttgttatgcttgcggatatcgcagtgcactaagaacaaagtacaatcttccggaagcaccctgtggcgatttgacgacacacttattctgtcacttgtgtgctatatgccaggagtacagggagatccgtgagagaacaggcagtggctcctcaccagctcctaatgtgactccacctccagttcagacgatggatgagctttgatctttaactgatatgaatgtatgttatctgacaaactttggtgtgtggcctggtgactagtgctgcctttgcctgttggcattttgacatatttttgttcttgggctctcacaacgctgctatgttgtttgtagagttgtaaacacgttttgaactagtgaaccactgacagttcacggaagttgtaacacagttgtaccatggaactgtagtagaattaagtgtatttttttgctatttatataggtgagaggatgagaagggaaaagaaaagaaatgcgcttatcatgcagaatgtttcattgtgtttagttctatgaacaatccaatattgtggtgagtggttgttt

SEQ ID NO: 145357 - DNA, 1376 bp, Zea Mays
cgtcttcattctttctccctgcccctgccctcgcctgctgaaggaagccgcctttttggagtttggactcgggaggacagcctccgcactttccgtccgtcgcgaggaattcctgcccgggcgggcgtagagcagggcgaagcattcgttggggacgaacgtttagggccggggatcggggaacacgaggctgcgcgttggcgcaagcaagcaaattttgggtcctagcttgaaggactgccatctttttttttggttgcgtctgtttgatagaacgcatttttgccggccagctccactcgagaatttgaaggaattttaccaacgtggggagctgaattttttttctgctcctcacattttccactctccacccgcgcctgactgcagctggctgcgatccccctatctaccacctgattcatctttgtctccgtcggtgccgccctctccgccagcctgaccccagggatggctggaaaaggaagctatgtacctccacaatatattcccttatacagcctagataccgaagaggatcgtgtccctgccgtggaagagaaccatgctacgcgccctaaactaaaccaggatccaacacaatggtcatctggcatctgtgcctgttttgatgacccccagagctgttgtattggtgcgatttgcccctgtttcctttttggaaagaatgcacaattcttgggatctggaactcttgctggatcatgcactacgcattgcatgttgtggggccttctcacaagtctatgctgtgtatttactggaggtctagtattagcagttccaggatctgccgttgcttgttatgcttgcggatatcgcagtgcactaagaacaaagtacaatcttccggaagcaccctgtggcgatttgacgacacacttattctgtcacttgtgtgctatatgccaggagtacagggagatccgtgagagaacaggcagtggctcctcaccagctcctaatgtgactccacctccagttcagacgatggatgagctttgatctttaactgatatgaatgtatgttatctgacaaactttggtgtgtggcctggtgactagtgctgcctttgcctgttggcattttgacatatttttgttcttgggctctcacaacgctgctatgttgtttgtagagttgtaaacacgttttgaactagtgaaccactgacagttcacggaagttgtaacacagttgtaccatggaactgtagtagaattaagtgtatttttttgctatttatataggtgagaggatgagaagggaaaagaaaagaaatgcgcttatcatgcagaatgtttcattgtgtttagttctatgaacaatccaatattgtggtgagtggttgttt

SEQ ID NO: 145358 - DNA, 1662 bp, Zea Mays
tccacactcctccctgtctcggcttcgattccgcacttcccagttcccttcccacattcccacacccgcctgccttccttcccgtcgccttcttccccgctcctccgtgtcccactcccgtacgtgatacgccctcgggctcggagaaggaaaagcccgctctggcaccagctcctcgcatcgcatctcccctgccagggaccaggcatccctcgtcccggtctggagcagatatgggtgtcatcggaggaacacctcctgcaagctgcccaacaacccggcactgcgcagaatgggcccgaatctacttgaagtactgcttgtgcagccagaaggaaggcgctgctctggcacttggactaatcagtgtcgtaagctggggcctcgccgaggtgccacagataatgacaaattacagacacaagtcaacagaggggctctctgtcgccttccttatgacctggattgttggagatttgtttaaccttgccggttgcttcctcgaacctgcaactctgccaactcagttctacatggcactgctatataccatcacaactctgattcttactggacagacgatctactatagccacatctaccatcatcttaaactaaaaaactccagggcagctagcaagcctcaaaagcatcaataccgggatgcttcattacgcgaaaagcttttgggtgccaagggcagtgcagcatcaagaaacaatgaatcagatactacagttcttattccaagctcacctatccctgttaatatgaaattggttgaccaataccatggaagcagctccaacgctgactactactacatgtcagcaaggtccttgtccaggagtccagtgccaactgctggtatatggtccggcagtaatcgtcaatcatcaagaagtcctccacaaatgaatgatcaaaggggatctttaattggtgagatcgctccggaacattctgcaccatctactgttacaaaaaatgccctctcagtggcaccatggatgggtcttctattgggtacgtgcctcttgcacattttgattggaaacaaacatagggagatggcaagtggcactgtcataccaattggaagaaggcttttactgtttgtggatgatcatggaaattcatcgcttagccagagcagtggaagtgaaattggaagctttcttggttgggctatggcaatgatttatatgggtgggcggcttccccagattttgttaaatatgcaaagaggccacgttgaggggctgaatccattgatgtttacctttgctttactgggaaattcaacatacgtaggaagtatacttgtaaatagcttggactggtcgaaacttagaccaaatctcccgtggcttgtagaatcgggaggatgtgttttgctggattcttgtgtatcctttacagctcttctactttgagcacagtacgtttctactttataatatttgtcctagcataaatggaatgtaacaaatgtttgagaagaatattagttacagaaaaagactggcccttaggtaagtactgagtacacagtagctaatccttggccaatgaatgatcatgcctgattccttttggctgaggtcaatccatgtaaggcttattttgtctcagagaagttaaatattatagactccgacc

SEQ ID NO: 145359 - DNA, 1864 bp, Zea Mays
tccacactcctccctgtctcggcttcgattccgcacttcccagttcccttcccacattcccacacccgcctgccttccttcccgtcgccttcttccccgctcctccgtgtcccactcccgtacgtgatacgccctcgggctcggagaaggaaaagcccgctctggcaccagctcctcgcatcgcatctcccctgccagggaccaggcatccctcgtcccggtctggagcagatatgggtgtcatcggaggaacacctcctgcaagctgcccaacaacccggcactgcgcagaatgggcccgaatctacttgaagtactgcttgtgcagccagaaggaaggcgctgctctggcacttggactaatcagtgtcgtaagctggggcctcgccgaggtgccacagataatgacaaattacagacacaagtcaacagaggggctctctgtcgccttccttatgacctggattgttggagatttgtttaaccttgccggttgcttcctcgaacctgcaactctgccaactcagttctacatggcactgctatataccatcacaactctgattcttactggacagacgatctactatagccacatctaccatcatcttaaactaaaaaactccagggcagctagcaagcctcaaaagcatcaataccgggatgcttcattacgcgaaaagcttttgggtgccaagggcagtgcagcatcaagaaacaatgaatcagatactacagttcttattccaagctcacctatccctgttaatatgaaattggttgaccaataccatggaagcagctccaacgctgactactactacatgtcagcaaggtccttgtccaggagtccagtgccaactgctggtatatggtccggcagtaatcgtcaatcatcaagaagtcctccacaaatgaatgatcaaaggggatctttaattggtgagatcgctccggaacattctgcaccatctactgttacaaaaaatgccctctcagtggcaccatggatgggtcttctattgggtacgtgcctcttgcacattttgattggaaacaaacatagggagatggcaagtggcactgtcataccaattggaagaaggcttttactgtttgtggatgatcatggaaattcatcgcttagccagagcagtggaagtgaaattggaagctttcttggttgggctatggcaatgatttatatgggtgggcggcttccccagattttgttaaatatgcaaagaggccacgttgaggggctgaatccattgatgtttacctttgctttactgggaaattcaacatacgtaggaagtatacttgtaaatagcttggactggtcgaaacttagaccaaatctcccgtggcttgtagaatcgggaggatgtgttttgctggattcttgtattattcttcagttcctttatttccattatcggaaacgaagggagccttcggatgagcacgacaacgcagacaaagcctgactgatatagaaactactgtttcttcttcggctcaaagaactgaagctgaaatgggtaccgacaccgacctgcctcctacaacgggctctggatagcagcagcatcgttgttacctgaagatttggagcgtcgtttcactggttgctgcttggagggtacttctcaccgccgtcatgtcctgtggagagccttgtgaactattatttgtcttgtagtgtcaaaatgtcttgtttttttgtatttatttatatcagatatttgatgttggctggtctgcttttgttttatattcttttttgtgtgtgtgcgcgctgcagaaacttgcacgagaaatgtacattcgtcgaataaaaatgtgcttattctcgttttaa

SEQ ID NO: 145360 - DNA, 1049 bp, Zea Mays
cctaaaatgccaaatataatattttcattttgttcataattgcagctgccaactcagttctacatggcactgctatataccatcacaactctgattcttactggacagacgatctactatagccacatctaccatcatcttaaactaaaaaactccagggcagctagcaagcctcaaaagcatcaataccgggatgcttcattacgcgaaaagcttttgggtgccaagggcagtgcagcatcaagaaacaatgaatcagatactacagttcttattccaagctcacctatccctgttaatatgaaattggttgaccaataccatggaagcagctccaacgctgactactactacatgtcagcaaggtccttgtccaggagtccagtgccaactgctggtatatggtccggcagtaatcgtcaatcatcaagaagtcctccacaaatgaatgatcaaaggggatctttaattggtgagatcgctccggaacattctgcaccatctactgttacaaaaaatgccctctcagtggcaccatggatgggtcttctattgggtacgtgcctcttgcacattttgattggaaacaaacatagggagatggcaagtggcactgtcataccaattggaagaaggcttttactgtttgtggatgatcatggaaattcatcgcttagccagagcagtggaagtgaaattggaagctttcttggttgggctatggcaatgatttatatgggtgggcggcttccccagattttgttaaatatgcaaagaggccacgttgaggggctgaatccattgatgtttacctttgctttactgggaaattcaacatacgtaggaagtatacttgtaaatagcttggactggtcgaaacttagaccaaatctcccgtggcttgtagaatcgggaggatgtgttttgctggattcttgtattattcttcagttcctttatttccattatcggaaacgaagggagccttcggatgagcacgacaacgcagacaaagcctgactgatatagaaactactgtttcttcttcg

SEQ ID NO: 145361 - DNA, 1273 bp, Zea Mays
atacaaaaaaggcagacggctacccgttcgaaaaaaaaaacagcagcagccggcggcggccatagcccaggagcccggagctgtttcttcgtcgcaggaatgggcaaggacggcatccagtacgcagtggtggacgccttcacggcggagccgttcaagggcaacccagccgcggtgtgcctcctcgaggacgccgccaaggccgccgacgagcggtggatgcagtccgtcgccgccgagttcaacatctccgagaccgccttcctcctccgggaaaagtcctccgcggccggcgccgtcccgctgttccagctccgatggttcacccccgtcgctgaggtggagctctgcggccacgccacgctggcttccgcccacttcctcttcacatccgtcctcgcggagcacgagaagctcgtcgagttctcgaccaagtccgggattcttacggccaaaaaggtccctgcgccgcagagcacgggcgtgtcgggcgaggggaagctgttcattgagctggatttccccacgattgaccttgttgattgccatccttccgagctgccggcaatccccgacaccctcaacggagcctccattgtcagcgttcacaagtcaacgacggccggtgacctcattgtggagctttcatcaggaaaggaggttgctgatatcattcctaacattcatgaaattgaaaagtgttccggcagaggaattattgttacagggccagcgcctgctggatctggctacgacttcttcacgcgttttttctgcccaaaatttggaatagatgaggatcccgtttgtggcagtgcacattgtgttttagcaccttactggggtgggaagctggggaaacacaaactgatagcgtttcaagcatcccctcggagtggaatactatacctggagttagaagctacaggcaggagagtgcgaattcagggagaagcggtcagtgtgatgactggcaccctcttagcataacccctgctcaatgaacatcctatgtcttcacttcagttgtgtggcatgatttctctgcagctaggaataaattaagtctcttttcacctgtccaaaggtgttagatacactgcttccagactatgaagcagagtgtatgaggatgtttcttttgaataaatcagtgggtgttcaatgtgtgtgatatcttctgtttgtgttgatctgaattggagcaatgaactggatttatgggcaggacaaagaacatagatctgaatgaactagtagctactaaaatcaa

SEQ ID NO: 145362 - DNA, 1015 bp, Zea Mays
aaaggcagacggctacccgttcgaaaaaaaaaacagcagcagccggcggcggccatagcccaggagcccggagctgtttcttcgtcgcaggaatgggcaaggacggcatccagtacgcagtggtcagatactgctctgtactcccttggaggagcgggagcgattcttcctcctctctggatacctgacatcgtcgccgtggtcgtcgcaggtggacgccttcacggcggagccgttcaagggcaacccagccgcggtgtgcctcctcgaggacgccgccaaggccgccgacgagcggtggatgcagtccgtcgccgccgagttcaacatctccgagaccgccttcctcctccgggaaaagtcctccgcggccggcgccgtcccgctgttccagctccgatggttcacccccgtcgctgaggtggagctctgcggccacgccacgctggcttccgcccacttcctcttcacatccgtcctcgcggagcacgagaagctcgtcgagttctcgaccaagtccgggattcttacggccaaaaaggtccctgcgccgcagagcacgggcgtgtcgggcgaggggaagctgttcattgagctggatttccccacgattgaccttgttgattgccatccttccgagctgccggcaatccccgacaccctcaacggagcctccattgtcagcgttcacaagtcaacgacggccggtgacctcattgtggagctttcatcaggaaaggaggttgctgatatcattcctaacattcatgaaattgaaaagtgttccggcagaggaattattgttacagggccagcgcctgctggatctggctacgacttcttcacgcgttttttctgcccaaaatttggaatagatgaggatcccgtttgtggcagtgcacattgtgttttagcaccttactggggtgggaagctggggaaacacaaactgatagcgtttcaagtacgtttctgcaccactttaggccttgttcggttgcatctggatagttaa

SEQ ID NO: 145363 - DNA, 1355 bp, Zea Mays
aaaggcagacggctacccgttcgaaaaaaaaaacagcagcagccggcggcggccatagcccaggagcccggagctgtttcttcgtcgcaggaatgggcaaggacggcatccagtacgcagtggtcagatactgctctgtactcccttggaggagcgggagcgattcttcctcctctctggatacctgacatcgtcgccgtggtcgtcgcaggtggacgccttcacggcggagccgttcaagggcaacccagccgcggtgtgcctcctcgaggacgccgccaaggccgccgacgagcggtggatgcagtccgtcgccgccgagttcaacatctccgagaccgccttcctcctccgggaaaagtcctccgcggccggcgccgtcccgctgttccagctccgatggttcacccccgtcgctgaggtggagctctgcggccacgccacgctggcttccgcccacttcctcttcacatccgtcctcgcggagcacgagaagctcgtcgagttctcgaccaagtccgggattcttacggccaaaaaggtccctgcgccgcagagcacgggcgtgtcgggcgaggggaagctgttcattgagctggatttccccacgattgaccttgttgattgccatccttccgagctgccggcaatccccgacaccctcaacggagcctccattgtcagcgttcacaagtcaacgacggccggtgacctcattgtggagctttcatcaggaaaggaggttgctgatatcattcctaacattcatgaaattgaaaagtgttccggcagaggaattattgttacagggccagcgcctgctggatctggctacgacttcttcacgcgttttttctgcccaaaatttggaatagatgaggatcccgtttgtggcagtgcacattgtgttttagcaccttactggggtgggaagctggggaaacacaaactgatagcgtttcaagcatcccctcggagtggaatactatacctggagttagaagctacaggcaggagagtgcgaattcagggagaagcggtcagtgtgatgactggcaccctcttagcataacccctgctcaatgaacatcctatgtcttcacttcagttgtgtggcatgatttctctgcagctaggaataaattaagtctcttttcacctgtccaaaggtgttagatacactgcttccagactatgaagcagagtgtatgaggatgtttcttttgaataaatcagtgggtgttcaatgtgtgtgatatcttctgtttgtgttgatctgaattggagcaatgaactggatttatgggcaggacaaagaacatagatctgaatgaactagtagctactaaaatcaa

SEQ ID NO: 145364 - DNA, 626 bp, Zea Mays
ttgctgtaatgaactataaatgtttgtggcttttataatgtcctggtctcctgggcctggccattcaggaattctggtttttgggttccgcacttgtgttgattttacaaatttactacagcctaaccatctaatcactatgttttgacaggatcccgtttgtggcagtgcacattgtgttttagcaccttactggggtgggaagctggggaaacacaaactgatagcgtttcaagcatcccctcggagtggaatactatacctggagttagaagctacaggcaggagagtgcgaattcagggagaagcggtcagtgtgatgactggcaccctcttagcataacccctgctcaatgaacatcctatgtcttcacttcagttgtgtggcatgatttctctgcagctaggaataaattaagtctcttttcacctgtccaaaggtgttagatacactgcttccagactatgaagcagagtgtatgaggatgtttcttttgaataaatcagtgggtgttcaatgtgtgtgatatcttctgtttgtgttgatctgaattggagcaatgaactggatttatgggcaggacaaagaacatagatctgaatgaactagtagctactaaaatcaa

SEQ ID NO: 145365 - DNA, 507 bp, Zea Mays
atcggtaagaaagcaaagcaaagcgaaggaacccaaaagcttgctggctgcatgcgggcgtgcacagaagctctcatggccacatgaggtcgtcgagcgctaccctggacaccgcgagatcctcgaacgactcctcctcaatattcctggcctcctcgcaccgtgccgtgccggcgaccgacggcgctgcgatggtcacggcgggctggaacgactcccggccgcaagctctggtggccggccatgtagcgctcggccgccagcacgctggcggcgctctccccgcccagtagctccgacagcagcagcacgatggacgccatgagatgaccgagtagcagctactaattaaagcctaagctagctagaccccgatggatctcacaatggaggcggaacaggcgctggctgctggtgactggttgctcttgcctcgtgcacacgggcggcgatggtacggagaagggagaagggtacggtggaaggccggaggcgggagatttatgt

SEQ ID NO: 145366 - DNA, 731 bp, Zea Mays
caactctaataaaatttataaatcatttagtaaaacattgttaaaattttaatatagtaaaactggcgttgctgatctcgataatattctaagttatattcactattggctatgtttactgtggtttactgcggttttaattcaactagggctataatttttacagtattttgtcgctccgtggattgcagctggagtagtcgaagacgaacagctgacgcaattatagatgtgtatacacataaacaataggctggttttaaatatacatggcattagacgagaactcgactcgctcaagcctcccctccctctcaagtctcaaggccacatgatgtcgaccgcgaccctgggcagcgcgaggtcctcgaacgaatcgtcatccttcctctgcttgccctcctcccgcgcccgctctgtcccggccgccgcgcgctggccctccgccagcctttgggcacgcttgggcggcgcctccgtcacggccggccggaactcccgcaggctccggtggccgcccatgtagcgctcggccgccagcacgctcgcgctctccccgcccagcagctccgacagcaggagcacgatggaagccatgaggagctgtctcgatcggtcgatggaagtggaacggacagtccaacgagaatcggcggcggaagtgatggtgtggtgtggtgtggtgtgcagatggtccggtggagcagtgtggaagcaggatggaattgtgt

SEQ ID NO: 145367 - DNA, 1626 bp, Zea Mays
atggccacgagttcaaatgcgtctactgaagtcagtggcagtggaggaagttttcccgtcgccaataaccctgccatcgcaggacaggtcttggctgctgcttgtatggttcctccagatgatgatgagaaaaagccattatggaggtatgctgagataattgaaagaactggaaagggtctgggggaaaatgtgaggattagatgtagactttgtaaccatgtttggaatggaagctattctagagttaaagcacatctgttgaaaattcctggttttgtggtgaagttttgtcgagtggtgacagtacatgttcttgatcaactgaaagctgaagttgctgcagccagtgctgttgctgatagaaccatgcctagagatatcccactcccagttgagggcaaagagaagaaaaggaggaggggtgtttcagctattgaatctagcttcaatttggatgttcgacaggctttcatgtttgctgccaataatccaattggaggttatgtccctccaagctacaagttgaggacaagtattcttatgcaagagaggacacatgtggagagaatgctgcagcccgtgaaggaaacttggagctctaaaggcgtcagtattgtttcagatggatggtcagatgctcaaagacgcccactcttgaatttcttggctgttacagaagatggcacaatgtttcttagagcgatcaacactgaaggaatatccaagaccaaggagtatattgcagagaagatgttagcagtaattgatgaggttggggcacaaaatgttgtgcaagtgataactgacaatgctgccaattgcagagctgctgacatcatagttgaccagaagcaccctcatattttttggaccccttgtgttgtgcatactttgaatcttgctttgaagaacatatgtgctgctaacgaaattgaagatgtgctttatactgaattccagtggattagcgaagtcattggagatgccaacatgattaaaaatttcatcatgaatcactccatgaggttggctatgttcaatgagcaaagcaatctgaaattccttgcaattgctgacacaagatttgcctctgctattgtgatgttgaagagatttattattataaaagatgctctttcagtgatggtagtaagtgaaaagtggagtacatatagggaagataatccacgtcaggctcaatttgtcaaggagaagattgtgaatgatctgtggtgggataaagtgcgctattttcttagtttcgctgagcctgtctatactatgatacgagcagctggtactgacaagccatgcctccatttgatgtatgagatgtgggacacaatgatagagaaggtgaatagtgtgatctatcgtcatgaaataaaagagtcacatgaagaatctatcttctactctgctgtgcatgacatcttgtggtgcagtggtccatcagcaatgtgggatgttggagctgacacttttgaagctgattttgagggtggtgctggttttcttgagcaagctgatctgtctctcgatgagccagaacttgaagaaaaattgtttgaagatcttggggcattggatttagccaaagatgcagaaccaaatgaagaatga

SEQ ID NO: 145368 - DNA, 654 bp, Zea Mays
gattcgtcgcagaggggagccctgcttgccccttcacgaaatcgctgccagaagaaagcctgccgctgcctttgctggaggctccgaggcagccttctgcctcgcctcctcgagcgcgggccaggattcggcccccataacggccgcctcgccggacgccgccggaggtggcgtggtcttcctccatggcgatgcgctaggcccgactccggcgtcgccagccggatccgccacctccaccgcagccgcgccggcggcgcccgcattcggctcctccatcgtcaacgctaacgcgcaacagaaacacagagcagcaataagagattacctgtctgcagcgtttttatcccgccgccgccgccgagagcgcgagacacaggcgcaggattcggaacagaccagcgagcgtcttattagcgtgcgtccatggacgcgccggcgacccacggcgactaggtacgggcggcggcggcggcggcggcggcgtagggttttgggcggagagatgagcgactagggtttttgggtgggagtggaaggcgaggaagagagtgaaagacagcagagacagagagccagagaccgagagggattggaagctgtgtgcgcgtctctgcgtgcgtggagcgcgtgagcggaggggacggccggacg

SEQ ID NO: 145369 - DNA, 127 bp, Zea Mays
acaggtacgtatgccaatgacctgtgagaacatacagtacaacaaaacctggttagcgtacaacagtttttgcaggatagatcagttcaataacacaaggaaacaaccagataatgtacataacaaa

SEQ ID NO: 145370 - DNA, 1180 bp, Zea Mays
aactgtcaaaacggggacacaggccagatggtgcttctgcgcgtttgccgtcacttcggccacctgcgcttcgcctccttcctctcaatggcggcgccccagcaatccgctcccctgtccgggtcggcgcccaagaggctcagggcgatggccacagacgccgctgcagtgccgaatcccccagcctctagtggctgccccgcgatgaaggcggagttcgccaagcacgccgagtacctcaacaccctgaatgacaagagagaaaggcttgtgaaagctagtcgggatattacaatgaacagcaaaaaggtcatctttcaggtccacagggacgaagttctctcgaaggcagaaaatgatcttgctgcagttgttaatcaatacattgcaaaactagtaaaagaattacaaggaactgacttctggaaactcagaagagcctacacctttggtgtacaagaatatgtcgaagctgcaacactctgtagattttgcaagactggcactctattaagccttgctgaaatcaatgattctttactagcactaagtggtcaatctgttgagcccttacagttaaatgtgcttgactatcttttaggggttgctgatttgtccggagagcttatgaggctcgcaataggccgtatatctgatggggaagttgaatatgcaaaaactatctgtgcttttgtgcgggatatttacagggagctgacccttgtggtgcctttaatggatgacaatagtgagatgaagaagaaaatggaggtcatgctgcaaagtgtagtaaaaattgagaatgcttgcttcagtgttcatgtgagaggttcagagtacattcctctgctagaatcatcagcagatccaggctattcttattttggtgccccggactttgatcaatgaatgttttgaagcaagaactaactgagtgttaaaggagcttagatcaatttaaggagagcggttgtgtcaaggctactcttaggtccacagttgggtgtttgattttatcgccagtttatgttgcacatcttgaagtctgtaaatctaagccccaacgtggtaatccgggagaatcatgttgcaatacaacctttttatggtgcagacttgtaatactcaaattgtaagggagaattaaaggaggaattgtctcctttgaatgtgtgtgtgc

SEQ ID NO: 145371 - DNA, 1234 bp, Zea Mays
aactgtcaaaacggggacacaggccagatggtgcttctgcgcgtttgccgtcacttcggccacctgcgcttcgcctccttcctctcaatggcggcgccccagcaatccgctcccctgtccgggtcggcgcccaagaggctcagggcgatggccacagacgccgctgcagtgccgaatcccccagcctctagtggctgccccgcgatgaaggcggagttcgccaagcacgccgagtacctcaacaccctgaatgacaagagagaaaggcttgtgaaagctagtcgggatattacaatgaacagcaaaaaggtcatctttcaggtccacagaatcacgaaagttaacagggacgaagttctctcgaaggcagaaaatgatcttgctgcagttgttaatcaatacattgcaaaactagtaaaagaattacaaggaactgacttctggaaactcagaagagcctacacctttggtgtacaagaatatgtcgaagctgcaacactctgtagattttgcaagactggcactctattaagccttgctgaaatcaatgattctttactagcactaagtggtcaatctgttgagcccttacagttaaatgtgcttgactatcttttaggggttgctgatttgtccggagagcttatgaggctcgcaataggccgtatatctgatggggaagttgaatatgcaaaaactatctgtgcttttgtgcgggatatttacagggagctgacccttgtggtgcctttaatggatgacaatagtgagatgaagaagaaaatggaggtcatgctgcaaagtgtagtaaaaattgagaatgcttgcttcagtgttcatgtgagaggttcagagtacattcctctgctagaatcatcagcagatccaggctattcttattttggtgccccggactttgatcaatgaatgttttgaagcaagaactaactgagtgttaaaggagcttagatcaatttaaggagagcggttgtgtcaaggctactcttaggtccacagttgggtgtttgattttatcgccagtttatgttgcacatcttgaagtctgtaaatctaagccccaacgtggtaatccgggagaatcatgttgcaatacaacctttttatggtgcagacttgtaatactcaaattgtaagggagaattaaaggaggaattgtctcctttgaatgtgtgtgtgcatctccatttatcatcacatgtgactgaccatgttt

SEQ ID NO: 145372 - DNA, 1286 bp, Zea Mays
aaaatcctcctgctccccagtccttcgcatgtctgaagcccccaacctcattcctactccatctcctccccctcctttgcccgtcccccttcttcgcactcacttttttctctgctctttccagctcccctgtccgggtcggcgcccaagaggctcagggcgatggccacagacgccgctgcagtgccgaatcccccagcctctagtggctgccccgcgatgaaggcggagttcgccaagcacgccgagtacctcaacaccctgaatgacaagagagaaaggcttgtgaaagctagtcgggatattacaatgaacagcaaaaaggtcatctttcaggtccacagaatcacgaaagttaacagggacgaagttctctcgaaggcagaaaatgatcttgctgcagttgttaatcaatacattgcaaaactagtaaaagaattacaaggaactgacttctggaaactcagaagagcctacacctttggtgtacaagaatatgtcgaagctgcaacactctgtagattttgcaagactggcactctattaagccttgctgaaatcaatgattctttactagcactaagtggtcaatctgttgagcccttacagttaaatgtgcttgactatcttttaggggttgctgatttgtccggagagcttatgaggctcgcaataggccgtatatctgatggggaagttgaatatgcaaaaactatctgtgcttttgtgcgggatatttacagggagctgacccttgtggtgcctttaatggatgacaatagtgagatgaagaagaaaatggaggtcatgctgcaaagtgtagtaaaaattgagaatgcttgcttcagtgttcatgtgagaggttcagagtacattcctctgctagaatcatcagcagatccaggctattcttattttggtgccccggactttgatcaatgaatgttttgaagcaagaactaactgagtgttaaaggagcttagatcaatttaaggagagcggttgtgtcaaggctactcttaggtccacagttgggtgtttgattttatcgccagtttatgttgcacatcttgaagtctgtaaatctaagccccaacgtggtaatccgggagaatcatgttgcaatacaacctttttatggtgcagacttgtaatactcaaattgtaagggagaattaaaggaggaattgtctcctttgaatgtgtgtgtgcatctccatttatcatcacatgtgactgaccatgtttaaaaaaatgagtaaatccttaataagaaacaattaaa

SEQ ID NO: 145373 - DNA, 721 bp, Zea Mays
gttgacaaccaaacagatacgcgtgtaggcctatcaatattcatatcatatcgtacgactttcttttctgaaaaaggagcttgcgaagcgtcggttgcacgttggagcttcagacgaggagcgcacacccacatctcctggtcccgtcccacctgcaccgcaacctaccggcacgccaccattcccacgggctcacgtagaccgggcccagcctccgccccaccaacccttgcctccccacacctcagcatcaaccactcgtctctttttctccgccccgcccgaagccgaggaggagaggggagcagcgagatcgtgcgcgcctccgagatctccacgaagttgtggtaacatggggctcaccttcacgaagctcttcagccggctcttctccaagaaagagatgaggatccttatggttggtctcgatgcagctggtaagaccaccatcctctacaagctcaagctcggagaaatcgtgaccaccatccctacaatcgggtttaatgtggagactgttgaatacaagaacattagcttcactgtctgggatgttggaggtcaggacaaggtacatgcgaaaatacgatattatacaaagtctcactcttctagtccccttactgatctaactttgctgcactagctttttctgtgctgtatcagaaagattgttcagaacatatgataataaaatttaacggtattcaggtttaagcga

SEQ ID NO: 145374 - DNA, 984 bp, Zea Mays
gttgacaaccaaacagatacgcgtgtaggcctatcaatattcatatcatatcgtacgactttcttttctgaaaaaggagcttgcgaagcgtcggttgcacgttggagcttcagacgaggagcgcacacccacatctcctggtcccgtcccacctgcaccgcaacctaccggcacgccaccattcccacgggctcacgtagaccgggcccagcctccgccccaccaacccttgcctccccacacctcagcatcaaccactcgtctctttttctccgccccgcccgaagccgaggaggagaggggagcagcgagatcgtgcgcgcctccgagatctccacgaagttgtggtaacatggggctcaccttcacgaagctcttcagccggctcttctccaagaaagagatgaggatccttatggttggtctcgatgcagctggtaagaccaccatcctctacaagctcaagctcggagaaatcgtgaccaccatccctacaatcgggtttaatgtggagactgttgaatacaagaacattagcttcactgtctgggatgttggaggtcaggacaagatcaggccattgtggaggcactatttccagaacacccaaggccttatctttgttgttgatagcaatgacagagatcgtgttgttgaagcaaaggatgagctccacaggatgctgaacgaggatgaattgagggatgctgtcttgctcgttttcgcaaacaagcaagatctaccaaatgcaatgaacgctgctgagatcaccgataagcttggtctccattccctgcgccaacgccactggtatatccagagcacttgtgctaccacaggagaaggtttgtacgagggtcttgattggctctccaacaacattgcaaacaagcattaccaagaatgtcatgtactcatgtgtggcatactgatatacttattctcaatgaatgcaggcctgaatggacaattctgctgtttcac

SEQ ID NO: 145375 - DNA, 1202 bp, Zea Mays
tttctgaaaaaggagcttgcgaagcgtcggttgcacgttggagcttcagacgaggagcgcacacccacatctcctggtcccgtcccacctgcaccgcaacctaccggcacgccaccattcccacgggctcacgtagaccgggcccagcctccgccccaccaacccttgcctccccacacctcagcatcaaccactcgtctctttttctccgccccgcccgaagccgaggaggagaggggagcagcgagatcgtgcgcgcctccgagatctccacgaagttgtggtaacatggggctcaccttcacgaagctcttcagccggctcttctccaagaaagagatgaggatccttatggttggtctcgatgcagctggtaagaccaccatcctctacaagctcaagctcggagaaatcgtgaccaccatccctacaatcgggtttaatgtggagactgttgaatacaagaacattagcttcactgtctgggatgttggaggtcaggacaagatcaggccattgtggaggcactatttccagaacacccaaggccttatctttgttgttgatagcaatgacagagatcgtgttgttgaagcaaaggatgagctccacaggatgctgaacgaggatgaattgagggatgctgtcttgctcgttttcgcaaacaagcaagatctaccaaatgcaatgaacgctgctgagatcaccgataagcttggtctccattccctgcgccaacgccactggtatatccagagcacttgtgctaccacaggagaaggtttgtacgagggtcttgattggctctccaacaacattgcaaacaaggcctgaatggacaattctgctgtttcacggagcacatctgcacatggcgaggcatggtcattttgaccctcagacgatcattgtttcattggaaagtatcgtatttctatgctaggcttttcagagagattactctctaagaaactgatccgatattaagacactataattggcattggcactagtagatcgtttactgagtaatgcagtttattttaatgtatcccaattgtgttgtaagatacaactatgcgtcggaattacccattcaatttgaatctagatacgtagtttttgttatatacttatacttggatatatattgtttaatacatggtaaaagtaacatatcaagaaaaatattttataatttg

SEQ ID NO: 145376 - DNA, 1083 bp, Zea Mays
tttctgaaaaaggagcttgcgaagcgtcggttgcacgttggagcttcagacgaggagcgcacacccacatctcctggtcccgtcccacctgcaccgcaacctaccggcacgccaccattcccacgggctcacgtagaccgggcccagcctccgccccaccaacccttgcctccccacacctcagcatcaaccactcgtctctttttctccgccccgcccgaagccgaggaggagaggggagcagcgagatcgtgcgcgcctccgagatctccacgaagttgtggtaacatggggctcaccttcacgaagctcttcagccggctcttctccaagaaagagatgaggatccttatggttggtctcgatgcagctggtaagaccaccatcctctacaagctcaagctcggagaaatcgtgaccaccatccctacaatcgggtttaatgtggagactgttgaatacaagaacattagcttcactgtctgggatgttggaggtcaggacaagatcaggccattgtggaggcactatttccagaacacccaaggccttatctttgttgttgatagcaatgacagagatcgtgttgttgaagcaaaggatgagctccacaggatgctgaacgaggtatatccagagcacttgtgctaccacaggagaaggtttgtacgagggtcttgattggctctccaacaacattgcaaacaaggcctgaatggacaattctgctgtttcacggagcacatctgcacatggcgaggcatggtcattttgaccctcagacgatcattgtttcattggaaagtatcgtatttctatgctaggcttttcagagagattactctctaagaaactgatccgatattaagacactataattggcattggcactagtagatcgtttactgagtaatgcagtttattttaatgtatcccaattgtgttgtaagatacaactatgcgtcggaattacccattcaatttgaatctagatacgtagtttttgttatatacttatacttggatatatattgtttaatacatggtaaaagtaacatatcaagaaaaatattttataatttg

SEQ ID NO: 145377 - DNA, 1081 bp, Zea Mays
aaccactcgtctctttttctccgccccgcccgaagccgaggaggagaggggagcagcgagatcgtgcgcgcctccgagatctccacgaaggttggtgccagacctgctgcttgtgtcttcccttcctgatcacgttttcaattctgcttgctaggagttgtggtaacatggggctcaccttcacgaagctcttcagccggctcttctccaagaaagagatgaggatccttatggttggtctcgatgcagctggtaagaccaccatcctctacaagctcaagctcggagaaatcgtgaccaccatccctacaatcgggtttaatgtggagactgttgaatacaagaacattagcttcactgtctgggatgttggaggtcaggacaagatcaggccattgtggaggcactatttccagaacacccaaggccttatctttgttgttgatagcaatgacagagatcgtgttgttgaagcaaaggatgagctccacaggatgctgaacgaggatgaattgagggatgctgtcttgctcgttttcgcaaacaagcaagatctaccaaatgcaatgaacgctgctgagatcaccgataagcttggtctccattccctgcgccaacgccactggtatatccagagcacttgtgctaccacaggagaaggtttgtacgagggtcttgattggctctccaacaacattgcaaacaaggcctgaatggacaattctgctgtttcacggagcacatctgcacatggcgaggcatggtcattttgaccctcagacgatcattgtttcattggaaagtatcgtatttctatgctaggcttttcagagagattactctctaagaaactgatccgatattaagacactataattggcattggcactagtagatcgtttactgagtaatgcagtttattttaatgtatcccaattgtgttgtaagatacaactatgcgtcggaattacccattcaatttgaatctagatacgtagtttttgttatatacttatacttggatatatattgtttaatacatggtaaaagtaacatatcaagaaaaatattttataatttg

SEQ ID NO: 145378 - DNA, 967 bp, Zea Mays
gcccgaagccgaggaggagaggggagcagcgagatctcctcagttgtggtaacatggggctcaccttcacgaagctcttcagccggctcttctccaagaaagagatgaggatccttatggttggtctcgatgcagctggtaagaccaccatcctctacaagctcaagctcggagaaatcgtgaccaccatccctacaatcgggtttaatgtggagactgttgaatacaagaacattagcttcactgtctgggatgttggaggtcaggacaagatcaggccattgtggaggcactatttccagaacacccaaggccttatctttgttgttgatagcaatgacagagatcgtgttgttgaagcaaaggatgagctccacaggatgctgaacgaggatgaattgagggatgctgtcttgctcgttttcgcaaacaagcaagatctaccaaatgcaatgaacgctgctgagatcaccgataagcttggtctccattccctgcgccaacgccactggtatatccagagcacttgtgctaccacaggagaaggtttgtacgagggtcttgattggctctccaacaacattgcaaacaaggcctgaatggacaattctgctgtttcacggagcacatctgcacatggcgaggcatggtcattttgaccctcagacgatcattgtttcattggaaagtatcgtatttctatgctaggcttttcagagagattactctctaagaaactgatccgatattaagacactataattggcattggcactagtagatcgtttactgagtaatgcagtttattttaatgtatcccaattgtgttgtaagatacaactatgcgtcggaattacccattcaatttgaatctagatacgtagtttttgttatatacttatacttggatatatattgtttaatacatggtaaaagtaacatatcaagaaaaatattttataatttg

SEQ ID NO: 145379 - DNA, 842 bp, Zea Mays
gcgatcgtgcctgcatggtgctcgacaacaaggtgctctacgagacgacatctgcttccgtgcgcacaagctcaccatgcgcagcttcggtgacgtttagccacctcatctccgccaccatgagcggcgtcacctgctgcctttgcttctccggtcagctcaactccgatctccgtaggctagccgtcaacctgaccccattcccgcgcctgcacttcttcatggtcggcttcgcgccgctcaccttccgggggctcctagcaataccacgtcctgactgtgccagaactcccaaaatagatatgggacgccaagaacatgatatgcgtcgtggacccgtgccacggtcgctacctgacggcgtccgccatgttctgcgccaagatgagcagcagggaggtggacgagcagatgcttaacgtgccaaacaatgactcctacttcggactcgatctccaacaacgttcagtccacggatgtgcctcttttgggagtgaattatacttttactcaattaggatattgtgtttctttggatctttgtttgattaatgattttttggatgagagtgtggctacaggatgaagcaatgcagttttttatggaacacacatgtgcagtatacaaatggaccatcaggttgcgggtatgttttttagacaaattattccattttttctattttgttgttccatcgagtctaattggattgggaatgcacatgctaactataccactagaacattagatcatgttgtttttggacaaataattttatttttccgttccaaatttctcccattaagtctaactggattcaagtgtgatattagaaatcacc

SEQ ID NO: 145380 - DNA, 1171 bp, Zea Mays
cgcggcggagacgtagggcgggtcgtcgtcggccgagttgcgccggctcccccgcccgcggtacgtggtcgggtacgaggacgacgccgcgaagctctccaggtcgaacaggtccgagctcgcgtcgctcatcgcctcctcgtccaccagcgccgccggcggagcgcgcgggggtagcccgacacggggcacggcggcggcggcgagcggagggtccgcgggcatcaccgagtcctcgtcgatcgggcggaacacctccaacgacacgcgcggtggctcgtccaagatgccggcgctgaggctgagctccgggaacgtgaacccgccggagctccggacgcggcgaccggtgtcgggattggtgtaagcggtgaacggcacgtcggcgctccggttcggcgccgccgccgccgcgaaggcgttgtcggcggcgagagggaacgcgcggctccccggcgttaccgtgaccgtgaccgtcagcttggcgggaggctcgggctcctcggtcgcggtcggagacgggtctttcgccttgaagatggcgctctccagacactcctccacggcacactgcgggctgaacttggcgtgggaatgcgccgccgtcgcggggctcctcggctcggacgcgatgccgacggtgaccgccttcctgccggcgcaggggcagtcgcggccgaacagcgtccagcgctgggcagagccaccgccggcggtcctcctgccgcggtaaccctgatcgctgccagcgtcagcgctccccgtctgctgctgcctggcagcggccaggtgtccggcagacagcaggccggagcggctgttccagctggcctccgacgacgcggcggtgcggccactgtggctggccacgtccgccaccgatgatgggacggacagcgtcggcaggtcgcggtcgtggtcagggagcgcgggcgcggcggggatcatggcgtcgcgcctgccggtgtcgcccgcgctgaagtagcgctcggccgtgaagatgccgatctcggcgacgctcgagcgtcgcgccgactgcgccgccgcgcggaggtggaccccggggccggcggcggagaggcagaccggccgcgccggcgcgatcctgtacctgtccatgcggctgcgtctctctctctcgtttgtctcgcaggcgcagctgagagtgagg

SEQ ID NO: 145381 - DNA, 2194 bp, Zea Mays
gcggtagagatgggagatgctctcagtgcaattcgatctgaatgcccctcgtgacctaccgctaccaggccctcaaggaatccctcgccgccgccatcacctcctccccgcacgccgccgaccctcgacgaccccacgcgctcgccgtcgtctctggtctcgccgccaatggctacctcgcgtccctcctcgtcgcccgctacgcccgcctcggcgaacccgatgccgcgcgcggggtcttcgacgccgccgcctcctccccctacgcgacgccgcccaagccgctcctctacaacgccatgctccgtggctacctctccctgggcctcccgcgcgaggccgttgcgctcctccgcgccatgcttgcgtccggctcctgcgcgcccgaccgccacacgtaccacctcgccgccacggcctgcgcgcgcgccccggaccttggcctaggccgccgcttcgaggctgccgccgcggcatgtgggctcgcggcgtccgacctcctggtggccactgcactcatcgggatgcatgccgaggccggggacatgggcgccgcgcgcagggtgttcgacggaatgccttgccgggacgctgtggcgtggaacgccgtgattggtgggtatgcgcgcgcggggcacctgtctgaggctgtggagctgtttggcatgatgaggtctgcggttggagcgtgcccaactgaggccacgcttgtgagcttggtttctggttatgccgtgttcggttcttggaagggccatggcatgatgcacgccgctgtgattaagtctggcttccagcgcagcctcttcgtttccaatgctctcctggagatgtacacagagttgggttgtttgagtgaggcattgttggtgttccggcagatggaggtgaaggattctgtgacttggagttcgatgattggtggacttgtgcggagtaacaaaccgggttatgctgttaggcttttccactggatgctctcgaaatcggaggtgttggtcacacggtctatcttgctcaatgtgatcttggcctgctccgagttgggggactggagagaaggaaaatggattgaagaaaactttgtcatgtgtaatggcagtgaattcaagagagatccctctgtagtaaccagactgatatatatgtacgcaaagtgtggacagttaggttcgtctgagactcttctacatgaatccacagaggttagatgcgatgtggttgcatggaatgccctgatcaaagcctgtggagagcttggactagtggaaaaagcaatcgggtttgcgatacaaatgcataggacaggcatttacccagacaacgttacattcttggagattctacatatgatctcattaattccatcactgaaaaaggggatggaagttcatgctcacattgttaaaagaggtttccagaatgaacgggcgattgctaattcacttatttacatgtatggtcgatgcgggagtctcagtctttcagttaatgcctttactgggattatggataaggatgcaatctcttgggcttctatgatgcaggtttatgcatggagtggacttgcaccagaagttgttaagctttttgagatgatgaagaaaacaaaagtacaacccaaccactacactttaattgctgtgttgactgcctataaaaacacaggtcttgttgaggagggaatgggcctgcttaagtgcatgaaagagcagtatggtctggagccatttatagagcatgtttcatgtgttgttgatatgctctgtcgtactggacgcttgagtgatgcatatcacctgatccagagttcccactctgaacatgcaagaaaccctaaattgtgggggacattactaagtggttcccgttactggggggatttggtgattggagaagcagcagctaggcatctctcgtctttggatccaggaagcaacgctaactataagatgctggctgatatttatgtttcaactgggagaagggacagagctgaggatgttctgagaatgtcgatgtcaaaagaactggacttgagaccaggctgtagctggactgaaggtggctaaagattgcaatacatgctagaagtagaggactagagtgtataattttagtatgcttgcatgttctttaaaaaatgattacatcaataagcgtgaatcaacatttgaatctcatttgggatttc

SEQ ID NO: 145382 - DNA, 510 bp, Zea Mays
attcgtcccacaacagcagcatccaagaacccacccatggcttcaatcaacacagacctcggtgcaatcttcgttgcttccttctacttctgtggctcccttgccttcttccctcctggtcctggtcaccaccacgagggagcccaccaccctccaatcggaagtgctccaatcccaggtctttctacagactactacaggttgacatgcccgcaagctgacgagactgtggcgcccatactgaagaaggctatcgcaaaggaaccacgggtagctgcctcccttctcaggctcctcttccatgactgctttgtccagggctgcgatgcgtcggttcttttggatgacgctgaggaagtcgtgagcgagaaaaacgctatccccaacaaggattccattagggggtttgaggtcatagacgagatcaaagctgcactcgaggaagcatgtccgcagacagtgtcctgtgctgacactgtcgccctggcagccagaggttcgacagtgctg

SEQ ID NO: 145383 - DNA, 1114 bp, Zea Mays
atatctgaaaggtgggaatgggacatggaaggggcagaaaaaagaagagaaaagcccagatcaagttgatcttggtaacttgggaaaagcttgaagaacaaatatggattaaatacttaccaactggaattgaaaatgtctcttttgggagaaaaatttagatatgattatagaagaagaaacttattggaaacaaagatcgcatgaaaaatggttgttaaaaggagatggaaataatgagttttttcatagaattgcaagtggaagaaaaaagaaaaatgatatcctcttctttgaagacaatggtacaaggattgaaggagatcatatgcttgaacatgctactaattattatgctgatctctttggcccagcacctggaaacctcttccaggtggatgactccatttggaacaatgctgagcatatttctgacagtgagaatcgcacactgtgtgagttttttacaatgaaagagattactcaagccttatttcaaatggaaaaaaacaaagctgctggtcccgacggcattccaactgaattctatcaaagttgttgggatactataaaagaagatgttatgcagatgtttcaggaccttcatgaaggaaaattgaatgtgagccgtctaaattatggaattataactctcattccaaaaatcagagatgctgcaaagattcaacaattcagacctatatgcctcctgaattgcctatacaaacttatcactaaggtgctcactaatagaatggaaccttttgcccagaaacttataaatgaacatcagactgcttttttaaaaggtcggagcatcatgagtggaattatgacactccatgaggttatgcgtgacacttagattaaaaatgaaacagggatctttttaaagctagattttgaaaaagcttatgataaagtcacttggaactttatgtttcactgtttagagaaaagaggtttctgtgaaaaatggatgaattggatggagaaagtagtcaatgatggcactgtcagagttaagatcaatgacaaagttggtaattatattaaaagtcataagggagtgagacagggtgaccctctatcacctattctctttaactttgtt

SEQ ID NO: 145384 - DNA, 727 bp, Zea Mays
ctcgtgatgcccgtcccgcctccccgctgtggcagccgccttcgcgtccgtcgatccctccgtgcacagatgcgccccaaatcgcgcctcccccaccgcgctccgtgaaatccgccctcctcaacctccccgccacccagaactccctcgcacctcatccttcgcgcgatgctcgccgatgtgccgccttcaaacatcgtcgtcgtcacctcctccccctttcctaggagggcatcctcgccgatgtgtcgccttccaacatcgacaccaccgcgtccccgcaccaccctcccccgtgtgcgtccctggccccctgagctcgcgcaggccggaggaccgcgctcgcccacctgaagattgctccctcccccaaggagctggcggcgacgcggctgcgtcaggagatttgggtccaacttcacatcttattcctcttcagttctcggcagctttggaattgctcagctcagcttttcgacgccgagtctatagctgctgctcaccactgccctcggtgtctgtagtctgtccatggaatgctttcatactgcttgctactcgcagtgtcgtgctgtgcatgcctgccttcgaggcaacaaccaccgtgcatacattgtccgggtcgggctggtatcctttgctgctacttgctgatgctgataagaagaactgcagcttttatcaccccggccgaaaagtcgtctcttgactcgttcgcgctagcttc

SEQ ID NO: 145385 - DNA, 1440 bp, Zea Mays
atggcgacaggagctcgacttcgagcgggcctccccagagatgatgctcctccgcagcaggaaatggtagcagcaaacggaacgggccaaccgcagctggtggtggacgaacacaagacgattcttgaagaggtccccagagaagaaaatggcaccctttctgccgccaattatgctgctcaaggtcatgagaatgttgccgctgagtactacaaacaacaggaagaacaggaaaaagttgtcaggagtgaatcattagccatatggctgtctaatatcgcaaatatggttctctttgctgcaaaagtgtatgcttcaacttgttgtcatgatatatcttgtggtttactgccttttcaatgcaaacgccaaatccctatagaaacccaattggaaaagcgtatgcagccactgaaccagggaatgcaagttgggattgcttggctggtcatacgaggtttgatctgttctgggtttcatgtaggaatcaaggaactagctgaggtctccttccctcaagatgacaaacaaacagaaaaaactaccctcaagcgttccgctgattgggcaccgcagacggtctgtggttgtggatgggattatcgttttggcagaaagctggttgaagctcgtgatgaactaatgaaaggaagcttgccggttctaactcaacggggtgaaccacgtatatattctcgtacactcttcccatatgaactttttgtgaagctctatagcaaggttgagttgcacccttttggtcttcataaccttggtaacaggccaatttatgctgggaatgcactttgtactgtgaaatataccgacgaggatccttgcatgatgagtattagatcaacttcattttcccctactgctgatgctatgtctgaaacaaaggttgcacctatcacccaggttgatctctctttcctcagtgaagggaaatctacatgggtgaatctgacatcccaagacacaaagcggcatgatcttgcaaatgcatgtgtagtagtcacaggaggcagaggtttaagaagtgctgaaaattttaagttgttggagcagcttgcggagaaatttggtgcagcagcgggcgcgactagggctgctgttgaagcaggttatgttccaaatgaccttcagagttgcaggagaaggctgcagcagcttgaatctcagctaatggaagcgaacagaatcaaagaggaaggcaacactggaagtatccgatggaaggagaacatattagaccaagagaatgaattacagaacataaaacaagagaacgacgacctgcagacaaaggaatcagcggcttctgagaagattaaggaactctcttcccagcttactaatgcaaaatatggcatgataaatagtaacaccaaggagataatgagaaggggggcactgaagaggacgatgaacctgttgtag

SEQ ID NO: 145386 - DNA, 234 bp, Zea Mays
atatgggagaacaacaagtttgttgactatgattcatctaaggagaaggagaatgatggtgactcacaggttgatttggaatcaaacaagggggatgcaggtcttgatagcaacgggttgcactcaactaaggagaacagtggcagggcatcaccaactaaacaacaccagcagtataagaagaagtctctgctgaagagattcggtggtctgctaaaaaagaaaagcgaaaat

SEQ ID NO: 145387 - DNA, 494 bp, Zea Mays
tccgctcgcaggcaggcacagcgccaagcggcgaccgagagtccgagacccattcccatccacgcgaccacgctgccgttctctccccttcctccccgtcgcttccattcccgtccctcacaatctcacccccgccagccgagccccaaccctaacgaaatttacacctgcttcgtcggcgtgagcggtcttaggcgccgggcgtcgctgcggtccagcggtgtcggatccgggtcccgcgccgttaggtcgaggtttcttcggcgacggtgcagccgctggatgttagtctggcagatcggggccgaggtaatttccacgaacttagggggcaccttttcgcgttggtgctcaaaatggagaatttcggtgccgttcgggcaggtagctcctgatgaattgtgagttttaataggtgctaccttctcatctgttatcctagtgatctgtaatctttgcatatgattcaagtgtgatgtagtattggttttacc

SEQ ID NO: 145388 - DNA, 2378 bp, Zea Mays
tccgctcgcaggcaggcacagcgccaagcggcgaccgagagtccgagacccattcccatccacgcgaccacgctgccgttctctccccttcctccccgtcgcttccattcccgtccctcacaatctcacccccgccagccgagccccaaccctaacgaaatttacacctgcttcgtcggcgtgagcggtcttaggcgccgggcgtcgctgcggtccagcggtgtcggatccgggtcccgcgccgttaggtcgaggtttcttcggcgacggtgcagccgctggatgttagtctggcagatcggggccgaggtaatttccacgaacttagggggcaccttttcgcgttggtgctcaaaatggagaatttcggtgccgttcgggcagctaggcagtgttgggttgtaaaatttgtatcgcgtgaatgaactcagagcatctcaatgttaaaactgtaaaaggggcagacctggtgccagaggctcccacatgagtgggttctagggaagggataatccgaagcaagcctcccccctgcaaatgcagagatgtggctttgaacccgtgacctggtgactcagtgagacacctctcaccactgcaacgggcgtgtccttcctcagcgttaaaactgagcatattaattcccctgcttaagcaatatgggagctaattgctgcgttgctgcaaaggagaggacacagccgtgcatcactcctatagaagtatcgacatacaggaatgtgaggcgctcgccatcatggaacattcgatgggacaatcgcacacatatagaagacataatggatattcctactctgttctccaaccatagtagtggaagcattcatcctgatacaaagagtggttccattgctccaactgaagggttctctaatggaaatagccttggaactagcccttccaatgtgttccatggagcaaagtggcacaaatctgataaaaaaatggaagcacgcaaggttacaaagtctgattctcgagctgatcgctccacagcaagtaactcttctcctgagacaaagctttccaggaaatcactggacatatcaagtgttgcttcagatttgaagacttcagtgtctgttccttcaacgccacccttagtatccagagcagatccgtcatcctccaaggggcattctcaacctacagattcagatttgatgaagaaagcatggcggtcaccagggtatcaattatacagacaggtttcggacagtaaaattccatctctcagatctctcaatgagataaggtctcctgaaggaaggcctccctcttccatgttatcagcctgcagcaacgacttgtcagcagcaggatcctatggtgagtcatccgatggttggtcaatgcgcacattttctgaaatggtctcaacatcccaaagagagaggtggtcacttgacagtgagctcttgggatccatttctagtaaaatgacaagatcaagtgcttcgagttctactacacgcccccctgaccaagacgtgtgcaagctgtgtttaaagctgctaaaggagagatcgacatggaacgcgcaggagctggctgttgttgctgttttgttgtgtggacatgcataccatgctgactgtctggacagcataactacagaagctgacaaatatgatcctccatgccctgtgtgcacgcacggtgagaaattttcagtgaagctatttgggaagctggaatcaaagatcaagaacaagataccaaaaaatgtgtcagttgatattaatctagatgggaatagtagtaataagcaccagaagaaaggtagaagagagcccaggttaggtacaagttcaagcatgaaggtcccatttagtcgtccatttttgaggagacatttctccattggatctcgaccacctcggtcggtctcagaaactgattccacaagaaagaagggattctgggcaagacactgggagagagtagaatagaatccaattgtcgttaggtgggttggtctcaattattatgttttggaaggatctttaagaagaggtgaactcctcagcatgcaagctagtggaggtgaactccccagtatacaagggctgccgagcaaccaacatatttggaagtttctctcagccatcgtattctgatactggtgcagagcgcacaacaaggtttcttataccatgcgaggcagggtcgttgtaggccccgcttgcatctaagtaatagtagtatcgatctaacagaaacggtgtggccttcctggatttaaggcccaatgctgggttataagattacacaaccagcatgctagattatttactgtacccgcagtttttttaattattggctaaggtatttgttggtggttgatggaatgcgtt

SEQ ID NO: 145389 - DNA, 2299 bp, Zea Mays
tccgctcgcaggcaggcacagcgccaagcggcgaccgagagtccgagacccattcccatccacgcgaccacgctgccgttctctccccttcctccccgtcgcttccattcccgtccctcacaatctcacccccgccagccgagccccaaccctaacgaaatttacacctgcttcgtcggcgtgagcggtcttaggcgccgggcgtcgctgcggtccagcggtgtcggatccgggtcccgcgccgttaggtcgaggtttcttcggcgacggtgcagccgctggatgttagtctggcagatcggggccgaggcagtgttgggttgtaaaatttgtatcgcgtgaatgaactcagagcatctcaatgttaaaactgtaaaaggggcagacctggtgccagaggctcccacatgagtgggttctagggaagggataatccgaagcaagcctcccccctgcaaatgcagagatgtggctttgaacccgtgacctggtgactcagtgagacacctctcaccactgcaacgggcgtgtccttcctcagcgttaaaactgagcatattaattcccctgcttaagcaatatgggagctaattgctgcgttgctgcaaaggagaggacacagccgtgcatcactcctatagaagtatcgacatacaggaatgtgaggcgctcgccatcatggaacattcgatgggacaatcgcacacatatagaagacataatggatattcctactctgttctccaaccatagtagtggaagcattcatcctgatacaaagagtggttccattgctccaactgaagggttctctaatggaaatagccttggaactagcccttccaatgtgttccatggagcaaagtggcacaaatctgataaaaaaatggaagcacgcaaggttacaaagtctgattctcgagctgatcgctccacagcaagtaactcttctcctgagacaaagctttccaggaaatcactggacatatcaagtgttgcttcagatttgaagacttcagtgtctgttccttcaacgccacccttagtatccagagcagatccgtcatcctccaaggggcattctcaacctacagattcagatttgatgaagaaagcatggcggtcaccagggtatcaattatacagacaggtttcggacagtaaaattccatctctcagatctctcaatgagataaggtctcctgaaggaaggcctccctcttccatgttatcagcctgcagcaacgacttgtcagcagcaggatcctatggtgagtcatccgatggttggtcaatgcgcacattttctgaaatggtctcaacatcccaaagagagaggtggtcacttgacagtgagctcttgggatccatttctagtaaaatgacaagatcaagtgcttcgagttctactacacgcccccctgaccaagacgtgtgcaagctgtgtttaaagctgctaaaggagagatcgacatggaacgcgcaggagctggctgttgttgctgttttgttgtgtggacatgcataccatgctgactgtctggacagcataactacagaagctgacaaatatgatcctccatgccctgtgtgcacgcacggtgagaaattttcagtgaagctatttgggaagctggaatcaaagatcaagaacaagataccaaaaaatgtgtcagttgatattaatctagatgggaatagtagtaataagcaccagaagaaaggtagaagagagcccaggttaggtacaagttcaagcatgaaggtcccatttagtcgtccatttttgaggagacatttctccattggatctcgaccacctcggtcggtctcagaaactgattccacaagaaagaagggattctgggcaagacactgggagagagtagaatagaatccaattgtcgttaggtgggttggtctcaattattatgttttggaaggatctttaagaagaggtgaactcctcagcatgcaagctagtggaggtgaactccccagtatacaagggctgccgagcaaccaacatatttggaagtttctctcagccatcgtattctgatactggtgcagagcgcacaacaaggtttcttataccatgcgaggcagggtcgttgtaggccccgcttgcatctaagtaatagtagtatcgatctaacagaaacggtgtggccttcctggatttaaggcccaatgctgggttataagattacacaaccagcatgctagattatttactgtacccgcagtttttttaattattggctaaggtatttgttggtggttgatggaatgcgtt

SEQ ID NO: 145390 - DNA, 2581 bp, Zea Mays
tccgctcgcaggcaggcacagcgccaagcggcgaccgagagtccgagacccattcccatccacgcgaccacgctgccgttctctccccttcctccccgtcgcttccattcccgtccctcacaatctcacccccgccagccgagccccaaccctaacgaaatttacacctgcttcgtcggcgtgagcggtcttaggcgccgggcgtcgctgcggtccagcggtgtcggatccgggtcccgcgccgttaggtcgaggtttcttcggcgacggtgcagccgctggatgttagtctggcagatcggggccgagctaggcagtgttgggttgtaaaatttgtatcgcgtgaatgaactcagagcatctcaatgttaaaactgtaaaaggggcagacctggtgccagaggctcccacatgagtgggttctagggaagggataatccgaagcaagcctcccccctgcaaatgcagagatgtggctttgaacccgtgacctggtgactcagtgagacacctctcaccactgcaacgggcgtgtccttcctcagcgttaaaactgagcatattaattcccctgcttaagcaatatgggagctaattgctgcgttgctgcaaaggagaggacacagccgtgcatcactcctatagaagtatcgacatacaggaatgtgaggcgctcgccatcatggaacattcgatgggacaatcgcacacatatagaagacataatggatattcctactctgttctccaaccatagtagtggaagcattcatcctgatacaaagagtggttccattgctccaactgaagggttctctaatggaaatagccttggaactagcccttccaatgtgttccatggagcaaagtggcacaaatctgataaaaaaatggaagcacgcaaggttacaaagtctgattctcgagctgatcgctccacagcaagtaactcttctcctgagacaaagctttccaggaaatcactggacatatcaagtgttgcttcagatttgaagacttcagtgtctgttccttcaacgccacccttagtatccagagcagatccgtcatcctccaaggggcattctcaacctacagattcagatttgatgaagaaagcatggcggtcaccagggtatcaattatacagacaggtttcggacagtaaaattccatctctcagatctctcaatgagataaggtctcctgaaggaaggcctccctcttccatgttatcagcctgcagcaacgacttgtcagcagcaggatcctatggtgagtcatccgatggttggtcaatgcgcacattttctgaaatggtctcaacatcccaaagagagaggtggtcacttgacagtgagctcttgggatccatttctagtaaaatgacaagatcaagtgcttcgagttctactacacgcccccctgaccaagacgtgtgcaagctgtgtttaaagctgctaaaggagagatcgacatggaacgcgcaggagctggctgttgttgctgttttgttgtgtggacatgcataccatgctgactgtctggacagcataactacagaagctgacaaatatgatcctccatgccctgtgtgcacgcacggtgagaaattttcagtgaagctatttgggaagctggaatcaaagatcaagaacaagataccaaaaaatgtgtcagttgatattaatctagatgggaatagtagtaataagcaccagaagaaaggtagaagagagcccaggttaggtacaagttcaagcatgaaggtcccatttagtcgtccatttttgaggagacatttctccattggatctcgaccacctcggtcggtctcagaaactgattccacaagaaagaagggattctgggcaagacactgggagagagtagaatagaatccaattgtcgttaggtgggttggtctcaattattatgttttggaaggatctttaagaagaggtgaactcctcagcatgcaagctagtggaggtgaactccccagtatacaagggctgccgagcaaccaacatatttggaagtttctctcagccatcgtattctgatactggtgcagagcgcacaacaaggtttcttataccatgcgaggcagggtcgttgtaggccccgcttgcatctaagtaatagtagtatcgatctaacagaaacggtgtggccttcctggatttaaggcccaatgctgggttataagattacacaaccagcatgctagattatttactgtacccgcagtttttttaattattggctaaggtatttgttggtggttgatggaatgcgtttaatttgaaggctttagtggtactgtagaacttttcaatcagattggctgaactgatcatccttgcgttcacatatactaaatatagacgcacttatagggtgtttggtttgaggagtgagttagtctcatctttttattccgtattttttgtttggtttgtggaatagaatgagctgattcatcatcaacttatttctcatagttagttaatactaatataataattctcatagttagttaatactaataatgattctcatagttagttaaaactaa

SEQ ID NO: 145391 - DNA, 2553 bp, Zea Mays
tccgctcgcaggcaggcacagcgccaagcggcgaccgagagtccgagacccattcccatccacgcgaccacgctgccgttctctccccttcctccccgtcgcttccattcccgtccctcacaatctcacccccgccagccgagccccaaccctaacgaaatttacacctgcttcgtcggcgtgagcggtcttaggcgccgggcgtcgctgcggtccagcggtgtcggatccgggtcccgcgccgttaggtcgaggtttcttcggcgacggtgcagccgctggatgttagtctggcagatcggggccgagctaggcagtgttgggttgtaaaatttgtatcgcgtgaatgaactcagagcatctcaatgttaaaactgtaaaaggggcagacctggtgccagaggctcccacatgagtgggttctagggaagggataatccgaagcaagcctcccccctgcaaatgcagagatgtggctttgaacccgtgacctggtgactcagtgagacacctctcaccactgcaacgggcgtgtccttcctcagcgttaaaactgagcatattaattcccctgcttaagcaatatgggagctaattgctgcgttgctgcaaaggagaggacacagccgtgcatcactcctatagaagtatcgacatacaggaatgtgaggcgctcgccatcatggaacattcgatgggacaatcgcacacatatagaagacataatggatattcctactctgttctccaaccatagtagtggaagcattcatcctgatacaaagagtggttccattgctccaactgaagggttctctaatggaaatagccttggaactagcccttccaatgtgttccatggagcaaagtggcacaaatctgataaaaaaatggaagcacgcaaggttacaaagtctgattctcgagctgatcgctccacagcaagtaactcttctcctgagacaaagctttccaggaaatcactggacatatcaagtgttgcttcagatttgaagacttcagtgtctgttccttcaacgccacccttagtatccagagcagatccgtcatcctccaaggggcattctcaacctacagattcagatttgatgaagaaagcatggcggtcaccagggtatcaattatacagacaggtttcggacagtaaaattccatctctcagatctctcaatgagataaggtctcctgaaggaaggcctccctcttccatgttatcagcctgcagcaacgacttgtcagcagcaggatcctatggtgagtcatccgatggttggtcaatgcgcacattttctgaaatggtctcaacatcccaaagagagaggtggtcacttgacagtgagctcttgggatccatttctagtaaaatgacaagatcaagtgcttcgagttctactacacgcccccctgaccaagacgtgtgcaagctgtgtttaaagctgctaaaggagagatcgacatggaacgcgcaggagctggctgttgttgctgttttgttgtgtggacatgcataccatgctgactgtctggacagcataactacagaagctgacaaatatgatcctccatgccctgtgtgcacgcacggtgagaaattttcagtgaagctatttgggaagctggaatcaaagatcaagaacaagataccaaaaaatgtgtcagttgatattaatctagatgggaatagtagtaataagcaccagaagaaaggtagaagagagcccaggttaggtacaagttcaagcatgaaggtcccatttagtcgtccatttttgaggagacatttctccattggatctcgaccacctcggtcggtctcagaaactgattccacaagaaagaagggattctgggcaagacactgggagagagtagaatagaatccaattgtcgttaggaaggatctttaagaagaggtgaactcctcagcatgcaagctagtggaggtgaactccccagtatacaagggctgccgagcaaccaacatatttggaagtttctctcagccatcgtattctgatactggtgcagagcgcacaacaaggtttcttataccatgcgaggcagggtcgttgtaggccccgcttgcatctaagtaatagtagtatcgatctaacagaaacggtgtggccttcctggatttaaggcccaatgctgggttataagattacacaaccagcatgctagattatttactgtacccgcagtttttttaattattggctaaggtatttgttggtggttgatggaatgcgtttaatttgaaggctttagtggtactgtagaacttttcaatcagattggctgaactgatcatccttgcgttcacatatactaaatatagacgcacttatagggtgtttggtttgaggagtgagttagtctcatctttttattccgtattttttgtttggtttgtggaatagaatgagctgattcatcatcaacttatttctcatagttagttaatactaatataataattctcatagttagttaatactaataatgattctcatagttagttaaaactaa

SEQ ID NO: 145392 - DNA, 1528 bp, Zea Mays
gtatttgaactactcttttgttcaatttgcgaaagggcctctagccgagttggttaggtggtctgagtagcactcctcaggtcctgggttcgactcccccgtgggagcgaatttcaggctgtggttaaaaaaaaccatctcgtctggcccacgccgaagcacaggtctaaggatcagcctcggtcgtggtcgtggtcgttctcacatgggcttcgatgccgctgtgcatgggtggggcaggggtttgggggttttctcgacctgtgtgagaatgtcttattcttaatacaatactcgggggctgtcttacccccgcatgtcgagttttttttttgttcaatttggtcaaacatagctatgttttaaattgggctgacttcaggttgtataggaaccaacttcaactatccatatataattattggataaattaaaaggatactttcactgaagtcactagaatatgttatttaattatatttattgattttgtactgtttttttggacttatggatttgttgaatacggtccaggtcctgttacaattgcagatagagaagcagaagaagcaatggtgtcagttatactgaagagcttccctactcatgccatttttggcgaggagaatggttggagatgtgcagagaattctgctgattttgtttgggttttggatccaatagatggaacgaaaagtttcataactggcaagcctctttttgggacgcttatagcacttttgcacaatgggaagccggttattggtgtcattgaccagccaatcttgcgagaaagatggattggggtggatggaaaacaaacaactttgaacggacaagaaatatctgttcgctcttgtaatttacttgcacaagcttacttatatacaacaagcccacatctctttgaagcagatgctgaagatgcatttattcgtgtaaggaataaggtgaaagtcccactttatggctgtgattgttatgcttatgctcttctggcttctggttttgtggatattgttgttgaatctggtttgaagccatatgatttcctctcgctggtacctgtcattgaaggagctggagggtcaataactgattggagaggggacaagctccattggcctgttactgcagaatcacggcccacaagttttaacgtggtagcagctggggatgcccgtgtccacaaagaggcccttgatgcgttgcggtggcgctagcgtgctctttagataagcattatactaataaccaactatttagacatttacatgtgatatttgtatgaacaataataagctttacctgtatgcttgttggttggcctcaacctttgcactaataatagatagcttggttgtaaactaccaagcagtggcttgctgtttgcatcaagcagatattatgtcttgggaatgctaaatgtgtgaggtcttaccttagtgtgagctgcccttgcacccagcaattcagctgcgctgttagtgcttggggatgcttaatcgagtgtttgattgttgttgct

SEQ ID NO: 145393 - DNA, 1592 bp, Zea Mays
gtatttgaactactcttttgttcaatttgcgaaagggcctctagccgagttggttaggtggtctgagtagcactcctcaggtcctgggttcgactcccccgtgggagcgaatttcaggctgtggttaaaaaaaaccatctcgtctggcccacgccgaagcacaggtctaaggatcagcctcggtcgtggtcgtggtcgttctcacatgggcttcgatgccgctgtgcatgggtggggcaggggtttgggggttttctcgacctgtgtgagaatgtcttattcttaatacaatactcgggggctgtcttacccccgcatgtcgagttttttttttgttcaatttggtcaaacatagctatgttttaaattgggctgacttcaggttgtataggaaccaacttcaactatccatatataattattggataaattaaaaggatactttcactgaagtcactagaatatgttatttaattatatttattgattttgtactgtttttttggacttatggatttgttgaatacggtccaggtcctgttacaattgcagatagagaagcagaagaagcaatggtgtcagttatactgaagagcttccctactcatgccatttttggcgaggagaatggttggagatgtgcagagaattctgctgattttgtttgggttttggatccaatagatggaacgaaaagtttcataactggtagtggatctctggtcacattacgggtttatgactgagaaaattaagttgtacttgtttataatgactgctaaattcattgtttgtaggcaagcctctttttgggacgcttatagcacttttgcacaatgggaagccggttattggtgtcattgaccagccaatcttgcgagaaagatggattggggtggatggaaaacaaacaactttgaacggacaagaaatatctgttcgctcttatatacaacaagcccacatctctttgaagcagatgctgaagatgcatttattcgtgtaaggaataaggtgaaagtcccactttatggctgtgattgttatgcttatgctcttctggcttctggttttgtggatattgttgttgaatctggtttgaagccatatgatttcctctcgctggtacctgtcattgaaggagctggagggtcaataactgattggagaggggacaagctccattggcctgttactgcagaatcacggcccacaagttttaacgtggtagcagctggggatgcccgtgtccacaaagaggcccttgatgcgttgcggtggcgctagcgtgctctttagataagcattatactaataaccaactatttagacatttacatgtgatatttgtatgaacaataataagctttacctgtatgcttgttggttggcctcaacctttgcactaataatagatagcttggttgtaaactaccaagcagtggcttgctgtttgcatcaagcagatattatgtcttgggaatgctaaatgtgtgaggtcttaccttagtgtgagctgcccttgcacccagcaattcagctgcgctgttagtgcttggggatgcttaatcgagtgtttgattgttgttgct

SEQ ID NO: 145394 - DNA, 101 bp, Zea Mays
ggcgtttacatcgtcaggtagtacaaagtgtagaacaattgtgctctatatcttgtactcttctcgatgtcagcacgaaccggccgatttatatatgtacg

SEQ ID NO: 145395 - DNA, 1481 bp, Zea Mays
gaagcaaaaccaacagatttcatgttagtgtcgatctcacataacacttcacatattgtatgtatgaaaggatgagaccaatccctggaagtgaactcatgaaccatgccatcaacttcaatggaactcgcccctggcacatttctcagtcccctttctctcatagcctttcgaagtttgctcacatcaccccacctttcctgttctgcaaaaatattcgacaggagtatgtagttcccactgttgttaggctcaagctcaattaggtgcagcaaggcttgttctccaaggccagcatcaccatgggtcctagctgcagcaagaagagctccccatattgctgcatttgccttcaaaggcatgttcttaactaaatcctgggcctcctttaaacaaccagcacgaccaagtagatcaaccatgcatccataatgttcaactcgtggcttaatcctgtactgggagaccatgatattgaaataccaacgacccagatcagttagtccaacatgactacacgctgacaagattgcaagaaaagtaacagcattcggcgccatattctccctctccatccggcaaaacatctcgacagcttgcaaaccgaggccatgcaatgcaaatccagcaattagtgtcgtccaagtcacgacactcttctcctccataccctcaaacacctccactgctttctcaatacacccacatttcatgtacatgtctatgatcgaattcatcagtggtatctcctggcacaagccccgcctgaccacaaacctgtgcacccactcccctaaatcaaccgcacccagatccccacatgccgccagaaccgacagcaacgccacaccgtcagcctcgatgccctccacctgcatccttcgaaacacctctactgccttctccggacgcttcatctgcgcgtaccccccgatcaccgtcgtccacgacaccacattccgctccggcatagcatcaaacagctcccgcgcgtgggcctggtccccagccttcacatagccggcgatcataacgttccaggccacaacgtccctgacggccatctcgtcgaacacgctgcgcgcgtcggcgacatgtccgcaggtgcagtacagttggacgaggctggaggagacgtgagcgtcggaggccacgtggccggtgcggaggagcagggagtggagctggccgaggaggctcctgcggaggagatgcggcgggaggcgcgcgacgtccctgaggtatacagaggggtatacacgacggaggagcgcggcggcgtggtcactggtttgctgcgagtgaggcacgaggcagagggaagcgaggaggagcgcggaaaggagacgcgggtcgcgttggccgccgcggggaaggaggaaggcgtgcgcctgcagtaggtgccgtggggaggcgagacgcgggaggaaggagaggagacgatgaagcgcaggcgacagtggcggggacggcggcatgtg

SEQ ID NO: 145396 - DNA, 1685 bp, Zea Mays
ctcccagtcgcccttcaacttgccagccgatcccttcgcgtttgtctccgcggttccgacgctccgcactccgctcccctctcccaagcaaacacagccgagtccacgcacgcctcccatcattcctcaaccgcctcgccggagcaaggggagtagcggaggatggagattgaccaggcggtgcgcgggtgcagcgaccgccgcatgcgcaccaagtacagcaacgccgtctacgtcgtccagcgggccttcgcgctctacccatttgaggaagttgccttcagctttaatggtgggaaggattcaactgtgctcctgcatttgattcgagctggttactacctttacaagaaggactctggtgatgtagcccaaacagatgctgttaaaaactgtccactgcgtactatctatttcgaaagcccttgtgctttccctgaaatcaattcattcacttatgagattgtctcaacttatgggttacctctggaaaccatccattcagatttcaagtctggtctagaaggccttctgaaggagaagcccaccaaagcaattttcattggcacaagaattggtgatccaaatgcggttggtcaagaacagttctctcctagttcacctggctggcctccttttatgagggtgaatccaatcttggattggtcatacagggatgtttggtcttttctaataacatgtaaggtcaaatactgcagcctttatgatcaagggtatacttccattgggagcatacacgatactgttccaaatgcactccttagtgattcatcatctgagaaaagttttagaccagcatacatgctaactgatggaaggcttgaaagagctggtagaacaaaaaagattaatcctaaagtagaaatgaattctgctgcaagcaatggcatcaacgatactgagggaggacggatgatctcacgggcggcatcaatcattgtagtcggtgatgaaattttgtttggtacaactgaggataacttaggagcagccttgtgcaagaagcttcatgcaattggctggcgggtttctcatgtagcagttgttcgcaatgagattgattctgttgctgaagaagttgaacgttgtaaatctactgatgacatggtgtttatttttggtggactcgggccgctacattcagacgtttctttggctggtgtcgcgaaagcatttggagttcgtctggctcctgatgaagaatttgaagattaccttagtcaactcatgggaaacaattacactggtgaccgaaatgagatggcacagttgccagaaggtattacagaattactgcatcacaaaacgctaccattgccattgatcaaatgtagaaatgtcattgctcttgctgcaaccaatatggatgaactagacaccgagtgggattgtcttctaggtacccaggagagtggtctaatgccatcaaaaccttttgtgtcaaagcatctcagcactacactttcagatgttcaaattgcttcagtccttgcaaaactgtgcttagagttttctgatgtttacatagggtgtcatcggatatcaagagctggtcctttggttgtgaatcttactggaaaggtagatgatgaattctctgtagagttcagatgactactttatcccacaaatgaccataaatgctatcccctctgtattttata

SEQ ID NO: 145397 - DNA, 2048 bp, Zea Mays
ctcccagtcgcccttcaacttgccagccgatcccttcgcgtttgtctccgcggttccgacgctccgcactccgctcccctctcccaagcaaacacagccgagtccacgcacgcctcccatcattcctcaaccgcctcgccggagcaaggggagtagcggaggatggagattgaccaggcggtgcgcgggtgcagcgaccgccgcatgcgcaccaagtacagcaacgccgtctacgtcgtccagcgggccttcgcgctctacccatttgaggaagttgccttcagctttaatggtgggaaggattcaactgtgctcctgcatttgattcgagctggttactacctttacaagaaggactctggtgatgtagcccaaacagatgctgttaaaaactgtccactgcgtactatctatttcgaaagcccttgtgctttccctgaaatcaattcattcacttatgagattgtctcaacttatgggttacctctggaaaccatccattcagatttcaagtctggtctagaaggccttctgaaggagaagcccaccaaagcaattttcattggcacaagaattggtgatccaaatgcggttggtcaagaacagttctctcctagttcacctggctggcctccttttatgagggtgaatccaatcttggattggtcatacagggatgtttggtcttttctaataacatgtaaggtcaaatactgcagcctttatgatcaagggtatacttccattgggagcatacacgatactgttccaaatgcactccttagtgattcatcatctgagaaaagttttagaccagcatacatgctaactgatggaaggcttgaaagagctggtagaacaaaaaagattaatcctaaagtagaaatgaattctgctgcaagcaatggcatcaacgatactgagggaggacggatgatctcacgggcggcatcaatcattgtagtcggtgatgaaattttgtttggtacaactgaggataacttaggagcagccttgtgcaagaagcttcatgcaattggctggcgggtttctcatgtagcagttgttcgcaatgagattgattctgttgctgaagaagttgaacgttgtaaatctactgatgacatggtgtttatttttggtggactcgggccgctacattcagacgtttctttggctggtgtcgcgaaagcatttggagttcgtctggctcctgatgaagaatttgaagattaccttagtcaactcatgggaaacaattacactggtgaccgaaatgagatggcacagttgccagaaggtattacagaattactgcatcacaaaacgctaccattgccattgatcaaatgtagaaatgtcattgctcttgctgcaaccaatatggatgaactagacaccgagtgggattgtcttctaggtacccaggagagtggtctaatgccatcaaaaccttttgtgtcaaagcatctcagcactacactttcagatgttcaaattgcttcagtccttgcaaaactgtgcttagagttttctgatgtttacatagggtgtcatcggatatcaagagctggtcctttggttgtgaatcttactggaaaggataaccagagggtagatgcggctgccgagaagctgacaagcagctttgaaggacaattttcccaacttaacagttgcaaataagctgtcagagacacccctctatttttgccaaattctttccgcctgaagctctgagattgtgcaggactgatgatggtgctcaactgctctaaaccgacgaccaaaataaaccacggagctggtactactttgaagctacaaattttatttagggaacataggaattttgtactaggaattggtaactgggttctagcataatgtagctttgcagctaatattttgacattattatacgttccaaattatttcatttatactataatttatagcataactttactgctcgatcatgatgtcttcagttgtttgacctttttgctacttgttcgagcatagctttgcagtgcttggtgatgcaa

SEQ ID NO: 145398 - DNA, 2053 bp, Zea Mays
ctcccagtcgcccttcaacttgccagccgatcccttcgcgtttgtctccgcggttccgacgctccgcactccgctcccctctcccaagcaaacacagccgagtccacgcacgcctcccatcattcctcaaccgcctcgccggagcaaggggagtagcggaggatggagattgaccaggcggtgcgcgggtgcagcgaccgccgcatgcgcaccaagtacagcaacgccgtctacgtcgtccagcgggccttcgcgctctacccatttgaggaagttgccttcagctttaatggtgggaaggattcaactgtgctcctgcatttgattcgagctggttactacctttacaagaaggactctggtgatgtagcccaaacagatgctgttaaaaactgtccactgcgtactatctatttcgaaagcccttgtgctttccctgaaatcaattcattcacttatgagattgtctcaacttatgggttacctctggaaaccatccattcagatttcaagtctggtctagaaggccttctgaaggagaagcccaccaaagcaattttcattggcacaagaattggtgatccaaatgcggttggtcaagaacagttctctcctagttcacctggctggcctccttttatgagggtgaatccaatcttggattggtcatacagggatgtttggtcttttctaataacatgtaaggtcaaatactgcagcctttatgatcaagggtatacttccattgggagcatacacgatactgttccaaatgcactccttagtgattcatcatctgagaaaagttttagaccagcatacatgctaactgatggaaggcttgaaagagctggtagaacaaaaaagattaatcctaaagtagaaatgaattctgctgcaagcaatggcatcaacgatactgagggaggacggatgatctcacgggcggcatcaatcattgtagtcggtgatgaaattttgtttggtacaactgaggataacttaggagcagccttgtgcaagaagcttcatgcaattggctggcgggtttctcatgtagcagttgttcgcaatgagattgattctgttgctgaagaagttgaacgttgtaaatctactgatgacatggtgtttatttttggtggactcgggccgctacattcagacgtttctttggctggtgtcgcgaaagcatttggagttcgtctgcgtaggctcctgatgaagaatttgaagattaccttagtcaactcatgggaaacaattacactggtgaccgaaatgagatggcacagttgccagaaggtattacagaattactgcatcacaaaacgctaccattgccattgatcaaatgtagaaatgtcattgctcttgctgcaaccaatatggatgaactagacaccgagtgggattgtcttctaggtacccaggagagtggtctaatgccatcaaaaccttttgtgtcaaagcatctcagcactacactttcagatgttcaaattgcttcagtccttgcaaaactgtgcttagagttttctgatgtttacatagggtgtcatcggatatcaagagctggtcctttggttgtgaatcttactggaaaggataaccagagggtagatgcggctgccgagaagctgacaagcagctttgaaggacaattttcccaacttaacagttgcaaataagctgtcagagacacccctctatttttgccaaattctttccgcctgaagctctgagattgtgcaggactgatgatggtgctcaactgctctaaaccgacgaccaaaataaaccacggagctggtactactttgaagctacaaattttatttagggaacataggaattttgtactaggaattggtaactgggttctagcataatgtagctttgcagctaatattttgacattattatacgttccaaattatttcatttatactataatttatagcataactttactgctcgatcatgatgtcttcagttgtttgacctttttgctacttgttcgagcatagctttgcagtgcttggtgatgcaa

SEQ ID NO: 145399 - DNA, 1228 bp, Zea Mays
agaaatagagagccactaaatttgaagagtcgtttacagagtctattggatacaattttcttttaatattagctaaatttacctttacaaaaccatatacatagtctcttggagttgctctgatcttttctatataaattctcactattataatattgtgcggtgtattttctgcatttttgattctacaatgaagaaaagcttgtgcattgacctatagggctgcattagtgtcacaagaaaaccatgttgtggatgcattatgaaatgtaggatcctctcaattgcataactatgaattgttgttgtaccaaatggttatttcattattaaactgacaaaaatgccattttttagtatcaacttatctttgctttgaattagcgtaggctcctgatgaagaatttgaagattaccttagtcaactcatgggaaacaattacactggtgaccgaaatgagatggcacagttgccagaaggtattacagaattactgcatcacaaaacgctaccattgccattgatcaaatgtagaaatgtcattgctcttgctgcaaccaatatggatgaactagacaccgagtgggattgtcttctaggtacccaggagagtggtctaatgccatcaaaaccttttgtgtcaaagcatctcagcactacactttcagatgttcaaattgcttcagtccttgcaaaactgtgcttagagttttctgatgtttacatagggtgtcatcggatatcaagagctggtcctttggttgtgaatcttactggaaaggataaccagagggtagatgcggctgccgagaagctgacaagcagctttgaaggacaattttcccaacttaacagttgcaaataagctgtcagagacacccctctatttttgccaaattctttccgcctgaagctctgagattgtgcaggactgatgatggtgctcaactgctctaaaccgacgaccaaaataaaccacggagctggtactactttgaagctacaaattttatttagggaacataggaattttgtactaggaattggtaactgggttctagcataatgtagctttgcagctaatattttgacattattatacgttccaaattatttcatttatactataatttatagcataactttactgctcgatcatgatgtcttcagttgtttgacctttttgctacttgttcgagcatagctttgcagtgcttggtgatgcaa

SEQ ID NO: 145400 - DNA, 4903 bp, Zea Mays
atgaaaaaacgcaacgaaaccaacgaagcacaaataataggattttcaaaaaggaaaaagattagcaggaggactggaggagcgcctccgcacgggcacgggccggcagcccggcacgaagcggaaaacttgaaaactagccgagcgaactgccgtctcaattcaaaatcccgtcaactctcacccccatatccctccccgtcttccttccccccatttctcccacagacttcggcctcccgaatctcgaaccctaacctcatcggcgacgaggggagccccgcctccgcctcctgcttctctgttatgaacaacttccatgtctacgaggccattggccgcggcaagcactcgacggtgtataaggggcggaagaagaagaccatcgagtacttcgctgttaagagcgttgacaagtcgcagcgctccaaggtcctcaacgaggttcgaatgctccattccttagaccatgccaatgtcctgaaattttactcttggtatgagacctccgcacatttctggttagtgttggagtattgcgttggtggagacctgaagggcttgcttgaacaggataagaagcttcctgaaaattctatacatgacctggcttacaatcttgtcaaagctcttcagttcttgcattcccaaggaattatatattgcgatctgaagccatcaaatattctgcttgatgaatttggatgcatgaagctttgtgattttggattagcaaggcgcttaaaagacatcgagaaaactaatcctggagatgtgccacaacccatgaggggaacaccatgctatatggctcctgagttatttcgagaggcaggagtccactcatatgcttctgatttctgggcacttgggtgtgttttgtatgaatgctatacaggaaggcccccttttgtaggcagagaatttacacagttggtcaaatctataattttggatcctacaccgcctttatctgataattcatcaaggtccttccaaaatctgattgattgtttactcatgaaagatccagcagaaagattacagtggtctgaattgtgtgaccacaacttctggaaaaccagtatcccaatgatttctttacctcctcagcctgcttttgacaacatgattgaactttctgctacaccatatctagctgagagaaatggtgacaaaccttccagacagctgacaccacccaagcaccgtgaatatagtggccttcggaggaaggatgaaaattctactaagccatccatgacacctgttaaaaatgtgcaaagtgtcaagaaaaattgtggaaaaccaaaagctgagggtttcaaaggtgtaaatatcctcagaatgtctcgcattgctaaattgaatttgcaaagggaaagggacaaggagaactacaggcgtcctcccacagaaacaactgagaatgagactgaagttaatatagataataatgacatggaacttgattttggtgaaaatccagaggctgatgcacctgatgacacatatggatcggataatcctggatctgcaggaaatgaaaagcctcaaagcactgatgctaatgaagagaattgtatggcaaatcaggttgatatgcttacagatgagggttcagttaagcctgatatcatggtgaaaactgagcagaattcttgttcagataacctggatgtggaggctactccacctagtagcacgcgaaaagcacaacgtgcaaaggtaactccatgtcctggaactggttctgagccatctaacatctttgaagcattctggcatccaacagatcttgcagttaaaccagttatgcctagtaggaaagcagataaagctgtggacatggtccccacacttccttttgaagcacttacagcaagtgattatattaagttaccactggaacagatgaatgcattcaacagtcagatacttcagagtttaagtggaacctatcaggtttcagaaaaacaaaatactatcagatacctggagatgttaagcatgaattcagatgctgcgaacaaaataactaatggaccaattatgctgctactaataaaaatgcttcgactgtcaaaaacttcagtcttgcgtgtccaaattgcctcacttatggggttgctgatacgatattccactgctcttgatgtggagctggcaagttcaggaatttttaatgcactatcagatgggttaagggataaacatgataaactcaggcgattctgtatggcaacactaggagagttattattctatatttctacccagtctgatcaagataccaaggaaataaatacccaagaataccctttgaaggataacaggtctgcaacatcttggcaggttcctagtgctgtaattgcactggtgtcatctatcttgcgaaagggagaagatgatctagctcagctatatgccttacggacagtcgataatatatgtagccaaggaactgaatggacatcccgttttgcatctcaggatgcgattggacatctgtgctacatctataaagcaactggaaagcaggagagtacgaggctcattgcaggatcttgtttggcccgtctctctcgcttcagtccatcatgcattcatttaatattggaaaagatatcattcaaggatatagcatgcacacttatcaagggaaatacacgtgaacagcagattagtcttaatattctcaattcggcattagttaatagtcacactgtgacaagcatgaaccggtatattctttcattatcagatgacaaacaattggtccccgggctcatttctctaatagaacagggaactgatgttctacgtgggaagacccttttgtttgttgctctgctttgcaagaatagtcgaaggtggcttcctcatttcttttgcaatgcaaaattaatctcagctgttgatagactgggaaaagagaaggagggttttattcatcaatgtacagaagcatttgtgcagttggttgcttccttggtccctggtattcttgacactgtctccagtgatatacaacaggttatggttggcaaacgccatggacctgttactgctttagctgggcgagctcatccaaagagcacaattcatctgttccctgttattcttcatcttctgggaagtgcatccttcaagcatagagttgtgacaggccatgtattgcttcagttggcaaatcttattaagattttggaggcaccgtttcaggctagggatgatttccaaatgacattgttgcgagttcttgaggctgctacagaggagccttctgttatacttaatgaacacacagtattcatgagtcgtatcattccaagcttatctgtcttatacaagggcaataaagatggtgatgccagatttctttgtttgaagatactcgcagatgttatgattgtgatcttcagtgattcttcattaacttctgacgaacaaacaataactgatctgaaatcaatctctcagaggcattttctaccactgtacccttcttttgcagaggatgaagatcccatacccatatatgcacaaaaactgctagtaatgctaatggaacatggttgtgtaaaagtctctgatattctgcacaaagcaacagtatcccagtgctttgaatttttgctaggagatctttcaaatgcaaatgtaagcaatgtcaagctttgctttgccctggtatctgcacctgagatggacacctatattctttctcagcttcaagttgttagaagaatagggaacctactcgagtttgttgctgcaaaagacatggacgattttcttgaaccaaccctggaactttgcagagcttttattattcgtggcactggcagcaacagaagtgtcgccctctccaaaaacccggcacttcttcttgacagtgccttcagcatgagtattgctgttgatcaacaaacttgtgtcatggatatatgtgacttcggtggcaacatgggtatttttcttgagctagttggcaattcagatccgcagataagtgatttagcatcagattgtgtagtgttgttgctcaaggcagcacctcgagaggctacagtgggcttgttgacaagtcttcctaaattaagcactgtcatggacttgctgaagcatgacagccaccgatgtctgattcgcttattatatggcctagccttctcatgcagacaatacttagcccagggaatgatcctgtcaatatcagtgccagctttgatgcgagttgaagcacttgtttcagttttcaagggctccaatgatagccttcttgctgatgctgcttcttatttgagcgccgaactgcagcgcttacctcgctgtggttgaaggtgcaacttggccaaggaggcaggttggctgctattgttcaaggatgcgcatgtattccttcatccttcgtgcaccatgtacatgatgagctgagcaagtgagcaggacgtcatcaagtgaaggtactttacatcagtggctgatctcagttgcctcaatggccaagtgacactttccgctcgtagatgtgcagggtgcgagggtgttttatgctatcatttatgtgcatttcggggctgctgtatatggcgcttttgaacaataccttgaaggtggctagaagcaaaagaacacttcgttcccccgccaattttggttggcaattacctcagtttcatgtaattctgtagtacctgtaattttattgagaatactgtagtccaatttcatgtgtacatttataaattcctgtgaagttccatgtagctgttaaagagttccccatagctcctgaatctttggtactattgtgtatttttttttactttttacaatagtgataacgtggcccatttcgaagcattttcctatcttattttgcgcaaattcgtggtaa

SEQ ID NO: 145401 - DNA, 396 bp, Zea Mays
atggccgctaggttccaaaaattgcgtgaagggaagaactttgatcctttggttcttgaagattttgattcggacaatgagtgggttgatccattagctaatttatctattgttggggatgaccctcttttcacatgggagcatgttgataatgccatcggtgcatctacacaacttcaaggccgctactttcctaggagagctcatggtactcaagtgccaattcttgaggatgatgaagatggtcttgatgtgggtgatgagaatgaagacgatgacaattttgtgcttgacgaccttgacatggatgatgaagaaacaaacaacagtggtggccgtggtgatgagcaagacaaggatgatgttggtttagatgatttggatgatggttattga

SEQ ID NO: 145402 - DNA, 760 bp, Zea Mays
gtcctgccccacaccacagtggtggaaggaaaggaaacgggagggagagaaaaacccaggccccccgatctcctcctcccactccgatcgcccgaccgatcgccgagcttccctgttccctccccgcccccgcgacgccgcgacgccatggagccgccgcacgccgagcaggccgtcgccgctgtagcagcaggaggagagggcggcaccgcaagcccgggcaccggcctcgaagggccggtgcttaggcgggggctggacggcggtggggaaggggaggacggggagctgggggcggggcaggaggcgaacgcacggctaccagagcggcctggcgaggcggactgtggctactacctccgcacgggcgcctgcggcttcggggagcgttgccgctacaaccatccccgcgatcgtggcggcactgaggtgcgcgcgggcggacgattttctccagcctctgcttcccgctctcttgctttctcaatcttccccgatctgatccgtgtccgcgtccgacacgctgctgccggtgaattgagatagttaccgtttgaaacctgtgaggatcagaccgcaaccgcagaaactagcgatttgggtaatgtggttcgtccagagcggattatgcacactgctctttgtggatttctccatggtgtcttgttgttatttgacatcggatgacagcgtcaaagttttgatctgcctcactcgaaactgcactactgaggttccttccttttatggttgagacaca

SEQ ID NO: 145403 - DNA, 2028 bp, Zea Mays
gtcctgccccacaccacagtggtggaaggaaaggaaacgggagggagagaaaaacccaggccccccgatctcctcctcccactccgatcgcccgaccgatcgccgagcttccctgttccctccccgcccccgcgacgccgcgacgccatggagccgccgcacgccgagcaggccgtcgccgctgtagcagcaggaggagagggcggcaccgcaagcccgggcaccggcctcgaagggccggtgcttaggcgggggctggacggcggtggggaaggggaggacggggagctgggggcggggcaggaggcgaacgcacggctaccagagcggcctggcgaggcggactgtggctactacctccgcacgggcgcctgcggcttcggggagcgttgccgctacaaccatccccgcgatcgtggcggcactgagtttggtggaggtgccaagaatggcgcagcacaagactttccagaacgacagggccaacctgtatgcgagtattatttgaagactggaacttgtaaatttggttccaattgcaaatatcaccatcctaagcaagatggatctgtgcagtctgttatattaaacaacaatggattccctctacgcctgggtgagaaagaatgctcctactatatgaagactgggcaatgcaagtttggttctacatgtaaatttcatcatccagaatttggtggtattccggtgacccctggaatatatccaccattacaatcaccttctgtgccctcccctcatacatatgctccaaattggcaaatgggaagatcacctgcagttcctggatcatatataccaggctcatacactccaatgatgatctcatctggaatggttccattgcaaggatggagcccttatccggcatcggtaaatcctgtggcatcaggtggagcacaacaaactgttcaagctggaccattatatggtataggacaccatggatcttccaccgcaattgcttatggtggtacatacttgccatattcttcctcagctggacaatcgagcaataatcatcaagaacatggatttcctgagcgaccagggcagcctgagtgtcaatattatatgaggactggcgattgcaaatttggaactacgtgtaaatataaccatcctcgagattggagcactcctaagtccaattacatgttcagccatctatgccttccacttcgtccgggtgctcagccttgtgcgtactatgcccaaaatggatattgcagatatggagttgcatgcaaatatgatcactcaatgggtacactaggctacagttcatctgctttgccactatctgacatgccaattgctccctatcctattagcttctccgttgccacgttggctccatcttcgtcttccccagaatatatttcaactaaagatccatctatcaatcatgtagtatcaccagtggcaggacccgcgcctgttggagcaatcttgccaaaaggggtattccatcatgataccattatgcaaactcagactcctacaagtgccggcagttcaagccctggtggtgggcgctgattttactgagctggtgggagtgatcctctcatcataaattttctatcacttgacacaggcctctccaatgtgaataagctgtggtctctgtagagaagctgcggcgagggtgggtttctttaccatcagaataagagagcattgataggtcacacgcaagctcgattcactagcaattttgggttcttccgttcatgtccaaaacgggaaaaaggaaaggtttttgaatgtcaggttccgtagagcatattgggcgccttggtggggctcaggtccataccctcggtaaataattctcaggcaagaaaattttcgttgttatcaagaaaattttcacatgcagagttactgggttcctccacctttcaatttttctctttccttttgttttctgtatttcgtcatactgggagcaaggcgcattgtaatggataaaaaatgcttaattgaagagatcttgctgtc

SEQ ID NO: 145404 - DNA, 2037 bp, Zea Mays
gtcctgccccacaccacagtggtggaaggaaaggaaacgggagggagagaaaaacccaggccccccgatctcctcctcccactccgatcgcccgaccgatcgccgagcttccctgttccctccccgcccccgcgacgccgcgacgccatggagccgccgcacgccgagcaggccgtcgccgctgtagcagcaggaggagagggcggcaccgcaagcccgggcaccggcctcgaagggccggtgcttaggcgggggctggacggcggtggggaaggggaggacggggagctgggggcggggcaggaggcgaacgcacggctaccagagcggcctggcgaggcggactgtggctactacctccgcacgggcgcctgcggcttcggggagcgttgccgctacaaccatccccgcgatcgtggcggcactgagtttggtggaggtgccaagaatggcgcagcacaagactttccagaacgacagggccaacctgtatgcgagtattatttgaagactggaacttgtaaatttggttccaattgcaaatatcaccatcctaagcaagatggatctgtgcagtctgttatattaaacaacaatggattccctctacgcctgggtgagaaagaatgctcctactatatgaagactgggcaatgcaagtttggttctacatgtaaatttcatcatccagaatttggtggtattccggtgacccctggaatatatccaccattacaatcaccttctgtgccctcccctcatacatatgctccaaattggcaaatgggaagatcacctgcagttcctggatcatatataccaggctcatacactccaatgatgatctcatctggaatggttccattgcaaggatggagcccttatccggcatcggtaaatcctgtggcatcaggtggagcacaacaaactgttcaagctggaccattatatggtataggacaccatggatcttccaccgcaattgcttatggtggtacatacttgccatattcttcctcagctggacaatcgagcaataatcatcaagaacatggatttcctgagcgaccagggcagcctgagtgtcaatattatatgaggactggcgattgcaaatttggaactacgtgtaaatataaccatcctcgagattggagcactcctaagtccaattacatgttcagccatctatgccttccacttcgtccgggtgctcagccttgtgcgtactatgcccaaaatggatattgcagatatggagttgcatgcaaatatgatcactcaatgggtacactaggctacagttcatctgctttgccactatctgacatgccaattgctccctatcctattagcttctccgttgccacgttggctccatcttcgtcttccccagaatatatttcaactaaagatccatctatcaatcatgtagtatcaccagtggcaggacccgcgcctgttggagcaatcttgccaaaaggggtattccatcatgataccattatgcaaactcagactcctacaagtgccggcagttcaagccctggtggtgggcgctgattttactgagctggtgggagtgatcctctcatcataaattttctatcacttgacacagagaagctgcggcgagggtgggtttctttaccatcagaataagagagcattgataggtcacacgcaagctcgattcactagcaattttgggttcttccgttcatgtccaaaacgggaaaaaggaaaggtttttgaatgtcaggttccgtagagcatattgggcgccttggtggggctcaggtccataccctcggtaaataattctcaggcaagaaaattttcgttgttatcaagaaaattttcacatgcagagttactgggttcctccacctttcaatttttctctttccttttgttttctgtatttcgtcatactgggagcaaggcgcattgtaatggataaaaaatgcttaattgaagagatcttgctgtcaatactgaaatggctctattcacgagctcgacttgacacttata

SEQ ID NO: 145405 - DNA, 2158 bp, Zea Mays
gtcctgccccacaccacagtggtggaaggaaaggaaacgggagggagagaaaaacccaggccccccgatctcctcctcccactccgatcgcccgaccgatcgccgagcttccctgttccctccccgcccccgcgacgccgcgacgccatggagccgccgcacgccgagcaggccgtcgccgctgtagcagcaggaggagagggcggcaccgcaagcccgggcaccggcctcgaagggccggtgcttaggcgggggctggacggcggtggggaaggggaggacggggagctgggggcggggcaggaggcgaacgcacggctaccagagcggcctggcgaggcggactgtggctactacctccgcacgggcgcctgcggcttcggggagcgttgccgctacaaccatccccgcgatcgtggcggcactgagtttggtggaggtgccaagaatggcgcagcacaagactttccagaacgacagggccaacctgtatgcgagtattatttgaagactggaacttgtaaatttggttccaattgcaaatatcaccatcctaagcaagatggatctgtgcagtctgttatattaaacaacaatggattccctctacgcctgggtgagaaagaatgctcctactatatgaagactgggcaatgcaagtttggttctacatgtaaatttcatcatccagaatttggtggtattccggtgacccctggaatatatccaccattacaatcaccttctgtgccctcccctcatacatatgctccaaattggcaaatgggaagatcacctgcagttcctggatcatatataccaggctcatacactccaatgatgatctcatctggaatggttccattgcaaggatggagcccttatccggcatcggtaaatcctgtggcatcaggtggagcacaacaaactgttcaagctggaccattatatggtataggacaccatggatcttccaccgcaattgcttatggtggtacatacttgccatattcttcctcagctggacaatcgagcaataatcatcaagaacatggatttcctgagcgaccagggcagcctgagtgtcaatattatatgaggactggcgattgcaaatttggaactacgtgtaaatataaccatcctcgagattggagcactcctaagtccaattacatgttcagccatctatgccttccacttcgtccgggtgctcagccttgtgcgtactatgcccaaaatggatattgcagatatggagttgcatgcaaatatgatcactcaatgggtacactaggctacagttcatctgctttgccactatctgacatgccaattgctccctatcctattagcttctccgttgccacgttggctccatcttcgtcttccccagaatatatttcaactaaagatccatctatcaatcatgtagtatcaccagtggcaggacccgcgcctgttggagcaatcttgccaaaaggggtattccatcatgataccattatgcaaactcagactcctacaagtgccggcagttcaagccctggtggtgggcgctgattttactgagctggtgggagtgatcctctcatcataaattttctatcacttgacacagttctgataggcctctccaatgtgaataagctgtggtctctgtagagaagctgcggcgagggtgggtttctttaccatcagaataagagagcattgataggtcacacgcaagctcgattcactagcaattttgggttcttccgttcatgtccaaaacgggaaaaaggaaaggtttttgaatgtcaggttccgtagagcatattgggcgccttggtggggctcaggtccataccctcggtaaataattctcaggcaagaaaattttcgttgttatcaagaaaattttcacatgcagagttactgggttcctccacctttcaatttttctctttccttttgttttctgtatttcgtcatactgggagcaaggcgcattgtaatggataaaaaatgcttaattgaagagatcttgctgtcaatactgaaatggctctattcacgagctcgacttgacacttatatattacgtccatgtccatttcataaagtgtagcgtttcagttttgtcctaagctaaagtgttttatcagatttgtag

SEQ ID NO: 145406 - DNA, 2483 bp, Zea Mays
ttcccatgtccattggcgccacgcctctgttttaccccgtttagaggctgacatcccaggcttatccgccgctgcgccacgccgtactcgtccccgttaaacagcgccgcacggttgcggcagtggttgcccgagcgaatccacgcgtccgcccgtttcgctcgttgtctccggggtaggggggccgctccagcgccgaacggaaatccccatcagcactggccactcccgatcccccgtcccggcgtccccccaatccctctccctgcaaaaggccaccgcgacgcgaccgcgtacgggaggtgagccgcgagtgcagtgcagtgcaggcaggcaggccgagagaagagtcggcaggaagcaaccgagaccgcgaggaagcagcgagctgcactgcagcggcgcagagaaaaaaaaaagaaattctggaatagtttttttcttccctttggctccgtgaggttcctgtgcttgctcgctcgctcgcctgagcttcgatcgagccgtacgcgggccgtcgggagctcaatcaccgctctccgggagcttccgagggccgtcggatggagccgtacgcggcgacgaagggcggcgagtccgacgccggcaccggcctggaagagtcgatgcggaagctggggctcggcgaggacgacgaagcgggggaggagaagcttccggagcggccgggcgaggcggactgcacctactacctccgcactggcgcctgcggctacggggagcgctgccgctacaaccacccccgggatcggccggctccggttaatggcgttgggaagaccacaggtatggagtacccagagcgccctggacagccactctgtgaggtaaataaaaccaattttaaatctatttcttattgacattttaggtcaaaatgtattatttttttattgtcatgtggtggaaactctggttacgaaattctcgttattttcagtactatgcaaagaatggcacatgcaaatttggttccaattgcaagtttgatcatcccagggaaagtggttttgtacctgtcgctttaaacaacagtggattccctctacgtctgggtgaaaaggaatgttcgtattacatgaaaactggacattgcaaatttggaggtacatgtaaattccatcacccagaacttggttttcttacagagacgcctggcatgtacccaccagttcaaccatcacctatttcctccccacatccatatccacatcattccaactggcaaatggggaggcctgctgttgtgccagggtcatttttaccaggcccatatccaccaatgatgcttccacctacagttatgccaatgcagggatggaacccttatgtttcacctatgaaccaaactacaccagctgggggccagcaagctgttccagcagggccatcttatggcttgtcgcaccaggagccaacctctgcagtgacttatggcagtcattatgcgcaattgtattcttcttctgggacttcaagcagcaacatacaagaatatgtgtttccagagcggcctgggcagcctgaatgtgaacattacatgaagacaggaacctgtaaatatggagcagcctgcaaatatcatcatcctcaatacttcagtggaccaaagtctaactgtatactgagccctctgggtcttcccctgcgtcctggttctcagcgatgtgcttactacgcacaccatggcttttgcaagtttgggccgacatgcaagtttgatcacccgatgggtactccaaactacagtcttccagcaccatcacttactgatgtgccagtcgctccatatcctcacactttctctgttactcctattgctccatatctgctgccccctgatccgcggccgcaatacactctagccaaggatccctctgcttatccaccacaagcgcccggaactacgtacggacctgttggggcgatatcaaaggtttatgcccgccacacgcttatccgatccccgacttctggagctgctggcatgcaagcgtcgtaatgagacaagagttgagagcactagtcccctctctgtcatgaagatagatcttgggcaaaccttctcaggatttttctgccataggtggaatggggtctcggattcttttttttttgctccaattcgacttcccatcaactgtgaataacggccgcagctgacatagaaaggtctcaataaatggaaagatagggattggcaagctcattcacttgccatttttctgtccatctctgaaacgagaggaggtaattctgactgtagtcggattcagagctccgttattatctcgtgtaacgtgcacaattgcaggggattcgaatgggaaagctgatgggttccatagctctagcccaaatcttttgtttatctcgtcatcttattacatatatgatatgatgtgtataccccgtcggaacagcaacatgtatatctatctatatatattactctaaactca

SEQ ID NO: 145407 - DNA, 2396 bp, Zea Mays
ttcccatgtccattggcgccacgcctctgttttaccccgtttagaggctgacatcccaggcttatccgccgctgcgccacgccgtactcgtccccgttaaacagcgccgcacggttgcggcagtggttgcccgagcgaatccacgcgtccgcccgtttcgctcgttgtctccggggtaggggggccgctccagcgccgaacggaaatccccatcagcactggccactcccgatcccccgtcccggcgtccccccaatccctctccctgcaaaaggccaccgcgacgcgaccgcgtacgggaggtgagccgcgagtgcagtgcagtgcaggcaggcaggccgagagaagagtcggcaggaagcaaccgagaccgcgaggaagcagcgagctgcactgcagcggcgcagagaaaaaaaaaagaaattctggaatagtttttttcttccctttggctccgtgaggttcctgtgcttgctcgctcgctcgcctgagcttcgatcgagccgtacgcgggccgtcgggagctcaatcaccgctctccgggagcttccgagggccgtcggatggagccgtacgcggcgacgaagggcggcgagtccgacgccggcaccggcctggaagagtcgatgcggaagctggggctcggcgaggacgacgaagcgggggaggagaagcttccggagcggccgggcgaggcggactgcacctactacctccgcactggcgcctgcggctacggggagcgctgccgctacaaccacccccgggatcggccggctccggttaatggcgttgggaagaccacaggtatggagtacccagagcgccctggacagccactctgtgagtactatgcaaagaatggcacatgcaaatttggttccaattgcaagtttgatcatcccagggaaagtggttttgtacctgtcgctttaaacaacagtggattccctctacgtctgggtgaaaaggaatgttcgtattacatgaaaactggacattgcaaatttggaggtacatgtaaattccatcacccagaacttggttttcttacagagacgcctggcatgtacccaccagttcaaccatcacctatttcctccccacatccatatccacatcattccaactggcaaatggggaggcctgctgttgtgccagggtcatttttaccaggcccatatccaccaatgatgcttccacctacagttatgccaatgcagggatggaacccttatgtttcacctatgaaccaaactacaccagctgggggccagcaagctgttccagcagggccatcttatggcttgtcgcaccaggagccaacctctgcagtgacttatggcagtcattatgcgcaattgtattcttcttctgggacttcaagcagcaacatacaagaatatgtgtttccagagcggcctgggcagcctgaatgtgaacattacatgaagacaggaacctgtaaatatggagcagcctgcaaatatcatcatcctcaatacttcagtggaccaaagtctaactgtatactgagccctctgggtcttcccctgcgtcctggttctcagcgatgtgcttactacgcacaccatggcttttgcaagtttgggccgacatgcaagtttgatcacccgatgggtactccaaactacagtcttccagcaccatcacttactgatgtgccagtcgctccatatcctcacactttctctgttactcctattgctccatatctgctgccccctgatccgcggccgcaatacactctagccaaggatccctctgcttatccaccacaagcgcccggaactacgtacggacctgttggggcgatatcaaaggtttatgcccgccacacgcttatccgatccccgacttctggagctgctggcatgcaagcgtcgtaatgagacaagagttgagagcactagtcccctctctgtcatgaagatagatcttgggcaaaccttctcaggatttttctgccataggtggaatggggtctcggattcttttttttttgctccaattcgacttcccatcaactgtgaataacggccgcagctgacatagaaaggtctcaataaatggaaagatagggattggcaagctcattcacttgccatttttctgtccatctctgaaacgagaggaggtaattctgactgtagtcggattcagagctccgttattatctcgtgtaacgtgcacaattgcaggggattcgaatgggaaagctgatgggttccatagctctagcccaaatcttttgtttatctcgtcatcttattacatatatgatatgatgtgtataccccgtcggaacagcaacatgtatatctatctatatatattactctaaactcatgttactgtttattgggcgtgaatta

SEQ ID NO: 145408 - DNA, 1114 bp, Zea Mays
ctcgcgcgccccacctactgtgccgtccgtcccgccattggcacgcacgagcccacgatataacccgccacccctcgctctcccataccagtaccaccaacaaacttctttctcgccttgcatcggccgccggccctccatccaccgcaccagctagcaacgacgacacgctagccaggtagcgtagccgaccggcctctgcgcgcgggcattcagttcgccatggcgcgcctgctccgcgccgcggccggcctcgcgctcctcctggccgtccttgccccggcggcgtcggcgggcggcgacctggcccagctgggcgccgccgtcgagacgcggcgcggcggcgggcggacgacgtgccgcggcggcacggtgggcgagtgcatggagtacctggacgtagacgcggagggcgaggcggacgtggcgggcatggccaccggcggcggcggcggcaagcgccgggtgctgcagggcggctccggctacatcggctacgacgcgctgcgcagggacaacgtgccgtgctcgcagcgcggcgcgtcctactacaactgccagcccggcgccgaggccaacccctactcgcgcggctgcagcgccatcacccagtgcaggggctgatgcctgcctgatgatttccgttccgtttcgtccccagctattagtcgggtcttcaatttaaagaagaagacatgcatggagcgatgtcgtcgtctttgctgtgcgcgctatagcctttctcgtccgcctgaggcacgcatgactcgtccgtcgattattgtgctgcagtggacatgtgtatgtgctcctgtttctagcatatccccttgctttcaggaagaaagtgaaagtaattatatatatgatgatcgtgtaataattttcgtctacgagggagaatgaccttgtcatgcagaaaagatcaattcaagtggctcagcgttcggattagtggtttagatatatactctttaagactagtcattattagttcatgccaccaactgtggttgggctgtcatttttcatcatatgtggagagtgagtcaatgtacctagctaggagcgttgttgttggcataaataaaagcagattcgtttgcttttcaga

SEQ ID NO: 145409 - DNA, 551 bp, Zea Mays
agatacgtctcatccgttgtgtcgtcttttttttcggtgtcgcgagctcttcctccttccgcttctcttcgacagaaaactagggttttgctcttggaatctctctccccgctgccgccgccgccggacagtgcaccgacgatacgacctcctccttcctccgatctggcctttttaatccgcggatcccgtacaagatgcttcccctctcgctcctcaagaccgcccaggggcacccaatgctcgtggagctgaagaatggtgagacgtacaacgggcatctggtcaattggacacatgggagaatgccgctttttaaggcctgtaattgtgttgcatagattgcttaggacatgatgaatgaaccgagttggctggtcggtttgggggcaaaaaccagaatggttcctgtcttctggacattgaggaagcggcggcagtcaggcttgtcgctgttctcaaaaacggtttggttgatatcttatccaatctgttcagactgttcgttgttcgtagttgttccccctaaattttccactctatatgctatt

SEQ ID NO: 145410 - DNA, 966 bp, Zea Mays
agatacgtctcatccgttgtgtcgtcttttttttcggtgtcgcgagctcttcctccttccgcttctcttcgacagaaaactagggttttgctcttggaatctctctccccgctgccgccgccgccggacagtgcaccgacgatacgacctcctccttcctccgatctggcctttttaatccgcggatcccgtacaagatgcttcccctctcgctcctcaagaccgcccaggggcacccaatgctcgtggagctgaagaatggtgagacgtacaacgggcatctggtcaattgcgacacgtggatgaacatccaccttagggaggttatttgcacctcaaaggatggtgacaagttttggaggatgccagagtgttacattcgtgggaacaccattaagtatcttcgagttcctgatgaggtgattgacaaggttcaggaggaaacttccaaaagccggtcagataggaagccaccaggtgttggccgcggaagaggaaggggggacgttggtgctaaacctggaggcagaggcatcggacgtggccaagatgatggaggtagaggcagtggtggccgaggaaggggtggagttggtgccaaaggtggtaacaaaggtgggggccgtggccgtggctaaatctggtggacacatgggagaatgccgctttttaaggcctgtaattgtgttgcatagattgcttaggacatgatgaatgaaccgagttggctggtcggtttgggggcaaaaaccagaatggttcctgtcttctggacattgaggaagcggcggcagtcaggcttgtcgctgttctcaaaaacggtttggttgatatcttatccaatctgttcagactgttcgttgttcgtagttgttccccctaaattttccactctatatgctattatacaccctctctttcttcctgcaacggttcctcctatatatattctactatgtctcacac

SEQ ID NO: 145411 - DNA, 3439 bp, Zea Mays
ggcgaagcttaagggtctggaaagcttgcaggcgaaggcgcggcattccattgtgcgccggaaggatctttagccggcggccatggcgctgggggtgttagtggtggaggaggggaggcagcagcaggaggcgccgccgccgctcgccgtggaggcgcttcgcgacaaaatcgtcgagaaggtgaaggcgaaccgcgtcacgctgatcgtgggggacactggatgcgggaagagttctctggttccccagttcctcttagaagaaaatatggagcctatcctgtgcacacagcctagaaggtttgcagtggtagccattgctcgagcgatagctaactctcgcaattggcagctaggcgaggaggttggatatcatataggtcactcaaatatgtcggatctcaactctaaaaggtcaaaaattgtgttcaaaacagctggtgtagtattggagcaaatgtgtgataggggaattgctgcattaaagtataaggtcattattcttgatgaggtacatgaaagatccgtggaatctgatcttgtccttgctagtatcaagcagtttttgatgaaaaagagtgacttaaggttagttttgatgtctgccactgctgacattactagatataaagaatattttagagacctagggagaggcgaaagggttgaagtgattgccattccctgcagtccacatacaagcatttttcagcgcaaagtcctatacctagagcagattgctgatattctcaagataaattcccaattgctttcatcaaaatattgctctggtccggatgcttctgctgatgctgaaataaattatgatgtttatgaacttatccacaagttattgttgcatatacaccaaaatgaaccagacattagcaagagcattttggttttcctccctacatactacgcattggagcagcaatggatccgtctactgccttttagttcaacctttaaggtacatattcttcaccggagtattggcactgatgaagcacttcagactatggagatctcaaagtcttgccgaaaggtgatactggctacaaatattgctgaatcatcagttactataccaggagttgcatacgttatcgattcttgtagatcattgcaagtatattgggacccaatcaggaaagcagatgcagctgggcttgtttggatttccaagtctcaggcagagcagcgtaaaggcaggacaggtcgaacctgtgatggtcaaatttatcgtttggtgactggaacattttatagcagtttaaatgatcatgaatatcctgccattttgagatgctccttaagggagcaagtgctcatggtttgttgtgcagagcccagatcgataagcgaccctagttcacttctgcaaagagttcttaatccaccagatccagatgctattgaagaagcgctagaatcactagttcaaattcatgcattggagaagacagcttctggacgctacgaacccactttttatggctgtttgctcaatagtttgccattgtcatttgattcttctgttcttgcccttaaattttgtgagcttggtgctatccatgaaggaattctaataagcatcatgctggacatccagccgcttcctatcttgcacacttttggctatcgagaactgtgccagaagtacatagacaattatttcaagggaaatggcagtgtacaaatcggcaaaaaggaagctaccaccattggaaatctttgtgcatttcaattttgggagcgcgtttttaaggacaaacaccgtctggaatatctaaaatatgtggcgaagactcaagaaccagaagaatcacataccttccttactaaacctgaagaggaatggtgtgcagttcacaacctcctccctgcagcgtttaagaacatatctgaaatttatgatgttgttgtgatgcaactgcaccggttcaggccaagttttcttgtcaaaatcaatcctccaaagtttcttcagccttctgaattcaaccacacatgtctccatcgtgaaatactggatctagaggaggacgtggattcactctcattagagactgagaatgctcacagcgattcacagaagcgatgtgctgcaactccatatgtttcaccaactgattttgagaccagcaccattgttgaaatgctaaagacacttgtcaagatgaaaacacaacatgctgagaataaaatttcttataaggggcgacttggttctaatgtgaagccaaccttgggaactcaggcgtgcgtgttttttgctaatggatcatgcaatcttggggatgtgtgccgcttttctcattcatcccttgctcctaaaccagtatgcaagttctatctcacactacagggttgtcgaaatggcagatcttgtccatactctcatgattctggctcattggtctctgcacctgtcacatctggaatatgctctcaggaaagcagaggcacctcattgtgcgatacaaggttgcttcctgctgatggagatgggcatattcttgtcgtgaatgacaaaaccctgcagttctctagtaagcttagccagttttacgatgccggtaagattgttgcttctacacctggtcttcagtctgctgagtcttattcagttccaaagggcctcaagatactcgagaatttggccgatccatctagtctaatcactgggcttgagcatgaattgccagttccttgggcaaaacttaagcgagttttctggttcgatggctttggtaacgatgagtcagccaccgagcaggctctcttgcagaagttcttcgcgagtattgccatcaagattttgtcggaacagctgtccggcctgcaggtcatcctgatcatgaaaaacacgagatacattcagttgcaggtggaaagattggcgcgggagtgcttctttttcctcagcgaatcgtttctgtctgatgaagcaaatctaggatggttctcagatacctccacgcacacaagaaggatgcaagtggcagcaccggtgacctacgtcttcaacctgcaccctccctcctctactcagtttggggattatccggcggaacttcgggaggctttacgcagggattagttaggccaggttatccacgtgaatagctagtgtcatctggatttcgtagcagtgaaccttgttcgtggtattggcactgaagccctttctgtctgtgagttgtgagcttgcttactcgttcttagtaagacgctgaggaatattgcataactccattcaggtgtcaactgtcggtcgtctcatggacagcttattaggccgctgcttgcaaatatcatttgtgggtgggcgtaaatatgcttgacctgctaagttaacgtacgttttagtgcttttgttgactgcgaaattgtaccttcacgatgtcatctattgtgtgcagacgaaagcatt

SEQ ID NO: 145412 - DNA, 3371 bp, Zea Mays
ggcgaagcttaagggtctggaaagcttgcaggcgaaggcgcggcattccattgtgcgccggaaggatctttagccggcggccatggcgctgggggtgttagtggtggaggaggggaggcagcagcaggaggcgccgccgccgctcgccgtggaggcgcttcgcgacaaaatcgtcgagaaggtgaaggcgaaccgcgtcacgctgatcgtgggggacactggatgcgggaagagttctctggttccccagttcctcttagaagaaaatatggagcctatcctgtgcacacagcctagaaggtttgcagtggtagccattgctcgagcgatagctaactctcgcaattggcagctaggcgaggaggttggatatcatataggtcactcaaatatgtcggatctcaactctaaaaggtcaaaaattgtgttcaaaacagctggtgtagtattggagcaaatgtgtgataggggaattgctgcattaaagtataaggtcattattcttgatgaggtacatgaaagatccgtggaatctgatcttgtccttgctagtatcaagcagtttttgatgaaaaagagtgacttaaggttagttttgatgtctgccactgctgacattactagatataaagaatattttagagacctagggagaggcgaaagggttgaagtgattgccattccctgcagtccacatacaagcatttttcagcgcaaagtcctatacctagagcagattgctgatattctcaagataaattcccaattgctttcatcaaaatattgctctggtccggatgcttctgctgatgctgaaataaattatgatgtttatgaacttatccacaagttattgttgcatatacaccaaaatgaaccagacattagcaagagcattttggttttcctccctacatactacgcattggagcagcaatggatccgtctactgccttttagttcaacctttaaggtacatattcttcaccggagtattggcactgatgaagcacttcagactatggagatctcaaagtcttgccgaaaggtgatactggctacaaatattgctgaatcatcagttactataccaggagttgcatacgttatcgattcttgtagatcattgcaagtatattgggacccaatcaggaaagcagatgcagctgggcttgtttggatttccaagtctcaggcagagcagcgtaaaggcaggacaggtcgaacctgtgatggtcaaatttatcgtttggtgactggaacattttatagcagtttaaatgatcatgaatatcctgccattttgagatgctccttaagggagcaagtgctcatggtttgttgtgcagagcccagatcgataagcgaccctagttcacttctgcaaagagttcttaatccaccagatccagatgctattgaagaagcgctagaatcactagttcaaattcatgcattggagaagacagcttctggacgctacgaacccactttttatggctgtttgctcaatagtttgccattgtcatttgattcttctgttcttgcccttaaattttgtgagcttggtgctatccatgaaggaattctaataagcatcatgctggacatccagccgcttcctatcttgcacacttttggctatcgagaactgtgccagaagtacatagacaattatttcaagggaaatggcagtgtacaaatcggcaaaaaggaagctaccaccattggaaatctttgtgcatttcaattttgggagcgcgtttttaaggacaaacaccgtctggaatatctaaaatatgtggcgaagactcaagaaccagaagaatcacataccttccttactaaacctgaagaggaatggtgtgcagttcacaacctcctccctgcagcgtttaagaacatatctgaaatttatgatgttgttgtgatgcaactgcaccggttcaggccaagttttcttgtcaaaatcaatcctccaaagtttcttcagccttctgaattcaaccacacatgtctccatcgtgaaatactggatctagaggaggacgtggattcactctcattagagactgagaatgctcacagcgattcacagaagcgatgtgctgcaactccatatgtttcaccaactgattttgagaccagcaccattgttgaaatgctaaagacacttgtcaagatgaaaacacaacatgctgagaataaaatttcttataaggggcgacttggttctaatgtgaagccaaccttgggaactcaggcgtgcgtgttttttgctaatggatcatgcaatcttggggatgtgtgccgcttttctcattcatcccttgctcctaaaccagtatgcaagttctatctcacactacagggttgtcgaaatggcagatcttgtccatactctcatgattctggctcattggtctctgcacctgtcacatctggaatatgctctcaggaaagcagaggcacctcattgtgcgatacaaggttgcttcctgctgatggagatgggcatattcttgtcgtgaatgacaaaaccctgcagttctctattccaaagggcctcaagatactcgagaatttggccgatccatctagtctaatcactgggcttgagcatgaattgccagttccttgggcaaaacttaagcgagttttctggttcgatggctttggtaacgatgagtcagccaccgagcaggctctcttgcagaagttcttcgcgagtattgccatcaagattttgtcggaacagctgtccggcctgcaggtcatcctgatcatgaaaaacacgagatacattcagttgcaggtggaaagattggcgcgggagtgcttctttttcctcagcgaatcgtttctgtctgatgaagcaaatctaggatggttctcagatacctccacgcacacaagaaggatgcaagtggcagcaccggtgacctacgtcttcaacctgcaccctccctcctctactcagtttggggattatccggcggaacttcgggaggctttacgcagggattagttaggccaggttatccacgtgaatagctagtgtcatctggatttcgtagcagtgaaccttgttcgtggtattggcactgaagccctttctgtctgtgagttgtgagcttgcttactcgttcttagtaagacgctgaggaatattgcataactccattcaggtgtcaactgtcggtcgtctcatggacagcttattaggccgctgcttgcaaatatcatttgtgggtgggcgtaaatatgcttgacctgctaagttaacgtacgttttagtgcttttgttgactgcgaaattgtaccttcacgatgtcatctattgtgtgcagacgaaagcattctgaaatatc

SEQ ID NO: 145413 - DNA, 2088 bp, Zea Mays
ccgccgctgccccatttcccttcgccgcgaaaaccctagaaactacccaccccgaccacccgccgccatgtcatccacaacgccggccatcgcgtcccccgcctctgagcaagccaaatcgaagaaaaagaagcacagatcgaaggacgacccctccgctgctgccgccgacccaccgtcgctcgctgaggccgaggagaagactgatggctacctcatcaagccgcagtcccttgttccgtccctcgacacctccacctggccgctcctcctcaaaaactacgaccgccttaacgtccgcaccggccactacaccccgctaccctccggccactcgccgctcaagcgtcccctcgccgagcatctccgttacggcatcatcaacctcgacaagccgtcgaacccgtcctcccacgaggtggtcgcctggatcaagcgcatcctccgcgtcgagaagaccggtcacagcggcacgctcgaccccaaggtgaccggcaacctcatcgtctgcatcgaccgcgcaacgcgccttgtcaagtcgcagcagggcgctggcaaggagtacgtctgcgtcgcccgcttccacgccgccgtgccggacaccgcgcgagtggcccgcgcgcttgaggcgctcactggcgcggtgttccagcgcccgccgcttatctccgcagtcaagcgccagctcagggtgcggacaatctacgagagcaagctgctggagcacgatcccgagcgccaccttgccgtgttctggatctcatgcgaggcaggtacctatgtccggactctgtgtgtgcaccttgggctgctccttggtgttggtgcgcatatgcaggaactgcgccgtgtcaggtcggggatcctaggggagcaggacaacatggtcaccatgcacgatgtgatggacgcgatgtggtctctcgacaactacaaggatgagtcatacttgaggcgtgtcgtgatgccactagaggtactgcttactagctacaagaggcttgttgtgaaggactccgctgtaaatgctatctgctatggtgctaagcttatgattcctgggttactccgatttgagaatgatattgagaccggggaggaagtggttctcatgacgacgaaaggggaggctatcgcgattggtatagctgaaatgactactgctgtgatggcgacctgtgaccatggtgcagtttcaaagatcaagagggtagtgatggacagagatacatacccaaggaaatggggacttggcccggtggcactcaagaagaaaaaactggttgctgagggtctacttgacaagcatgggaagccaaatgagaagacaccaactgagtggcttcggaatgtggtgcttcccactggtggtgatgtttcaattgccagcattgcagctgctcctgagccagagaaggtgaaggtggagccggacacagctgtgactgaagaggtcaaggagaagaaaaaaaagaggcagaaggatgatgctgaggatactgatgcttctgttcctgcgaagaagatcaaagttgaggaagccactgaagcagtggaaggggagaagagtgagaagaagaagaagaaaaagaaagacaagggcgagtcagagccagctgaggtcgttgagggcaaggaggaggttgctacaggtgacgagaaggggagtgagaagaaaaagaagaaaaagaagagcaaggaagcaagtgatgctgcaaaaccagagagtgctcagattggagatggcacaggcaccgagaagagtgagaagaaaaaagagaagaagaagaagagccgagatacagaggaggcacaataggtgtagtttatgttggctagctacccttgtttagagatgctgggaagtttgagatgcctttcagatgctggggaagtttgagatgcctttcttgcttgccttgtatctgttgcaactgctatgcctgatgtaccatccttaggttattgctattctactgcttaaaactgatatgccaagtggtggcattttcattgaaactcttgaacagcgaaggttgtattgttgtttcacttaccagataatgcaacgagttttgttttgctctc

SEQ ID NO: 145414 - DNA, 130 bp, Zea Mays
ttgaaacaatgtgaaattcggttcgatgaacaaagaggatatatggtgacacgtgactgtaacaagacatggcgagaactcaaaactctaaagggttaaactaagacccacgacttgacaaaaaaacaaa

SEQ ID NO: 145415 - DNA, 91 bp, Zea Mays
ttttttttatggtcttttatcatgtggttttcttagcccccatgaatctctgttctgcgtccgcttttgtccacggttttttggtatctaa

SEQ ID NO: 145416 - DNA, 1247 bp, Zea Mays
agagcctgtttcgtgcgccagctaattaagttgagccacaagagctagagcagaggagcaccagtgttcacagcatcaaccgatcgattgtcggagccacgaccatggccgaggcagctgctgagaagctggtctgcgtgaccggagctggaggcttcatcgggtcatggctggtcaaggagctgctccaacgcggctacgttgtgaggggcaccgcgaggcaccctgaggaccccaagaatgcccatctgctggcactggatggagctcaagaacggctatctctgtaccatgctgacgtgctggactacatgtcgctttgtcgtgcgttcagcttatgtcatggtgtcttccatgttgcctccccggtgtcgaatgatcctaaccttgtgccggttgctgttgagggaacaaagaacgttctgaacgctgcagcagacatgggagtgcaacgtgtggtgttcacctcatcttacggagctatccacatgaaccctaacaggagccctgaccagactctggacgagggttgttggagtgaccctgaattctgcaaacaaacacagaactggtattgctatgcaaagatggctgctgaaaacactgcaatggaagaggcattaaagagagggatacaactactaatagttgtcccatcagtgacaataggtagaatgctacaaccaacattaaacataagtttagccaatgttgctgcctacatgatgggcacaaagaaggcatactcaaatgtaattggcggatatgtcgatgtgcaagacgttgcccttgcccatattttggtgtatgaagatttacgcacgcatgggcggtacctctgcataggtgacatgctacatctatcaaagtatgttcaaatgatgagagaactcttcccacaatacccgatcaccaacaaatgcaaggatgaaaacaagccaatggttaagccttacaagttctccacaaaacgccttggtgctttgggtatgaagttcactactttgaaagagagtttatacaacacagtggtcagcctacaggagaatggtcatatcccaatattgctacataagtcatccctatgaggaacaaggatacaaaagatagatttcaacaagatggtgttaatgcctcagttggtatacatggactatgtatgaacatgagaaatatgattctaaaagtgaataaccactcaaattgtccaataaataaaatatggcaaacttgaagttgttgttcaa

SEQ ID NO: 145417 - DNA, 1277 bp, Zea Mays
gagtctgtttcgtgcgtcagttcagttcagaccatcagagctacggcagcggaaaccagcatctatcaaccgatcgatcgaccatggccgaggcggctgctgagaagctggtctgcgtgaccggagctggaggcttcatcgggtcatggctggtcaaggagctgctccaacgcggctacgttgtgaggggcaccgcgaggcaccctgaggaccccaagaatgcccatctgctggcactggacggagctcaagaacggctgtctctgtaccatgctgacgtgctggactacatgtcgcttcgtcgcgcgttcagcttgtgtgatggcgtcttccatgtcgcctccccggtatcgaatgatccggaccttgtgccggttgctattgagggaacaaagaacgttctgaacgctgcagcagacatgggggtgcaacgtgtggtcttcacctcatcctacggggctgtccacatgaaccctaacagggaccctgatcggacagtggacgagagttgttggagtgaccttgaattctgcaagcaaacacagaactggtattgctatgcaaagatggttgctgagaagactgcaatggaagaggcatcaaagagagggatacaactactaatagttgtcccaccagggacaataggtagaatgctccaaccaacattgaacttaagtttatccatagtggccacctacatgaagggcacaaagaaggcatactcaaacgcggttggtgcatatgttgatgtgcgagatgtcgcccttgcccatattttggtgtatgaagatgtgagcacccatggtcggtacctctgcataggtcacatgctacaccaatcggagtttcttcaaatgatgagagatctcttcccacaatacccgatcaccaccaaatgcaaggatgaaaacaagccactgatcaagccttacaagttctccacacaacgactcaatgctctgggtatgaagttcactactttgaaagagagtttatacaacacagtggttagcctacaagagaatggtcatatcccagtactgctacataagtcgtctctatgaggaataaggatataaaaagatggatttccacaagatggtgtcaatgccttagttggtaaagttggactttgtatgaacatgaaaagatgattcttaaagtgaataaccactcaaattgtccaatgaataaaataattcaaagttgaagttattgttcaatatattttttgtaagcaatttgtgttcatatattccttgtttttcgaaagt

SEQ ID NO: 145418 - DNA, 1462 bp, Zea Mays
ccgaagccaagagcattgcgaatgcgaacccgcgacaagcttattgctcctttcggtccttcccctgcgcgccgcgagtgaattccgctaccccaatcaatccgacgccagagagagagtggcgactggcgacgcggtccggtccccccaattcccaacggccggcggcgcgacaccccgatccggatcccatcgcctgccgggagcctcgattcgggcggcggggacgacgattcgaccgcgtcggtaaccaggcaggggaaaggaggggatgagcttccaggacctggaggcgggccacgtccggggggcgccgcccggcggcggccggaggagcggccgggcggggggcgccggcgccggcgccggcgcgtcgcaggccgtggcgtcgggcgtcttccagatcaacaccgccgtcgccacgttccagcgccttgtcaacacgctcggcacgcccaaggacacccccgacctccgcgacaggatacataaaacacggcaacacataacacagctagtgaaggatacatcagacaagcttaaacaagccagcgaggcggatcatcgcgttgaagtcagcgctaccaagaagattgctgatgcaaagctagctaaagatttccaagcagtcctaaaagaattccagaaagcccaacgattagcagcagagagagaagctgcatatgcaccttttatttctcaagcgggcttgccacagagctacaactcaagtgaagtgaataatggtgctgataggttggcagagcagcgcacacagcttctagaatctagaaggcaggagttggtcttcttggataatgaaatcgtgttcaatgaggccatcattgaggagagggatcagggaatacaagagattcagcaccaaatcactgaagtaaatgaaatcttcaaagatctcgctgtgctagtccatgatcaaggagcaatgatagatgacattgattcccatatagagaacgccgttgtagcgacttcgcaggctaaaggccagctttcaaaggctgctaaaactcagaagtcgaactcttctctgatatgcttgttgctcgttattttcggagtggtcctgctcatagtgataatagtacttgcagcctaaaagcttggaaggcagctggggttccgaaatctgatcgagagcttattgcgacaaattccttcataagttatttttgctgtgctgctaggaatgattcctggtacccaggcggtgattggcgctctgcttgtggtgtggcggtatatgtggtgatgatgaaatctgatacataaaagtactctttcctgcaagtgtagtgcctcatgcacgtttttgtttatatattgtgatgtatgagtgcgtgctgtagaacaaggttggattatccgtggcatgaagtttctcgatctcatgagaaacgcttttctatatttcatctcgcactacgcttctctatcagta

SEQ ID NO: 145419 - DNA, 2250 bp, Zea Mays
ccacccgcactcctcgcggacactggcaagacgcatgcagtgcagcttcagcaatggcgtcgtcgtcgtctacgaccgctactaccagctgctgccccctactgctggcgctcttatgggtcctcatggcggcacaccgcggccacgccgccgccgtgttcaccggcctggtcttcgagagcccgggtgaggcggaggccttcgaggacgcgctgctgcgccaggcctgcttcaacgtctccttcttcttgtccgcgggtggccgccgcgaggcctgcgtgtcgcggctcgacacggcgcggggaggcgcgggcagcgggcccgtgcccgtgctccgcgccgcgctgcgcgacacgctcggcgaggccgtgggcgccgcgggagcggtccgggggctcgcctcgctgtccaaccacgcgcgcgaggaggtagcgctgcgcgactgcgtcgagctgctgggatactccgtcgacgagctcgggtgggcgctggacgctatggccgccgacgacaccgacgacggcggcggcctggagctgctggactcgcccggccgccgcagcgcctcaagccgcgccgagaacgacatccacgcgtggctcagcgcggcgctgggcaaccaggacacctgcgtggccggcttccacggcaccgacggccgcctgctgcgccgcgtcgaggccgccgtagcgcagctcacgcagctggtcagcaacctgcttgccatgcacaagcgcctgcgcagcatcacgccgctgcgccacggacctcctaaaagtaacagcgcctcctccggcgccggcgacgacgagctgccgccgtgggtgatggacgtcgaggacgaggaggagctcgtcgccaagcgcgcccgccgcgcaggcaggacgtcgtcgacgcgcgtggacgtcgtggtggcgcaggacggcagcgggcgctaccgcaccgtcagcgaggcggtggcacgggcgcccagccacagcaagaggaagtacgtgatctacgtcaagcgaggggagtaccacgagaacgtggaagtcaggaagaagaagaccaacatcgtcatcgtcggcgagggcatgggcgagacggtgatctccggcagccggagcttctccagcggctggaccaccttccgcagcgccaccttcgcggtgtccggcgccgggttcatcgcgcgggacctgacgttccgcaacacggcgggtccggcggcgcaccaggcggtggcgctgcgcgtggactcggaccgctccgccttcttccgcgtggccgtggaggggcaccaggacacgctgtacgcgcactcgctccggcagttctaccgcgactgccgcatcgccggcaccgtggacttcgtcttcggcaacggcatcgtcgtggtgcagcgcagcctcgtcgccacgctgccgctggcgcccggccagacgggcagcgtcaccgcgcagggccgcaaggaccccaaccagaacacgggcttctccttccacggctgcgtgctggaggccaagtacccgacgtacctgggccgcccgtggaagcccttctcgcgggtcgtggtcatggagtcctacctgggctctggcatccaggcccgcgggtggctcgagtgggcagctgctggctcgggggaccacagcccgggcctcgccacgctgttctacggagagtacaggaactacgggcccggtgcgggcgtcgcgggccgagtgaagtggcctggctaccacgtgatcatggacgccgccgtcgccagccggttcaccgtcaggcgattcatcgacgggcttgcgtggttgcccggcaccggcatcaccttcacggcggatctattcaggagatgacgatggccagcgctaatgcagttgcttgattgggttacagtattttttttgaagggtgcacaaaataaggatattttagtatcatattataaagatcataagtattgctaaccacaaaataaggacatattatattataatgatgaatataaaattgccttttttttgggacatagggatataaggtgttaactttgtgcgtttttccttgagttgatatcactttggtaagtaattagggttgtaatgtgttgcaaactaagtatgtacgtaaaaacgtaattgtgttatattggtacagaaagaccctaagatgtaaactgaacaagtatataattgttctattttatgagataactagatatgtgtccgtgcgttgccatgaggcgatgggagcatgggtttccgt

SEQ ID NO: 145420 - DNA, 4292 bp, Zea Mays
atgtcaaaacattttagagtcatatctagatttatccttaatatatttttgcaagtctttgacagatatttctatcttaaaagggttgacgcggtgcggcgggtgacagaggcgtacaaggggaggcgcctcatggtaggcgtcgacgacgtcgatctgttcaaggggatcgggctcaagtatcttgtgatggagcagctgctcgtggagcaccgggaactccgtggccgcgccgtgctggtgcagatcgccaaccctgcccgcagcgaagggcgcgacatgcagggcgtgcaggacgaggccagggccatcagcgcctgggtcaatgtgcgttttggcacccccgggtacacgtcgatcgtgctcatcgacggcccagtgacgtcgcaggagaaggccgcctactacgcagctgtcgagtgctgcttgctgagcgccgtgcgcgataggctcaactggatcccgtacatctatatggtatgccggcaggagagcaccgcgctcggagacgacgcgcccaagcggagcgccatcgtgctctctgagttcatcggttgttccccatccctcagcggtgcgatccgcgtgaacccgtggagcgtggagtccgtggcggaggccatgaacgtcgcgctgcggatgccggaggccgagcagcggttgcggcacgagaagcactacaagtacgtgagcacccacagcgtcgcctactggacgcggtccttcgactcggacctacaacatgcctgcaaggaccatttctcgcgtcggcattgggggatcgggttcggcatgagcttcaaggtggtggcccttagcccgaacttccggcggctctccgtggagcacattgtcccttcgtatcagaggacggagaaccggctgattctcctggactacgacagcaccgtgatgtcggagaattcgatcgaccggacgccgagcagtgaggtcatctctgtgttgaatcgtctgtgcgaggacccaaagaatagagtgttcatcgtgagcggacgggggaaggatgagctgagtaggtggttcacccccctgcgagaagctgggcatcgcggcggagcacggttacttcacaagcaatggtacccgcaaatcctagcaggggctgggcattggagccgtgcgcgcaggatcatgccggtcgcgctggccgagtgcagccgcgccgcgctggccaagtccgaccaacatgccaaggcagaggcgacaggagttggggaaaatgaacagttgtctaattatggggatactaaatcagctcgaactgttatgctggttgaactaaaaaaactcattaaagccaaccctcttctccaggaaaaacttgtcttcccgactcttaaggcatcacgcctccgaactttaattaatcaaagcttgaattggcagcatcaacattgtaagaatcctcgtccaaatccagatatcaaaactttattcactgaccatacatgtactttacccaatggagctcctgcatcacgggtatctgtaccactggcagctgttccaaaggctggtgccgcatatccacccctgacagctcatactccactccaacttcctccacctagtccatctttagctcgttggctgacgaatacagccgtcccttcatctgttcagtctgctgttgtagcagcctcgtcaatacctgttccacccaatcaagtgcctgagcaactaatgaagcgcttgaggcctggtggacatggcattggtgagaccacatatcctactcccattcctcaacgtgcatggtcaatggatgatcttccaaggacagttgcttgttcattgtcacatggatctaatgtaactagcatggattttcatccaactcgccatacactgcttctagtgggatctgctaatggtgaatttacactttatgagatcggtctgcgtcaaacattactttcaaagccctttaaaattctggatacaaatgcatgctcaccacaatttcagaatgctgttgttaaagacccccccatgtccattaatcgagttacctggagccctcatggagaattgattggagttgcattcacaaaatatttgatccgtgtatatgcatatcaaccaccaaatgagacacgacatgttctagagattgttgctcattctggaggtgtaaatgatatagcattctcacgaccaaacaagcaactttgtgtggtcacctgtggagatgataaactgataaaggtaggagatgtgacttatggaaaattaatttactttttacttggcttgtctccttgaacttcattttcgttttttaggtatggaatatgcatggacagaaattatttacatttgaagggcacaaggcgcctgtgtattctatatgtgcgcatcacaaacagagtattcagttcatcttctcaacttcccttgatggaaaaattaaggcctggctttatgacaatgtgggatctagggtggactatgaagctcctggcaagtggtgtactactttgctatatagtgctgatgggactaggttgttctcatgtggaacaagcaaagagggagactcatatttggttcagtggaatgaaaatgatggatctatcaagaggacatattctggattccgtaagaggtcagctggtgttgctggtgtagtgcagtttgatatagctcagaatcacattttggctgctggtgaagataacaagattaaattttgggatgttgataataataatatgctgatctgcaccgacgctgaaggaggcctcccagctcttcctcgcttgaggttcaataaagaaggcaatcttcttgctgttactacagtggacaatggttttaagatacttgcaaatgctgatggactcagaaatctacgcgcattaggtagcaggcctcctttcgaagcatttaggctacaatacgaagatgcttctatgaaggtctcaggtgctcctgttgttgctaccatatctcctaacataggccgaatggatcacttggataggaattctcctgcaaagccatctcctatgctgactggtggcgatacagcatcaagaagcatagatataaaggcaagaatctcagaagaaaagtctgataaagcaaaagcttcggaactaatggaggttctaaatccccaacaatgccgtgtagcaacaatgccagaaactcccgatcaggctagaaaggttgtccgacttctgtacacaaattctggtgttgggttgctagcactagggtcaaacgccattcaaaggctatggaaatggagtcgaaacgagcaaaatcctagtggaaaagccacagccagtgttgtgccacaccattggcagccaaatagcggtcttgtcatgacaaatgatacatcggataccaatccagaggaggcaatcccatgcattgcactctccaagaatgattcctatgtgatgtctgcttgtggtgggaaggtttctttgtttaccatgatgacatttaaggtgctgacaacattcatgccgccaccaccagcatcaacatttttagcatttcaccctcaagataataacatcatagcaataggaatggaagattcaaccattcacatatacgatgtcagggtagataaggtaaaaactgaactcaaaggacatcaaaagaggataactgggttggcattctccaccaaccttggcgtacttgtttcttcaggcgccgatgcacagctctgtgtgtggaccaatgacacctgggaaaaaaagagaacagtctcgatacaaatgctagctgggaaggctccttcaggaaatacacgggtccagtttagttctgaccaaaatcacttgctagtagtacaagagactcaactagccatatatgatgcatcaaaaatggagaggatctatcagtggataccgcaggacacattgtcagcttccatatcccatgcatcatactcatgtaacagccagctagttttttctgccttcattgatggtaacataggtgtttttgacgcggagaacttgagattaagatgccgaattgcgcaatcggtgataaacagcaatccacatgttcaccctcttgttgtcgccgcacatccgcacgagccaaaccaatttgcggtggggctgtcagatgggttcgttaaagtgctggagccattggagtccgaaggaaaatggggaacacctgctccggtgaccaatggcacccccaacggcaagacaccagcttcgtcgactacgagtaaccctgctacggaccaaatccaaagatagattgtatttcctaagcattcttct

SEQ ID NO: 145421 - DNA, 322 bp, Zea Mays
gcagagtgatgtttgaatatggatatatagatgaataaactgctggagatagccttatatatagcaccaggcacctaagaaatgtatgtttcattattccagcaatccacatgttcaccctcttgttgtcgccgcacatccgcacgagccaaaccaatttgcggtggggctgtcagatgggttcgttaaagtgctggagccattggagtccgaaggaaaatggggaacacctgctccggtgaccaatggcacccccaacggcaagacaccagcttcgtcgactacgagtaaccctgctacggaccaaatccaaagatagatt

SEQ ID NO: 145422 - DNA, 895 bp, Zea Mays
gagatgaatattagagtatccaaacataagcattttgcaaaccgcgacaacaagagactaaaaaaaagcaaatttgccgtctgcaaaacccctcccacagccgtcgccccccgccagcccgcctgcgagagaagtccgcttcatccgttcgccgcctcaaggacgagatggacacatcaagccctgcagcacttgtcaatgcacagatgctgaacatgtttgttgggcgaagagtgcgcacggttgttcaagtccaacacaatgaaggtggagtgcttgtcgggcagtccaccgatggccatcagttatgtgtcaaaagtgccatggacgtccccgtttcacactttatggaggtttatggaattgctgaaaacagccagaccatccgtgctgaagtttgcacagattttggtcccaactttgatcccaaggtttttgatgagttgtgcaagctggcgagtggcaggttcaagcacttgttcctgtagagataatcatcgcatggaggatcttcagccaactgaagcttgtttgaaactgaatgtttcggctttaaatttaagatttggctacatgttccttcattgcatggaggaccttcagtaccctgttactcgtcattactggacttctattagcatgtataagcaacgtaggactgcgaatacaagcaaaatatgtcatgtagttgaagaacctatggtttttttctacctttaggcaatccaaccctaagctaagcaaaatatgtcatgtagttgaagaacctatggtctttttctacctttaggcaatccaaccctaagctttttatgttgctgtcgcttgcattgggaccctgagttgctacaattgtcatggagtttgatgagaggaaaaatgattctaatatgct

SEQ ID NO: 145423 - DNA, 2739 bp, Zea Mays
atggctggcagagcttggcacccgttgctggtgctgctactcgtcgccggcgttgctgccttcgcagagtccaaggtgtacgctccggcggacagggtgttgctcaactgtgggtcgacgacggacggcctggactcggacgggcggaggtgggcggccgacacgaacgacaacacgtggctgactgactctggcaagtcgtccgtgatgatggcggcagacagggcggacaatgggctgccgtcccccatcccgtacatgacggcgcgggtgttcaccgtggaggccgtgtacaacttcaccgtgaacccgcgggaccggcactgggtgcgcctccacttctacccgtcctcctacaacgggctcgccgccgacagcttccacttctccgtgtccacgtccaccggcatcacgctgctccgcaacttcagcgtctacacctacgcaaaggcgctgacccaggcgttcatcatccgggagttctccctcccgccgacgcccgcggggttcctcgccctcaccttcacaccgacgccgatgggcaacgagagctacgcctacgtcaacggcatcgaggtgatctccatgcccgacatcttcgtcgacccggcgatcatggtcggcttcgcggaccagaccgtggacatcgccagctccacgctccagaccatgtaccggctcaacgtcggcggctcgtacatcccgccgtccaacgactccggcctcaccaggcactggtacgacgacacgccgtacgtgtacggcgcgacgcagggcgtcacctacagggccggcccgcatttccagatcaagtaccccagcgagaccgccgagtacgcggcgccgccggaggtgtacctggacacccgctccatgggctccgacccgcgcctgaaccagaactacaacctcacctggaccatggcggtggacggcaacttcacctacgtcgcgcgcctccacttctgcgagctgctgctcatccgggccaaccagcgggcgttcgacatctacgtcaacaacaagacggcgcaggccgacgccgacgtgatcgggatgacgtcggagaagggcgtgcccatgtacaaggactacgcggtgtacatggccgaagagcccgatgggcaggccatgtgggtggcgctgcacccgtccgtggcgctccggccgcaattctacgacgccatcctcaacggcctcgagatcttcaagctcaatgacaccgccggcaacctcgccgcgccaggccccgagccgtccaggttgctcgcgaaggcggagctgggcgctggagagcagaacgcgcccgagagtcagccgcatccccacatggcgagggtgatgggaggcacggcaagcggcgcggccgtgctcgggatcgtcgctgcgatctgcgtcgtgtggtaccatgagaagaagagcagggagacggccagcaactgtgggtcgcacaactccgggtggctgccgctgttccactcgaacaccagcggcaagtcgtcgggccatatcccggcgaacctcgcgggcatgtgccgccacttctcgttcgccgagatcaaggtggccaccaggaacttcagcgagtcgctggtgatcggcgtgggagggttcggcaaagtgtaccggggcgtcgttgatggcgacaccaaggtggccatcaagcggtcgaacccgtcgtcggagcaaggcgtgcaggagttccagacggaggtggagatgctgtccaagctgcggcaccggcacctcgtctccctcatcggcttctgcgaggatgccggcgagatgatcctcgtgtacgactacatggagcacggcacgctgcgggagcacctctacatgggcggcaaggcgccgctgtcgtggcggcaccgcctcgacatctgcatcggcgccgcgcggggcttacactacctccacaccggcgccaagtacaccatcatccaccgcgacgtcaagaccaccaacatcctcgtcgacggggactgggtcgccaaggtctccgacttcggcctctccaagtccggcccgacgacggtgaaccagacacacgtgagcaccatggtcaagggcagcttcgggtacctcgacccggagtacttccggcggcagcagctcacggacaaatccgacgtgtactccttcggcgtcgttctcttcgaggtgctcctggcgcggccagctctcgacccggcgctgccacgggagaaggtcagcctcgcggactacgcgctcagctgccagcggaacggcaccctgctggacgtcctcgacccaacgatcaaggaccagatcgcgccggagtgtttcaagaaggtcgcggacacggccgagaagtgcctcgcggagcagagcatcgaccggccgcccatgggggacgtcctgtggaacctcgagttcgcgctgcagctccaggacaccttcgaaggaggcagttgcgggcggcggaccgtgggtgacgacgacggcagcggcacggggcgcccggcgctcgagccgagtgacagcaacgggagcaccgcaagtttcacgacgctgaggacgttgtccacgtcacgggcgcgcgagacgtgcgtgatcatggaggagaccgacgacgaggtggctaacagcgcggctttctcgcagctcgtgcgcccaagtggccggtaacacgccgcgccggcggcggttagtggtagagtagagatgttatgcatgcgcgctcaagcttgattagaaaattcacatctgctccgt

SEQ ID NO: 145424 - DNA, 792 bp, Zea Mays
accttaagcacgattgcaactgaaactttggctgtgggtgatgggttctgctattttggtatgttatcattcatctctatgatagagcagattcagaatggtgagtttggcaggggttaattgtttcaatttgttagaatttttcaaacgaaagttgtctcaatttttggatcattcttggttttatgacgaatgcccaaactacagattatctaatggtcaaactgaatatttgttttatagcaaaaaaactatctagaaaattacctctttcatgtttttgttcagcggcggtccacgcggctaccaatagggatgatacaggttttgatattcttttatttattaattggttcaattggagaattacctcaacttattgggattaatgttctttgttctttgatgaccccttgctgagtgaaaaatacctgtgtatgttacaaaataaactacttgtatgttaaaaaaagtttctccctgccattacattgacatctcaaactcctcgcacctgttgccttttggaacatatacgttataacccacattttgcattgtgatttctctactaccaacaccaattttcttagaaggctatttagcagtaatttttgtactagctacaagaaacccattctatgcaataaatatccatattacgtaggtctgcagattacggcatatgctgcaatagcaaatgacacatttgtggcatattgctttcctttcaaagctttgagaatcatgtagtcatgcattagattcacatgcaccaaatttaagctaact

SEQ ID NO: 145425 - DNA, 1155 bp, Zea Mays
taccatgaacctcctcgctgacacgtcgcctcgcccccgagctgacttcctgacgccaccctcgcacaagatcccgatgtggcaatggcgaccagcgacgggcgctcaacgccaccgcgccgcctgcgaacccatggtgagaagtgtggtatcgatctagagccgaaggacttccccaacaccccttcctccatcggcgtgacatcggccagctcatctgcgacgacgaggcatcttcgaccgacttctcgacaccccatcctccatcaacgcggctccagtaccccttcctccatcggcgcagcagcatccaattcatctacgacgacaaggcatcttcgagcaaccacgccctactacaagtggtgttagtccatctcagataagtggagtaatttgtttgtatctgtatcttctattttatttcttccctaatcctgattaatagcctaatcacgcgacaactaatacatgtcgatttctttccttagccggtgtcatgcgcatgtgagatctagggagaggaagaggaggaagggttgtggggaccgggggtgcaagatggcggattcacctgcaactacaagaaaagaaagagcgagagatttacagaaaccttcagagccacggaggaggaggaggagattaggaggatctctacggcgctgacggattagttaaggaacgaaatatcacatcgtgtccggtaaccagattcagatgtgggcaccatgtgtgggtgcaaggccaggccgaggcgaaagagattcgacgattgagaatacatcaaagaataaaaatgtggaactcggattttcagatgaagagcgtgaccaagaatttcctgattttccatcatttattccattcttacctcctctgagtgcagctaacctaaaggtctactatgccacacgtttcaccatcatagttgggataatggtgttcggtggttttcttgcaccaatcgtaagtcacagttctcagttttggaaccaccgatggttattgtcatagttttgttttgccatatatagattgctttgaatgcttaccaagttgatgtgctctcatgcggctggaagttaaacttggtctaggggcacatcttatgaagactccatccgcagcgttcatctgtcgacgtagttgagg

SEQ ID NO: 145426 - DNA, 1681 bp, Zea Mays
taccatgaacctcctcgctgacacgtcgcctcgcccccgagctgacttcctgacgccaccctcgcacaagatcccgatgtggcaatggcgaccagcgacgggcgctcaacgccaccgcgccgcctgcgaacccatggtgagaagtgtggtatcgatctagagccgaaggacttccccaacaccccttcctccatcggcgtgacatcggccagctcatctgcgacgacgaggcatcttcgaccgacttctcgacaccccatcctccatcaacgcggctccagtaccccttcctccatcggcgcagcagcatccaattcatctacgacgacaaggcatcttcgagcaaccacgccctactacaagtggtgttagtccatctcagataagtggagtaatttgtttgtatctgtatcttctattttatttcttccctaatcctgattaatagcctaatcacgcgacaactaatacatgtcgatttctttccttagccggtgtcatgcgcatgtgagatctagggagaggaagaggaggaagggttgtggggaccgggggtgcaagatggcggattcacctgcaactacaagaaaagaaagagcgagagatttacagaaaccttcagagccacggaggaggaggaggagattaggaggatctctacggcgctgacggattagttaaggaacgaaatatcacatcgtgtccggtaaccagattcagatgtgggcaccatgtgtgggtgcaaggccaggccgaggcgaaagagattcgacgattgagaatacatcaaagaataaaaatgtggaactcggattttcagatgaagagcgtgaccaagaatttcctgattttccatcatttattccattcttacctcctctgagtgcagctaacctaaaggtctactatgccacacgtttcaccatcatagttgggataatggtgttcggtggttttcttgcaccaatcttaaacttggtctaggggcacatcttatgaagactccatccgcagcgttcatctgtcgacgtagttgagaagtgcactcaggttatacatccagtaaagagcaagacatttgaaagcttatgggccaactgtgttgctattgatgcaagcgaaagttggctgatgaattctctatgcctacttctagagtgatgttcaaagaggttgacgctccttcaccatccccagctttgtggaatgggccacaggtagccatttaggatgacaaagccacaagggtgtccttcatcaaggctatgctagaagcctcagacttgtgtatgaggaaaattcataaaaatggtacacagaagctgggaagaaagtggaagaggaatttagcacttgccctctgtcagtcctaatgatgagcgttaagaacaacaccaagtcgggcagcggcaacagaggggatggggccaatgacggaggcggagaggagaacccatcgatttggtggcgtaagtgggagctcatcgaggccgccaccggccggtccacctcttcaataatcgtccttcatcgcccttcagttgtgagttgtgacatactatttatattcggatatgatctattacaaatatacatgcatattatagggtgtgcatctgtatacccatgttctttacaaggtccgtccttaggtgatatgagtattccacacgtgaaatag

SEQ ID NO: 145427 - DNA, 2962 bp, Zea Mays
taccatgaacctcctcgctgacacgtcgcctcgcccccgagctgacttcctgacgccaccctcgcacaagatcccgatgtggcaatggcgaccagcgacgggcgctcaacgccaccgcgccgcctgcgaacccatggtgagaagtgtggtatcgatctagagccgaaggacttccccaacaccccttcctccatcggcgtgacatcggccagctcatctgcgacgacgaggcatcttcgaccgacttctcgacaccccatcctccatcaacgcggctccagtaccccttcctccatcggcgcagcagcatccaattcatctacgacgacaaggcatcttcgagcaaccacgccctactacaagtggtgttagtccatctcagataagtggagtaatttgtttgtatctgtatcttctattttatttcttccctaatcctgattaatagcctaatcacgcgacaactaatacatgtcgatttctttccttagccggtgtcatgcgcatgtgagatctagggagaggaagaggaggaagggttgtggggaccgggggtgcaagatggcggattcacctgcaactacaagaaaagaaagagcgagagatttacagaaaccttcagagccacggaggaggaggaggagattaggaggatctctacggcgctgacggattagttaaggaacgaaatatcacatcgtgtccggtaaccagattcagatgtgggcaccatgtgtgggtgcaaggccaggccgaggcgaaagagattcgacgattgagaatacatcaaagaataaaaatgtggaactcggattttcagatgaagagcgtgaccaagaatttcctgattttccatcatttattccattcttacctcctctgagtgcagctaacctaaaggtctactatgccacacgtttcaccatcatagttgggataatggtgttcggtggttttcttgcaccaatcttaaacttggtctaggggcacatcttatgaagactccatccgcagcgttcatctgtcgacgtagttgagatgaattctctatgcctacttctagagtgatgttcaaagaggttgacgctccttcaccatccccagctttgtggaatgggccacaggtagccatttaggatgacaaagccacaagggtgtccttcatcaaggctatgctagaagcctcagacttgtgtatgaggaaaattcataaaaatggtacacagaagctgggaagaaagtggaagaggaatttagcacttgccctctgtcagtcctaatgatgagcgttaagaacaacaccaagtcgggcagcggcaacagaggggatggggccaatgacggaggcggagaggagaacccatcgatttggtggcgtaagtgggagctcatcgaggccgccaccggccggtccacctcttcaataatcgtccttcatcgcccttcagttgacctgagatctagaaggacacaacaggcaaggtggatgtattcgtagttgattatatgttaaaagcaaatttcggatgacattggtggagattgcttatctctaagacacatctactcattctttgaatggaaatcacatccacgttctagaaagtctatttttacttcaaaagtactccttctgttccaaataaattagtgttagcatctctgcactctattgcccacttcccccctcatcggtgttttttattgttgcatatcaattttgtggctcaaatgcccctttgaaacatatagcaccaaaattatcctaattaattaattggtttctaactggctactctatttgcaacaatggggatatataaccttaccatgtctgtttatcacagtgcatcttagattgcatcgtattgtaattgttttagttccttgacatactgtttgtgcaacaggaactgcttgatgtacttacggttgggtatctgtgtagatgtagctgccaagttgtctaaagaaaagttcctgacctttcacatgctgccacattgccacaataccttaagagcttttctatacttctatgatttgtgttttcgagatctgagttatttaaatgttgtctgctattttgaatttttatatgaagatcaaagttctcaagtgataaagtaattaatataacaagcggacaacacatagacaaactaattaatgtagcatatagacgaataaggaatcctgaaacattgaccgtgaagaaaattattgtgcacatatgcactctttctccaaaatttggcatttaatcttattgcaacatacttgtacagaggggcgagggttgttcagtgctttgacatgtgtgcaactattcaagcacaatggttagatgatatccccattcattttagattattacattgtggtgttcgacttcttcagtcaagcagcaatcatgcaacatgccttactgtagttttttatcactgcacatgttgctggataaatttatagactggaggattatagaggactaacaagtgctactgggagattctcgagcaccattgaactaagagattccaaatagttctttggagtctattgttgatgttggcggggataatctagcagagatttgtcagattttttgtgcaacacggaggctacatgaggcagcaacgatcccattcttctcgcatgccactttacacaagctaaggatagcttctggtctcactcatggttgtggcagggaaagccgagtcagtagggtttgtcatgtagctggagttatctcagaccgcatattagatgcagtgatgatgtttacatttaccgtgcaagcaagatgacttatattatgccttaggacaataagtattgttttcactctaatgaaatacttggtaaaaagttgtctctgtagttgtatatttgactgtgaatatttgaacccactattataattgttgctaattgaggtcagatttcagaggccaaa

SEQ ID NO: 145428 - DNA, 2315 bp, Zea Mays
taccatgaacctcctcgctgacacgtcgcctcgcccccgagctgacttcctgacgccaccctcgcacaagatcccgatgtggcaatggcgaccagcgacgggcgctcaacgccaccgcgccgcctgcgaacccatggtgagaagtgtggtatcgatctagagccgaaggacttccccaacaccccttcctccatcggcgtgacatcggccagctcatctgcgacgacgaggcatcttcgaccgacttctcgacaccccatcctccatcaacgcggctccagtaccccttcctccatcggcgcagcagcatccaattcatctacgacgacaaggcatcttcgagcaaccacgccctactacaagtggtgttagtccatctcagataagtggagtaatttgtttgtatctgtatcttctattttatttcttccctaatcctgattaatagcctaatcacgcgacaactaatacatgtcgatttctttccttagccggtgtcatgcgcatgtgagatctagggagaggaagaggaggaagggttgtggggaccgggggtgcaagatggcggattcacctgcaactacaagaaaagaaagagcgagagatttacagaaaccttcagagccacggaggaggaggaggagattaggaggatctctacggcgctgacggattagttaaggaacgaaatatcacatcgtgtccggtaaccagattcagatgtgggcaccatgtgtgggtgcaaggccaggccgaggcgaaagagattcgacgattgagaatacatcaaagaataaaaatgtggaactcggattttcagatgaagagcgtgaccaagaatttcctgattttccatcatttattccattcttacctcctctgagtgcagctaacctaaaggtctactatgccacacgtttcaccatcatagttgggataatggtgttcggtggttttcttgcaccaatcttaaacttggtctaggggcacatcttatgaagactccatccgcagcgttcatctgtcgacgtagttgagatgaattctctatgcctacttctagagtgatgttcaaagaggttgacgctccttcaccatccccagctttgtggaatgggccacaggtagccatttaggatgacaaagccacaagggtgtccttcatcaaggctatgctagaagcctcagacttgtgtatgaggaaaattcataaaaatggtacacagaagctgggaagaaagtggaagaggaatttagcacttgccctctgtcagtcctaatgatgagcgttaagaacaacaccaagtcgggcagcggcaacagaggggatggggccaatgacggaggcggagaggagaacccatcgatttggtggcgtaagtgggagctcatcgaggccggtgcgtttgggcagccaccggccggtccacctcttcaataatcgtccttcatcgcccttcagttgacctgagatctagaaggacacaacaggcaaggtggatgtattcgtagttgattatatgttaaaagcaaatttcggatgacattggtggagattgcttatctctaagacacatctactcattctttgaatggaaatcacatccacgttctagaaagtctatttttacttcaaaaaggggcgagggttgttcagtgctttgacatgtgtgcaactattcaagcacaatggttagatgatatccccattcattttagattattacattgtggtgttcgacttcttcagtcaagcagcaatcatgcaacatgccttactgtagttttttatcactgcacatgttgctggataaatttatagactggaggattatagaggactaacaagtgctactgggagattctcgagcaccattgaactaagagattccaaatagttctttggagtctattgttgatgttggcggggataatctagcagagatttgtcagattttttgtgcaacacggaggctacatgaggcagcaacgatcccattcttctcgcatgccactttacacaagctaaggatagcttctggtctcactcatggttgtggcagggaaagccgagtcagtagggtttgtcatgtagctggagttatctcagaccgcatattagatgcagtgatgatgtttacatttaccgtgcaagcaagatgacttatattatgccttaggacaataagtattgttttcactctaatgaaatacttggtaaaaagttgtctctgtagttgtatatttgactgtgaatatttgaacccactattataattgttgctaattgaggtcagatttcagaggccaaataa

SEQ ID NO: 145429 - DNA, 2078 bp, Zea Mays
taccatgaacctcctcgctgacacgtcgcctcgcccccgagctgacttcctgacgccaccctcgcacaagatcccgatgtggcaatggcgaccagcgacgggcgctcaacgccaccgcgccgcctgcgaacccatggtgagaagtgtggtatcgatctagagccgaaggacttccccaacaccccttcctccatcggcgtgacatcggccagctcatctgcgacgacgaggcatcttcgaccgacttctcgacaccccatcctccatcaacgcggctccagtaccccttcctccatcggcgcagcagcatccaattcatctacgacgacaaggcatcttcgagcaaccacgccctactacaagtggtgttagtccatctcagataagtggagtaatttgtttgtatctgtatcttctattttatttcttccctaatcctgattaatagcctaatcacgcgacaactaatacatgtcgatttctttccttagccggtgtcatgcgcatgtgagatctagggagaggaagaggaggaagggttgtggggaccgggggtgcaagatggcggattcacctgcaactacaagaaaagaaagagcgagagatttacagaaaccttcagagccacggaggaggaggaggagattaggaggatctctacggcgctgacggattagttaaggaacgaaatatcacatcgtgtccggtaaccagattcagatgtgggcaccatgtgtgggtgcaaggccaggccgaggcgaaagagattcgacgattgagaatacatcaaagaataaaaatgtggaactcggattttcagatgaagagcgtgaccaagaatttcctgattttccatcatttattccattcttacctcctctgagtgcagctaacctaaaggtctactatgccacacgtttcaccatcatagttgggataatggtgttcggtggttttcttgcaccaatcttaaacttggtctaggggcacatcttatgaagactccatccgcagcgttcatctgtcgacgtagttgagatgaattctctatgcctacttctagagtgatgttcaaagaggttgacgctccttcaccatccccagctttgtggaatgggccacaggtagccatttaggatgacaaagccacaagggtgtccttcatcaaggctatgctagaagcctcagacttgtgtatgaggaaaattcataaaaatggtacacagaagctgggaagaaagtggaagaggaatttagcacttgccctctgtcagtcctaatgatgagcgttaagaacaacaccaagtcgggcagcggcaacagaggggatggggccaatgacggaggcggagaggagaacccatcgatttggtggcgtaagtgggagctcatcgaggccgccaccggccggtccacctcttcaataatcgtccttcatcgcccttcagttgacctgagatctagaaggacacaacaggcaagattattacattgtggtgttcgacttcttcagtcaagcagcaatcatgcaacatgccttactgtagttttttatcactgcacatgttgctggataaatttatagactggaggattatagaggactaacaagtgctactgggagattctcgagcaccattgaactaagagattccaaatagttctttggagtctattgttgatgttggcggggataatctagcagagatttgtcagattttttgtgcaacacggaggctacatgaggcagcaacgatcccattcttctcgcatgccactttacacaagctaaggatagcttctggtctcactcatggttgtggcagggaaagccgagtcagtagggtttgtcatgtagctggagttatctcagaccgcatattagatgcagtgatgatgtttacatttaccgtgcaagcaagatgacttatattatgccttaggacaataagtattgttttcactctaatgaaatacttggtaaaaagttgtctctgtagttgtatatttgactgtgaatatttgaacccactattataattgttgctaattgaggtcagatttcagaggccaaataa

SEQ ID NO: 145430 - DNA, 1922 bp, Zea Mays
caggagtccaggcttcgagcaacgagcgggcgaggctggaactggaacgctggatgcaagcctgatctactctgcccttaacctagctggtacgatccgcgcgtgtgttctggggcgctctcctcctcctcctccgtctctcccttctccactctcccccctctccgtctctctgtcctttctgggtcgacggctgggcgccgccgcccttcgtcaggtcttcgccggcggcgattacacaccaggttgagcaaatattcttccaccaatggcgagagaaccgagtcctgaaatagatgatgaactttacaatgaagtttatgggaaagcatacagcggcccagttgcatcagctacaaatagtgtgactcctaaaggaaatgctgagaagaggcccctgactcgtgataagtcagatgatgaagatgaggccccagatcctaatgctgttcccacggacttcactagccgagaggctaaggtctgggaggctaaagctaaggctacagaaaggaactggaagaagaggaaggaggaagaaatgatttgtaaaatatgtggagacccaggccattttactcagggttgcccctccacacttggggcaaataagagaaatgcagacttttttgaaagagttccagcaagagataagcaagtcagagatcttttcaatgagagggtaataagccagattgagaaagatgtggggtgtaaaatcagaatggatgagaagttcctgtttgtcagtggaaaggatagattaatattatccaaaggtgtttctgctgtgcataaaattattcaagagggtaagggtaaacatagtccaagcagtccgaaacacgatcgctctaggtcgcctgtacgaaacactactgagtttcgttccaaacactctgattctcatcgctcacctagcccaagaaattttgattctcaatggtcccatagtccaagaaatgcatcactctctcaaagtaaaggatactataatgaaagacatcgagatggtcgcttacacaacaatatgcccaagttttcgaaaggatctccacaagctcatgccaactttggagcaaaaggccgtccagcccaatcaaaatctccacgccatacctcttatcttgatgaattacctagaacacatggcgagaataaccaatttgctgcatcacgagtgcccaatgattggggaattgagaggcatggagcagatgccagttcaagtcttaggtttgacatgccatcccaccaacagaccttggaagaacttgagatggagtttaaaaaagaagctacacaattagctagagctcgtgaccaagaggaggatgaagagaactataggcatcgagagtcgctgagagtgattagagaaaattacatggagagagtgattaccttgaggaatgtgcatgcaaagaagtgggaagaatttcttgacacctttaaaagtcaacaacaagcacagccttcatacatacaaaccggatatctaggttttgagcagagaacggcacatatttcagctacacatcaaccaatggattcgaagagcacatatccgtatgcttctgatagctattcagccccaaaggctcatgcagcatatggtgagtttcaacatgagaggcatgatgatcttgggagggcctataggcgatattagctgtgaatagtggtgagttattgagttaattacccatttcagatttttgatgttaagccctgcagttctaatgtagctagagataatcatttcgttgtttgagcaattggtgtcctgctaggtaagctaattaaagagctgtgactgttaatagctacaggcttgggaagcctccgtcttattagaaaatgttgaccaaatgttcccttcctcttttgagtcctaaaagaggttccaaattttcagggcg

SEQ ID NO: 145431 - DNA, 2290 bp, Zea Mays
caggagtccaggcttcgagcaacgagcgggcgaggctggaactggaacgctggatgcaagcctgatctactctgcccttaacctagctggtacgatccgcgcgtgtgttctggggcgctctcctcctcctcctccgtctctcccttctccactctcccccctctccgtctctctgtcctttctgggtcgacggctgggcgccgccgcccttcgtcaggtcttcgccggcggcgattacacaccaggttgagcaaatattcttccaccaatggcgagagaaccgagtcctgaaatagatgatgaactttacaatgaagtttatgggaaagcatacagcggcccagttgcatcagctacaaatagtgtgactcctaaaggaaatgctgagaagaggcccctgactcgtgataagtcagatgatgaagatgaggccccagatcctaatgctgttcccacggacttcactagccgagaggctaaggtctgggaggctaaagctaaggctacagaaaggaactggaagaagaggaaggaggaagaaatgatttgtaaaatatgtggagacccaggccattttactcagggttgcccctccacacttggggcaaataagagaaatgcagacttttttgaaagagttccagcaagagataagcaagtcagagatcttttcaatgagagggtaataagccagattgagaaagatgtggggtgtaaaatcagaatggatgagaagttcctgtttgtcagtggaaaggatagattaatattatccaaaggtgtttctgctgtgcataaaattattcaagagggtaagggtaaacatagtccaagcagtccgaaacacgatcgctctaggtcgcctgtacgaaacactactgagtttcgttccaaacactctgattctcatcgctcacctagcccaagaaattttgattctcaatggtcccatagtccaagaaatgcatcactctctcaaagtaaaggatactataatgaaagacatcgagatggtcgcttacacaacaatatgcccaagttttcgaaaggatctccacaagctcatgccaactttggagcaaaaggccgtccagcccaatcaaaatctccacgccatacctcttatcttgatgaattacctagaacacatggcgagaataaccaatttgctgcatcacgagtgcccaatgattggggaattgagaggcatggagcagatgccagttcaagtcttaggtttgacatgccatcccaccaacagaccttggaagaacttgagatggagtttaaaaaagaagctacacaattagctagagctcgtgaccaagaggaggatgaagagaactataggcatcgagagtcgctgagagtgattagagaaaattacatggagagagtgattaccttgaggaatgtgcatgcaaagaagtgggaagaatttcttgacacctttaaaagtcaacaacaagcacagccttcatacatacaaaccggatatctaggttttgagcagagaacggcacatatttcagctacacatcaaccaatggattcgaagagcacatatccgtatgcttctgatagctattcagccccaaaggctcatgcagcatatggtgagtttcaacatgagaggcatgatgatcttgggagggcctataggcgatattagctgtgaatagtgggcgattttgtgaggaatcagtgtcaatggtgcgcttagacctacttatcacccattgctgttatgtagcttgaggaggtaagcattcatatataggcagaactgtctcccaattactttctttgcagcgtctacaaccgcaacggactgtggagctgtttcaggcatcgtaacaagctgctttccaacgaactaaactgaaatgctataaaaaaacattgacctgtatgactgttttatctgcttggaaaaaatctccctgagttggcgtttatgtgaacctagtattttttttgtcaaacctggtatatcgctatgctgggtctatccgaatggttgtttgcatcatcccattgttttggaaggtttggcacacgatatgaaagttagaacatgtggaacagtcagctatttcgtgaaatttggtcagaacttgatggcactcgttgctgtagtggtgactaggccagtgccttcggattggtactgttttgtgtcaatctcaacaggcactgcactgtcccatatacattggaatgtttgattggtggatggaggttgtattgtaaatcctggctgagtgaaaatcgaattttagaagaaaaa

SEQ ID NO: 145432 - DNA, 737 bp, Zea Mays
atggcctttgtgtgatgcacctgatggaccggagaaggcagcctcgcacagctgcacgaacacagggcaaaatttcttgcaagaaatgcagatccacctgaaaccagtattaaaaaaaaagaaagaaaggtccgtgcgctgtcagatcactcgtaggccactactatatgaagccgtttacttgggcagctgctgatgcttgggcagctgcgagcactgccatctccacctgcgttctgagcagtacattccattccgtcccatcgatcggtccactggacgatggcttccctcctcctgttcctgcgagccattgtcatcagtgccgatgacgaggaactcacgggcgcggacgaggaacgggaggcggcggcgcgtgaacggcggccggagaactgggcgttcgggccggcggcggcgcgcgacgcggaggaggaggaggaggaggaagaacggtggctggtctcctgcctggagtggcctcgcgtcgaccgcaagtccgcgtggatgcagatggtttgacggcctggtgggacggacggacgatggagccaagtgcttgagacgattcatcttgctcgccgttgccgcgtgttttctggatgaacgagaattccgtccggacgtttctcctccccccttgccgcaatcactgtctcccagtctagcagacagaacaactcaacagctctgttgtaaagtttcaatggaagttactcttgcatagtgcctattca

SEQ ID NO: 145433 - DNA, 504 bp, Zea Mays
atgtccattagagatgtgtgtcctaaggaatccgaagagcctccacaagcacaagatcaaccagcatcttccaatcaagcatctccaccaactcaagatgaggaacaggctcaaggtgatgaagaagaagatcaagaagatgagccacctcaagaagaggtcaatgatcaagggggagataaagacaatgaagacaaggaagatgagcaaaaaatacagggtcaaagaccgccacacccaagagtccaccaagcaattcaacgagttcaccccgtcaactccgtccttggtgaaattcataagggggtaacaactagatctcatgttgcttatttctgtgaacgttactcttttgtctcctgtattgagccatacagggtggaggatgcactaagagattcggattgggtgctagcaatgcaagaggagctcaacaacttcacaaggaatgtggtatggcatttggttccacgtcctaatcaaaatgttgtaggtaccaagtga

SEQ ID NO: 145434 - DNA, 791 bp, Zea Mays
ctgcgccgtctttcaatgctccctccccggccgcctccccgctataaagcacctgccttgccacctctctgtcctcacgaccacacaccaccgctccacacacaagaagagagccgagagctagctacctagcacgcgatggcgatggcgatggcgatgtccgcttccaagatgatggcggtcgcggccgccgccctgctagccctggccctggccgtgtcgaccgccgaggcaaggaacatcaagacgacgacgacggcggcgacggagaagaaggacgacgcggtggtgcagccgcagaccttcccgcccttcgaccgcctcggcggcggcgcgtccccggcgtccggtggcctccccggcacctcgtcgggcggcagcagcattccagcgttcagcatgccgggcagcggcagcagcagcctccccggcgggtcgttcttgcccggcagcagcggcagcatcggcagcatgcccctcttcagcggcggctccccggccttcagcggcttcggcggcatgcccgggtcccccgccgccggctccgccgtccccgtgcacggcaacgagccctgaaaatccgtccgtcgccggagcacattattgatccaacttgtgccctagtactcctttgtctgcattatattggagagttggtattgcgtttcgtttggtgtttgctttgttattaggcctatctaccgagacatgtgatgtttgttgcggtaaattaaaaccggttgtattcatgctgctgttgtctttaatttgttaagaactgttcactattt

SEQ ID NO: 145435 - DNA, 1314 bp, Zea Mays
ctaggtgctctcaagcgtcctcggatccacgtccaccgcgtcgccgtagtccgtaggaggtcgccgccgccgagcaagctgctgtcaccaacgacagcgaggccgccacgctccgcagcgaggttgagcgcctcgagggtctcctcgccgcggagaaggctagccatgaggaggagatgcgcaggggtgcatggctcggggaccagctgcagaccgcgtaccaggagaaggccgccctcgaggaggagatcgagaccctgaagggttccgccactgccgagggcaagggcatggaagagggatgtgattctgttgctgctagggccaggacgcctaaggatcagggcgtggtgcctcccgcactggtccgcggctgctggagcagctgccacggctggcatcgcagtggtcttgtttaacctcaagaggtaatctggtggtccgatgcgcggaagttttgatctgctgctatggcctatatgagaataggcctacatgtatggcaagtacctttactttctgaagttttcaatggtaataagagtcgtgaacacaaacatgaggtataattgagttcttgtctgatcttttgagttgcacctgatcttttgagttcttgtcttggttcgttcttgattcttggacgaggtgggatttggagagccaagggcggcgcggcagcagcgggtttctcggtcggactagattgtttccatcgagatggtgggcggcggagggcattcgtcgatggaccaccctggcgccaaggacctcgagcgcggcgagctgcgccgtggcgcgcctgagtttgcggacggcgacgatggagacggggaagaaagccagtacttctcggacgcggaggaccggtcgtggccgtcgcactcgcgccacgactccaccgcctacgaggactacgtctcgctgtgcgtgtccgcccgcgcgagctccgtcgacgccgacgccgatgccgacggcgaggccgtcagacaacactgcaggaagtcgtcgtgcgtgtcagagggctcgctggacgacgttgacctggaggccggactgagcgagatcatcaaggccagccctgagaaggccgaacagaactgtcgcatttgccaccttggcctggagagcacggcggtcgagtccggtgccggcatcacgctcggctgctcctgcaagggggacttatcctacgcccacaagcagtgcgccgacacctggttcaagatcagaggcaacaaatgccaatcggtaagcaaattctatcaaacgagatgatgattgttatggctggagaatctcaataccatcgcc

SEQ ID NO: 145436 - DNA, 1793 bp, Zea Mays
ctaggtgctctcaagcgtcctcggatccacgtccaccgcgtcgccgtagtccgtaggaggtcgccgccgccgagcaagctgctgtcaccaacgacagcgaggccgccacgctccgcagcgaggttgagcgcctcgagggtctcctcgccgcggagaaggctagccatgaggaggagatgcgcaggggtgcatggctcggggaccagctgcagaccgcgtaccaggagaaggccgccctcgaggaggagatcgagaccctgaagggttccgccactgccgagggcaagggcatggaagagggatgtgattctgttgctgctagggccaggacgcctaaggatcagggcgtggtgcctcccgcactggtccgcggctgctggagcagctgccacggctggcatcgcagtggtcttgtttaacctcaagaggtaatctggtggtccgatgcgcggaagttttgatctgctgctatggcctatatgagaataggcctacatgtatggcaagtacctttactttctgaagttttcaatggtaataagagtcgtgaacacaaacatgaggtataattgagttcttgtctgatcttttgagttgcacctgatcttttgagttcttgtcttggttcgttcttgattcttggacgaggtgggatttggagagccaagggcggcgcggcagcagcgggtttctcggtcggactagattgtttccatcgagatggtgggcggcggagggcattcgtcgatggaccaccctggcgccaaggacctcgagcgcggcgagctgcgccgtggcgcgcctgagtttgcggacggcgacgatggagacggggaagaaagccagtacttctcggacgcggaggaccggtcgtggccgtcgcactcgcgccacgactccaccgcctacgaggactacgtctcgctgtgcgtgtccgcccgcgcgagctccgtcgacgccgacgccgatgccgacggcgaggccgtcagacaacactgcaggaagtcgtcgtgcgtgtcagagggctcgctggacgacgttgacctggaggccggactgagcgagatcatcaaggccagccctgagaaggccgaacagaactgtcgcatttgccaccttggcctggagagcacggcggtcgagtccggtgccggcatcacgctcggctgctcctgcaagggggacttatcctacgcccacaagcagtgcgccgacacctggttcaagatcagaggcaacaagctggagtagacaccctgtttgtggaaggaggtaccatttcataattcggaatgaatacaaaacctgcaagcattgtgaccattgtgggcttatggcccagtcgtttggaacacggtgctcgacatgcaaatatgtgatctcctctgatgatccggaagattgggactataggcagttggataatccacgtcacttgctgcatggtattgtacatgacaatgggtttggtcaccttgttcggataaatgtgtgttagggtcaagaaatactttctatatgtagatatggatctaattctctaacctcctaacaaacctgctacttctcttatccaaaatcttgtaaatagaattagtgtaagtaattctgcatttttataagcttcttctcatggtcccatgactacccaatgtgagaacaaagggggcatcggccctgaaaaccacgcagacaattgacttcttttttttattcatcattttttgctcgtaaggcttgttctacaagtgtttattatactatactatactcattcagatatatgccttttt

SEQ ID NO: 145437 - DNA, 1789 bp, Zea Mays
gcgtcctcggatccacgtccaccgcgtcgccgtagtccgtaggaggtcgccgccgccgagcaagctgctgtcaccaacgacagcgaggccgccacgctccgcagcgaggttgagcgcctcgagggtctcctcgccgcggagaaggctagccatgaggaggagatgcgcaggggtgcatggctcggggaccagctgcagaccgcgtaccaggagaaggccgccctcgaggaggagatcgagaccctgaagggttccgccactgccgagggcaagggcatggaagagggatgtgattctgttgctgctagggccaggacgcctaaggatcagggcgtggtgcctcccgcactggtccgcggctgctggagcagctgccacggctggcatcgcagtggtcttgtttaacctcaagaggtaatctggtggtccgatgcgcggaagttttgatctgctgctatggcctatatgagaataggcctacatgtatggcaagtacctttactttctgaagttttcaatggtaataagagtcgtgaacacaaacatgaggtataattgagttcttgtctgatcttttgagttgcacctgatcttttgagttcttgtcttggttcgttcttgattcttggacgaggtgggatttggagagccaagggcggcgcggcagcagcgggtttctcggtcggactagattgtttccatcgagatggtgggcggcggagggcattcgtcgatggaccaccctggcgccaaggacctcgagcgcggcgagctgcgccgtggcgcgcctgagtttgcggacggcgacgatggagacggggaagaaagccagtacttctcggacgcggaggaccggtcgtggccgtcgcactcgcgccacgactccaccgcctacgaggactacgtctcgctgtgcgtgtccgcccgcgcgagctccgtcgacgccgacgccgatgccgacggcgaggccgtcagacaacactgcaggaagtcgtcgtgcgtgtcagagggctcgctggacgacgttgacctggaggccggactgagcgagatcatcaaggccagccctgagaaggccgaacagaactgtcgcatttgccaccttggcctggagagcacggcggtcgagtccggtgccggcatcacgctcggctgctcctgcaagggggacttatcctacgcccacaagcagtgcgccgacacctggttcaagatcagaggcaacaaatgccaatcggctggagtagacaccctgtttgtggaaggaggtaccatttcataattcggaatgaatacaaaacctgcaagcattgtgaccattgtgggcttatggcccagtcgtttggaacacggtgctcgacatgcaaatatgtgatctcctctgatgatccggaagattgggactataggcagttggataatccacgtcacttgctgcatggtattgtacatgacaatgggtttggtcaccttgttcggataaatgtgtgttagggtcaagaaatactttctatatgtagatatggatctaattctctaacctcctaacaaacctgctacttctcttatccaaaatcttgtaaatagaattagtgtaagtaattctgcatttttataagcttcttctcatggtcccatgactacccaatgtgagaacaaagggggcatcggccctgaaaaccacgcagacaattgacttcttttttttattcatcattttttgctcgtaaggcttgttctacaagtgtttattatactatactatactcattcagatatatgccttttt

SEQ ID NO: 145438 - DNA, 1448 bp, Zea Mays
gcactttgtttcctgtagtttagtcaccttaggaggtgttatcgataattcttagatcttgtctgtacatgatccctcattcactactagcttccttagcaactcacatttgtattatggttcagaaatgcctccacaataaccaatgacttgtctctggtatgatgtccactagcatgaatccaccataaggatgtttagaaattcattgcatttgctataactgagatttcggatccactggcatcattgtggcttgcatgtcagtactttgtacagtagtaaatatagtaacatatatcattttatgttttgtgatagttccatttttacacttacagagtgttgagtatatacttcaaatttgcttttaggctgggtgagaagtacaaatcaatacatctctgtagctcactgaattaactgatttttccttttagtgcaaatatattatatatgtttgccagaagatcattttgctcttgttttaatccatgtatggtaacttgcactgacattctaagtttgattattggatattattgcctttctttccattttccccaatactcatgagtccatggcagccatcatccagtaagttatctggctatcatttagttgcttcatgtagcagaatgcttcaatagctttggcaatatctataagcttttggatttcaggttcctaagcttgtgattttcagctcttgtattaggctataaatgatatgttgttatcccattttcagcaaatcagaacattcatccagatgaggactaacttgaaggtggtcgataactctggggccaagtgagtgatgtgcatccagtccctgagggggaagaaaggagcaaggctcggggacatgatcatcggatccgtaaaggaggcccagcctcgtggcaaggtcaagaaagaagacgtagtctacggcgtggtcgtccgcgccgccatgaagaaagggcgcagcgacggcagcgaggtccagttcgacgacaacgaggtggtcctcgtgaacaagaagggtgagctgatcggcacccgcgtcttcggccccgtcccccacgagctgaggaagaagaagcacctcaagatcctggccctggctgaacacatcgtttgaggtgtgtcgcagagccaagagccaagtgtttatgggaatgtttttttgtctgtgttctctgtttgaataatgcattgtgaaacgatagcatggaccgtttgaactattttgatgatattgctcgcccatttggatggccaatacgtgttgtgatctattctggagtttcattttttggttacaagctgctttcacatgtatgcagatatccttgtctgcgagttcgtctatgtgatgaacttcgaattagttgccaatagcataatcctattaatcctgattgtatatgtcatacaatttacaaattaatctgtgtaaaatt

SEQ ID NO: 145439 - DNA, 95 bp, Zea Mays
ggcaaactatcctttgcgaaaatatatgcaacggaatggggcgctgaaaggaccatggatttagttgaaatcaggacatctcatggactcatggt

SEQ ID NO: 145440 - DNA, 1680 bp, Zea Mays
agcccctctactcatgaattctgtccagccaccacccaccccctgtgcagtggagcctaccactaccagcctcagcctacttcgtagtagtccccgaagccgcgagtcgcgcatacctttaccgcacgccgagaaaggatggcgtcgtggtcgtcgccctcagccgccgccaacgccgcctcgggcgcccgattcggccccttcccgagcggagggcagcggctcgcgccgtgtccgtcgctcgtccgcggaactcccgccccgacgctcgtcctcaggccccacccggacggccgtggccatggcctcctcgcgcacaccgcctcccctccctccttgcggtgccgcgccgtcgccgccgaggtcgggggcctcaacatcgccaacgacgtcacccagctcatcggcaacacaccaatggtgtatctcaacaacgtcgtcaagggctctgtcgccaatgtcgctgctaagctcgagattatggagccctgctgtagcgtcaaggacaggatagggtacagtatgataaatgatgctgaacagaagggcttgattactcctggaaagagtgttttggtggaagcaacaagtggaaacacaggcattggtcttgctttcattgctgcttccaaaggatataagctgatactaacaatgccttcatcaatgagcatggagagaagagtcctccttagagcttttggtgccgaacttgtccttactgatgctgcaaaagggatgaaaggggccttagataaggctacagagattttaaacaagacaccaaattcttacatgcttcaacagttcgataaccctgccaaccctcaggtacattatgagactactggtccagagatctgggaggattcaaaggggaaggtggatatattcattggtggaattggaacaggggggacaatatctggtgccggccgttttctcaaggagaaaaatcctggaattaaggttattggtattgagccttctgaaagtaacatactctccggtggaaaacctggtccacataagatccagggaatcggcgcaggatttgttccaaggaacttggatagcgatattcttgatgaagtaattgagatatcaagtgatgaagctgttgagacagcaaaacagttggctgttcaggaaggattactggttggaatctcctctggagcagccgccgctgctgccataaaggttgccaaaagaccagagaatgctggaaagctgatagtggttgtgtttccgagcttcggcgagaggtacctttcatctgtcctctatcagtccataagagaagaatgtgagaacatgcaacctgagccatgagggagccgtcactttaagcgggcatagtaaatgtttctgaaataagacgcgtagccagcatcagtttgctccacttggaatcatttggccatgctcactctatcctttcgctagcctctatgaccggacctaaactggtgtgtgagaaacatccacgactgtcctcccaactgctttcctaaagccaaacgataacactctcaataattgtctatacgattgaagctgatttgattggtaattgtaaacagcttgtctttggatctttgaagtcaaacaaagtcagttggttgaatcagatggatattgtatgccttttgtgtgtgtgtgtgtgtgaaaaaaaaa

SEQ ID NO: 145441 - DNA, 220 bp, Zea Mays
cttgcgggacagagatgggggagctattcttagacggtgaattttccgttgccatccctacccatgggtgggcacgagcacaagacgtttaatgtaggcatgaaatggtcacgaaaagatccatatattaatttaaatcacactttattccacacttccatgtactaggatatttcacacttctatgtactgaataaaaatcaaggaactgcaattgatg

SEQ ID NO: 145442 - DNA, 641 bp, Zea Mays
ctcgagcgagtggcgacgacggcgccttcgctgcgcctcagtcttcttaggcggcgcccctacccctcgaagccttccgccccacctagctcccgtgctcgccagcgtccactgaccagcaggctcccagcccccagctcccaagcggccgcagtgcccctgcaggccgcggcctagcccttgcctgtttgcgtcttgctgctgcacagtgagccagacagcaagctttgtttccttccattcacttcgttgtagtgtggagatcagactaaccaagggcaacccaaatttggggattctttaagtgaagcctctgtatagagatagtttgaagatgatgaaccagcacagggaggaggatgcattgagaggtcaagcagtcaaaaaccagaaggcgatatgggacaagaccctggaaatgagattcttgctgcagaaggcattttctacttccaacaagttgccccaggaacccatcagagcaaggttttgcaatcatgataagcagatagaacaagcctatgatgatctgttgaattcatcgaagcagactttgagcagcatgatggagctgcaggaggctatgctcgagagtaatcaggctacaaagggtgccaatggtattgctactctccacattg

SEQ ID NO: 145443 - DNA, 528 bp, Zea Mays
atgggaaggataacaacattcagaaatactgagatagataaatggcagaggaaaatacaggtgacaacgggtgctgctgcacttaaaggaaagctacatgcatttaatcagaacattagtgaccaagttgctggttacatgagagatccaagccggatgattaacaggatgtacttgaccaactctgctgttagtgtatttggaaaggatgtgggagaacctggaacagctgaggaggggcacaatatggaaggtgatcctgaacttattgacgattctgagttttatcaacaacttctcaaggagtttcttgagtcatgtgataagggggcctcagagtcggcaatttatgctctaaaaaagcagcaggttaaaaagaggaagcttgttgatcgtcgtgcttcaaaaagcagaaagatacggtaccatgtccatgagaaggtcactaatttcatggccccagagcccatggttctgcctccaatggctccgaagttgtttgagaatttgtttgggaatgccagctag

SEQ ID NO: 145444 - DNA, 83 bp, Zea Mays
gccagcatctgtgtccctcacgtcctcgcgttctctagcatctgccagcagccctcacattccagcgtctgccagcatcttcg

SEQ ID NO: 145445 - DNA, 2563 bp, Zea Mays
ctcaaactctgctcaagaaatctggagggctcttctcttctctgcctgtccgccgcaccagctccagcctgcagccagccggcggagaaaagcaggggattcgactggagtcaccctcggagcttgcatctggcagtccagagcacagcaaaagcaaagcacccgattcgattcctaggcaccaggcttttccatccatgtcttccttgctcgacctttcctcatctcctttccatcttcccctggctcctctcgacctttccggtggttggaggaccagaagctgagctagccgcccaccttccggacgctgatgtgattgacccagtcggctggttaggaatttagcatcgcgatacctccagcggtccagcccagcttccagcacggcagtcggttgagtcaccgtccgccactccgttagcagctgccggtcgatcttgccgcgcaagcagcagaaaggccggcccagcggcgctttcttcagccatggcgtgcgcggcggcgcacatgttcgtgtacaacgccactctctgcgcctgcgaccctgggtactacctcttcaccaattccaccggcggcggcaacgcaagcagcgccagtaccagctgcgtgtcattgccccgcagcggcgacgggttcggcgactggcaggtcggatccgtaggcgcgtcccggaaccagagcttctacttcctgaccccggtcctctctctcgacgtcgtccgccgcctcacccagtcccaggccgtcatcctctgggtcgcgctcctcacgctgctctcctggctcgccttctgcgccgccgccaggttcgccggccaggaccccgagcgccacaagaagctcttcggcgcccggttctgggtcagccgcctcgactgcatcttcgacaacaaccactatgcgaatgatcagaaagtactgaggaaaagaaaaacagagctgggcggcacgttctcagtggctaccttgatactattccttggattagtcatagttctgctgtatcaagccatcaacaggcgtaacgcccaagtacatcgagtgaaaccagctaatgctccggatttgctagatttcgtgaatgaccttgagtttcacataaccactgtctcaagcatgtcttgcgcccaagtagtggcaccttctacaatagcaatgggaactcctgggtttatggacttcagggtactgccactgtcaacactcttgacctacagttgccagaacacgagtgagggcccatcaattacactaaagtgcaatggctgccgaatccctccaagagaccactatgtatcctggcagtttgttgacctgccaaggcaaccggctgccgctgttggcttccaatttaacttgactgcgagggaacatggagattataaagatatgagctttgtgagtggtactttaagctctgacaactatgatgatgccaagctgaaaacattcagagggccggattccaatgtgctcaaaattcaattgtttcctcagatatacaaccaccttcatggcttgaagctcttgcagccacttgttcaggacttcactcaaggttctatcttatcagatctgagcagcttgaatgcttccttgcacaaccctagagatggagttataaatactacactcttcataagttatctttctgactatattgtggagatcagcaatgagaatgtgcttggcccagtcagtattcttgcgagtattggtggcctgtatgccttcagtgttgcattttttctctgtctcatggctcaatgtgaaggcagaataaagaagcttcgtgacgaggataccagaatgctgaaaatcctgagcaaacaacgcgctcaacgaaattggaacaaggttcggaagtttgtcatgtacacatggggtccaagcaacttggatccaaccgatagaagtggaaagtggcctgaaggctcggtgatggattccatccatggatccttccacaagataagaaaaccaactagaagaggaacctctaacgggagcaaacctaaggagcccgctgacatggcagttgaaattgaaagagttggggagacacagcagccaagcagttctaggtagccttggtggatggaggttcaggacatgtcggttcattgtaatgctgtaacttccaactcatatgcacagctcttcctgcatagatagatcctttcaattttatcaatttgtgaaatcctgaatgagaacttttatgctgcttcaggctgcagtacctctgaccatgatttgcaatacgaccatactcccggagtggagctgtctatatcaagagtgtaggtagaggcaagtcagcaagtgactaaaactgtacaggatcagtttgaagagtcgtagcaacagggttcaagggcgtgttgaatggccagttgatgagcagcaagtaatctgcttgatgagttggggagttccgttgctggtttaagctggagctggctgcttgtgaagtccggtcaggtgtcagtcttgttattcttttttatttcatttcatgagaagggatagatattatttccttgatttgtacatt

SEQ ID NO: 145446 - DNA, 2466 bp, Zea Mays
gcctgcagccagccggcggagaaaagcaggggattcgactggagtcaccctcggagcttgcatctggcagtccagagcacagcaaaagcaaagcacccgattcgattcctaggcaccaggcttttccatccatgtcttccttgctcgacctttcctcatctcctttccatcttcccctggctcctctcgacctttccggtggttggaggaccagaagctgagctagccgcccaccttccggacgctgatgtgattgacccagtcggctggttaggaatttagcatcgcgatacctccagcggtccagcccagcttccagcacggcagtcggttgagtcaccgtccgccactccgttagcagctgccggtcgatcttgccgcgcaagcagcagaaaggccggcccagcggcgctttcttcagccatggcgtgcgcggcggcgcacatgttcgtgtacaacgccactctctgcgcctgcgaccctgggtactacctcttcaccaattccaccggcggcggcaacgcaagcagcgccagtaccagctgcgtgtcattgccccgcagcggcgacgggttcggcgactggcaggtcggatccgtaggcgcgtcccggaaccagagcttctacttcctgaccccggtcctctctctcgacgtcgtccgccgcctcacccagtcccaggccgtcatcctctgggtcgcgctcctcacgctgctctcctggctcgccttctgcgccgccgccaggttcgccggccaggaccccgagcgccacaagaagctcttcggcgcccggttctgggtcagccgcctcgactgcatcttcgacaacaaccactatgcgaatgatcagaaagtactgaggaaaagaaaaacagagctgggcggcacgttctcagtggctaccttgatactattccttggattagtcatagttctgctgtatcaagccatcaacaggcgtaacgcccaagtacatcgagtgaaaccagctaatgctccggatttgctagatttcgtgaatgaccttgagtttcacataaccactgtctcaagcatgtcttgcgcccaagtagtggcaccttctacaatagcaatgggaactcctgggtttatggacttcagggtactgccactgtcaacactcttgacctacagttgccagaacacgagtgagggcccatcaattacactaaagtgcaatggctgccgaatccctccaagagaccactatgtatcctggcagtttgttgacctgccaaggcaaccggctgccgctgttggcttccaatttaacttgactgcgagggaacatggagattataaagatatgagctttgtgagtggtactttaagctctgacaactatgatgatgccaagctgaaaacattcagagggccggattccaatgtgctcaaaattcaattgtttcctcagatatacaaccaccttcatggcttgaagctcttgcagccacttgttcaggacttcactcaaggttctatcttatcagatctgagcagcttgaatgcttccttgcacaaccctagagatggagttataaatactacactcttcataagttatctttctgactatattgtggagatcagcaatgagaatgtgcttggcccagtcagtattcttgcgagtattggtggcctgtatgccttcagtgttgcattttttctctgtctcatggctcaatgtgaaggcagaataaagaagcttcgtgacgaggataccagaatgctgaaaatcctgagcaaacaacgcgctcaacgaaattggaacaaggttcggaagtttgtcatgtacacatggggtccaagcaacttggatccaaccgatagaagtggaaagtggcctgaaggctcggtgatggattccatccatggatccttccacaagataagaaaaccaactagaagaggaacctctaacgggagcaaacctaaggagcccgctgacatggcagttgaaattgaaagagttggggagacacagcagccaagcagttctaggtagccttggtggatggaggttcaggacatgtcggttcattgctgcagtacctctgaccatgatttgcaatacgaccatactcccggagtggagctgtctatatcaagagtgtaggtagaggcaagtcagcaagtgactaaaactgtacaggatcagtttgaagagtcgtagcaacagggttcaagggcgtgttgaatggccagttgatgagcagcaagtaatctgcttgatgagttggggagttccgttgctggtttaagctggagctggctgcttgtgaagtccggtcaggtgtcagtcttgttattcttttttatttcatttcatgagaagggatagatattatttccttgatttgtacatttcacctcctttgatgccaaattgtaatttggaagaaatcaggaagaagcaaggaaagaccgctattattcgtaggaa

SEQ ID NO: 145447 - DNA, 1111 bp, Zea Mays
ggcagatgagacgacagccgtcggatcagaaaccctagcccgggaggctctccctattaatacccaccctgcaccccgcgggaggagtctttcctagggtttcgtcgcttccagccgccgccgcgtccgcctcgccaagcgcagcagccgccgcagcacatcgctctctcgatctcagccatggcggaggtggagcagcaacaggacacgccgaagctcttcaaccgctggaccttcgatgatgtccaggtgaacgacatctcgctgaacgactacctcgctgtgaacgcgacgaagcacgcgatgtacctgccgcacaccgcgggacgttactccaagaagcggttccgcaaggcgcagtgcccgatcgtcgagcgcctcacaaactcgctcatgatgcacgggcgcaacaacggcaagaaggtcatggctgtccgcatcatcaagcataccctggagatcatccacctgctcaccgatgccaaccccatccaggtcgtcgtcgacgcgatcatcaacagtggaccccgtgaggatgccacccgtattggttccgctggtgttgtgaggaggcaggccgtggatatctcacccctgaggagggtgaaccaggccatctacctcctcaccactggtgccagggagagtgctttccggaacatcaaaaccattgccgagtgccttgcagatgagctgatcaacgctgccaagggctcatccaacagttacgccatcaagaagaaggacgagattgagcgtgttgccaaggccaaccgttgaactgagcttgtatcctggtgcactctgcgctggaaacttttatgtcgctggcagtcgtatcggttcttgttttaccaatgtttagagttttttgagacctatatgcggttttggttttcagtgcacaattaaaattactgagtaatgtagttgattgggaacagaaatgtttggtgcctggtttaccgaactccagttctcttgtcatttttctttattctatagtctgtattatgtatgcgtatgagtattgagatgattctgcatttgaattgtctgctttgttgctgtcgctgtatgcgtaccaatggtaacagggtagttgtgggaa

SEQ ID NO: 145448 - DNA, 1160 bp, Zea Mays
ggaggctctccctattaatacccaccctgcaccccgcgggaggagtctttcctagggtttcgtcgcttccagccgccgccgcgtccgcctcgccaagcgcagcagccgccgcagcacatcgctctctcgatctcagccatggcggaggtggagcagcaacaggacacgccgaagctcttcaaccgctggaccttcgatgatgtccaggtacgcgaacgagtcttcgcatctctgcatgcttcgattctttagccttgccgctactagcagtggatggaaccgacgatgaaatctgcaggtgaacgacatctcgctgaacgactacctcgctgtgaacgcgacgaagcacgcgatgtacctgccgcacaccgcgggacgttactccaagaagcggttccgcaaggcgcagtgcccgatcgtcgagcgcctcacaaactcgctcatgatgcacgggcgcaacaacggcaagaaggtcatggctgtccgcatcatcaagcataccctggagatcatccacctgctcaccgatgccaaccccatccaggtcgtcgtcgacgcgatcatcaacagtggaccccgtgaggatgccacccgtattggttccgctggtgttgtgaggaggcaggccgtggatatctcacccctgaggagggtgaaccaggccatctacctcctcaccactggtgccagggagagtgctttccggaacatcaaaaccattgccgagtgccttgcagatgagctgatcaacgctgccaagggctcatccaacagttacgccatcaagaagaaggacgagattgagcgtgttgccaaggccaaccgttgaactgagcttgtatcctggtgcactctgcgctggaaacttttatgtcgctggcagtcgtatcggttcttgttttaccaatgtttagagttttttgagacctatatgcggttttggttttcagtgcacaattaaaattactgagtaatgtagttgattgggaacagaaatgtttggtgcctggtttaccgaactccagttctcttgtcatttttctttattctatagtctgtattatgtatgcgtatgagtattgagatgattctgcatttgaattgtctgctttgttgctgtcgctgtatgcgtaccaatggtaacagggtagttgtgggaa

SEQ ID NO: 145449 - DNA, 1736 bp, Zea Mays
ggaggctctccctattaatacccaccctgcaccccgcgggaggagtctttcctagggtttcgtcgcttccagccgccgccgcgtccgcctcgccaagcgcagcagccgccgcagcacatcgctctctcgatctcagccatggcggaggtggagcagcaacaggacacgccgaagctcttcaaccgctggaccttcgatgatgtccaggtgaacgacatctcgctgaacgactacctcgctgtgaacgcgacgaagcacgcgatgtacctgccgcacaccgcgggacgttactccaagaagcggttccgcaaggcgcagtgcccgatcgtcgagcgcctcacaaactcgctcatgatgcacgggcgcaacaacggcaagaaggtcatggctgtccgcatcatcaagcataccctggagatcatccacctgctcaccgatgccaaccccatccaggtcgtcgtcgacgcgatcatcaacaggtacagtcttaatctcggctaataaccgttaaacctactcgttactatatgttgattccattcagtatgctggatccccccctgaaccgtgtgtgtatttctgtgtaattgaacttattcctatgaaattcatctataatttctgtgttccaaagggtatttttctttgatagccttatatattagttccattccggttgctgctactcttttatatctgatagcatggtcctgtataaatgcctagttgctgaaattcaaattgaatgctatgacaaagtttcccatcatatcagagtgtgctgttgtgcatcctggtatgtctttaagctgtgacatgctagtttaaccactagtttaaccatatggcgatgcactgcactgtttcaagttccatataaaatgtggatatgtagtctggtgtattatctcagagtgcttttgtgcccatctgttttcatggctcatgttagttcccttcaattgtcattctttatgccaagaatgctctttgtagccatttacatatttgagctgccaaattatcatgcaccatgcaccacaaaagtcatgtgcttttgatatgggaaactatagctcaatatatagcttacatgttgggtcgtgagatgtgaaactgttgtgatgtgctgctattgtcttgcagtggaccccgtgaggatgccacccgtattggttccgctggtgttgtgaggaggcaggccgtggatatctcacccctgaggagggtgaaccaggccatctacctcctcaccactggtgccagggagagtgctttccggaacatcaaaaccattgccgagtgccttgcagatgagctgatcaacgctgccaagggctcatccaacagttacgccatcaagaagaaggacgagattgagcgtgttgccaaggccaaccgttgaactgagcttgtatcctggtgcactctgcgctggaaacttttatgtcgctggcagtcgtatcggttcttgttttaccaatgtttagagttttttgagacctatatgcggttttggttttcagtgcacaattaaaattactgagtaatgtagttgattgggaacagaaatgtttggtgcctggtttaccgaactccagttctcttgtcatttttctttattctatagtctgtattatgtatgcgtatgagtattgagatgattctgcatttgaattgtctgctttgttgctgtcgctgtatgcgtaccaatggtaacagggtagttgtgggaa

SEQ ID NO: 145450 - DNA, 1632 bp, Zea Mays
ccgtactgtcgcacgaaccctaactactagccgtccctgccgccttccccttcggaggtactactggattcaacaacaaccccctctcgcgggtcccgggccgacgcgacgaaagacaaaggcagcggaggtggcgctgcagtccaccagttcttgggctcttggcaacgtcgccatcgtcatcggccatggttcttggcaacgtcgccatcgtcatcggctccggaattgtcggatcagtacttacaggcggtgagtttggccttcccgacttcagggatgcaatctctggtgctttcaagttcttgaccaagagtgcaaagccaggcaaggatgggccgtctaccagcagtccacatactgctgagttgttcagccaggtcaatcatctcagagaggagctgcaaatgttgtctaaatcaaatcatgtttccattgtcactgttgatggtagacctggccctggtgcatacggtataacagctgttgttattggaggagctattggctatttattcataagatggaaggggtggaaactttctgatatgatgtttgtgacgaagcgtgggttatcagatgcttgcaatgtagtggggaaacaagtggatcaggtttcagaaagtgttaatgttgcaaagaaacatcttgctggaaggattgatcgtgtagattgtagtttagatgaatgccaagaaattacagaagccacaaaggaagaggttacaatcatccatggagatctaagtgccttccagaaggaaatggaaacagttcatctcgtagttcgtagtctggagacaaagcttggacgcctagcttatactcaagatcggacaacacgaggaatatatgatttgtgtgaattcactaaaagattggatcagagcccgaaagctgatactcgtcaggttacatcatcaacttctcgtcctgctattgaatcctcagagagaattgttagggttgcttctttacccctggctttggaaccggagtctcctagaattgaggcacctaaggttgtgcgctcatctacagtcatgtcagcatcgggtcttagtttgctagctggaactacaataccacctaaaagagatcaaccgggtgtgtacagcagagcaagttcaatgaaggaaggatcctctgagttgccgagtggcgtgcgaaactcagcagaaccaagccccaggagatctggtgcttcaaccctgtttggagggcttgggtttctaaggaactacaccagctgagatgtatgtgctcagataggtgttttttttcccaaggagaccagcagtttgagctgtatatgtaggtagtaggtaatagggcagttgccaaaaggacggctcccttttcctattgggaattgcgaatttttgtaggaactaataccttgcagagcaatgcctcgatgccaagatacaaactttaaatttaatgttgggttagatgctggaagagaaacatcctattgtatattgcagtggaatgtactgctggaatacatgtttgggaaggagcaattacaactaagtttgtgcttttggtggactggactctacttgctggctgatgttaggatagcatgcactgtatgcagctgcaggctgcagccatgtctggaat

SEQ ID NO: 145451 - DNA, 650 bp, Zea Mays
gccatcgccatcgccgccgtcaagttgctgccgggagtctccggctacatcgcggcggagaagaagaaggttgttgacaagatgcaatcaggtggggccaagaacaatcggcgagctgagttgccaactattggccttgccgagcaagtgatagaggaacttgaaacactgaaagccaaagatgtagactggcagggaaaatgctctggcacagtatatattgctggaagtgagtctgagggtcattttcaattgataaacaaggcgtactctatgttttcacacaccaatccgctccatcaagatgtatttaagagcgtagcaaacatggaagctgaagtcgttgcaatgacagcggctttacttggcagcaaagaaaaatcatctggtggacaaatttgcggcaacatgacatcaggtggaactgaaagcatattattagcagtcaaaacatcacgtgactatatgcgatcaaagaaaggaattacaaggcctgaaatgtgagataatggttgattatgtttgatttgcttgacaagtacctttttcttttgaaagttttacaacctcctatctatggtgagaaaaggttgttttgcacaggataattgctgaatcagcacattctgcatatgacaaagctgctcaat

SEQ ID NO: 145452 - DNA, 1815 bp, Zea Mays
gccatcgccatcgccgccgtcaagttgctgccgggagtctccggctacatcgcggcggagaagaagaaggttgttgacaagatgcaatcaggtggggccaagaacaatcggcgagctgagttgccaactattggccttgccgagcaagtgatagaggaacttgaaacactgaaagccaaagatgtagactggcagggaaaatgctctggcacagtatatattgctggaagtgagtctgagggtcattttcaattgataaacaaggcgtactctatgttttcacacaccaatccgctccatcaagatgtatttaagagcgtagcaaacatggaagctgaagtcgttgcaatgacagcggctttacttggcagcaaagaaaaatcatctggtggacaaatttgcggcaacatgacatcaggtggaactgaaagcatattattagcagtcaaaacatcacgtgactatatgcgatcaaagaaaggaattacaaggcctgaaatgataattgctgaatcagcacattctgcatatgacaaagctgctcaatacttcaatattaaagtgcggcgtgtacctgtgaacaaagagtttcttgcagatgtgaaaggattcaaacgatgcataaatggaaacaccataatgatggttggatctacaccaggatttccgcatggtttaattgatcctattgaggaacttggggaactggcttcgcgctatgacatttgcttgcatgttgatttatgccttggtggctttgtgctgccttttgctcataagcttgggtaccctattcctccctttgatttttctgtcaagggtgttacatccatctcatctgatgttcataagtacggattagcaccaaaaggcacaagcattgtcctgtacagaaatcatgaaattagaaagcatcagtttgttgctgttactgagtggaccggtggcctttacgtttctcccacaattgctggaagcaggccaggtggattgatagcgggagcttgggctgctatgatgtctctcggactgaacggctacttggacagtacaagccgtatcatggatgtttcaaagaaaatacaaagagggattggagagatcccagggttgtttgtgatagggaaaccggatatgaccgttgtggcgttcggctcagacgttgtcgacatatttgaggtgaacgacataatgtcatcaaaaggttggcatctcaatgctctgcagagacctaacagcttgcatatctgtgtgacccttcaacacacgactgtttacgaccaattcctgaaggatctgcaagactctgtcaacactgtgaaagcaaacccaggcccgattagcggcggaaaggctcctatctacggcgccgcagggaagatgccggacagaggcacggtgagggagctgctcgtggagttcatggacagctcttgctgaattcattatggcttgtgagaagaatttgttcttgtacatgaaacttctatttctttttcaactgaaaaggcagagctcctaccatttgtttaaaaaaaaaacattatggcttgtgaaaaacagtcgcagggctgtgatttgttggcctaggtatacaaagttgtcattaggaaaagcggggaaagtcattgaggcgatacaaccacatgtattcacgattacaagaagtttgtccgtatgattgtatatcaatatcacagcatgcatacgcaatgtgtctggttatatatttatctgttcctataaaacattggttgcatttcacgcgtactcacccccgtgaattctcggtaaaataaagatagaaatgactaa

SEQ ID NO: 145453 - DNA, 3554 bp, Zea Mays
cttttcttcttttgccttctttcttggtggccccatccgactccgcctgctcttcctcggcgccccatccatctgccttgcgtctgctccctctccaccaaaccctagccggccaacagagcttattgaaggccggctaggcgagagcagcatccaccgccgcgctctcatggcggcgcccaaaccgatctgggtgcgccaggctgaggaggccaagctcaagtccgaggcggagaccgctgccgccgccaaggccgccttcgaggccaccttcaaggccctcgctgccgcacccggcgacgacgacaaggacgccgaccccgccccgccctccccggccgaacccgcctcccccgagtccgatgacgatgccccggccccgccaggcccggtcgacccgtccaagtgctccgccgctggccccggcatcgggggcggctccgccggaactccctccaccttcaccgtcgtcgccaaggaccgccacagccggaggctcaccgccggcggggcgctcgtgcgcgtgcgtgtctcgcctgctgctgcagtcggcggggacgatctcgagggtgctgtcaaggacaacggggacggatcctacacggtcacctacgtcgtccccaagcgcggcaactacatggtacacgtcgatctcgacggcgcccccgtcatggggagccccttccccgtcttcttcagcggctccaccgtcacaccatcagccgctttccccaccgcgctacccgcagtcagctctgcctaccccaacatggtcaaccagaccatgcctaatatgcccaattacacaggcgcgccctccagtgccttccccagcctcctcggggccatgcctggttcctcagctggttcctcgagtggagtcatgctgcctggggttggtgcttcattgggggagatatgccgggactacatgaatgggaggtgcacaaaggtggagactgactgtaagttcacccacccaccgcaacagctgctgatgtcgatgcttgcagccacgagttctgtcagtgctcttgggcatgcgccgttggcgccctctgcggctgctatggcagctgcacaggccatcatggctgctcaggcactgcaggcacatgctgcgcaagccaaggccgcaggtggggcttcaggctcagtacacaaagctgatgaagctgatgccctgaagagaacagttcaaattagcaacctgagtccacttcttactgtggattatgttaagcagctatttggattgtgtggtaaagttgttgattgtaccatcacagattcaaaacacattgcttatgttgaatactccaaacctgaagaagcgactgcagcgttggagttcaataacaagaatgttggtggtcgtccattgaatgtggagatggctaaatctcttccttctaaagcaaataataacttgcctatgatgatgcagcaagccattcagctgcaacagatgcaattccagcaggcactaatgatgcaacagtcaatagcaacccaacaggctgctgcacgtgctgccaccatgaaatctgccactgaagcagctgcagcaagggctgctgagataagcaggaagttgaaggcggagggctttggtgcggacaacatggaagaaaagcatgccaaagggaagtcaagatcaccatcgccctctactcgtagatcaaaatctcggtcgagatcacctatcaaataccgtaggagcaggcggtcccgctcctactctcccccagttagacgctcaagggagcagcgatcacgatcaccatcaaaatctcgccactcaaagtacggtagtgatcgatcgcatagggatgataaggacaggtatagcaggtccgggagaagggagagtgaacgatctcgtgatcatcattcatctagttcaaggaggaacagaagtaaaagtagaagtccaaggcataagaagccctccagagttgattctaggtcacccaagaaacaaagagaggaaagtttaagcccatcaaaatcaaggtcagcaagggctggttcaagatcaccacgccatcataagggaagcaaatcatcgccaactcgtgaccgtcattctcgccatagcaggcattcaaggtccagatctcctggcagaaagcaccgtcacagtgataaaagggacagcagaaagtctgagattcaggacgacaaaagaagatctcatagaggtagcagacacgacaaagatgaaagttcagtaaaggacgaaggggaaagatctcatagaagcaatagaggtgacaaagatgaaaggtctgtaaaggatccagtggaagataaagggatggatactaaagttgttgcacataagaggagctcaacagtatctgaagatgaaattctgaacaacaatagtagtaaccataagaaatatagacatgaagttggtttggaagttgatggaaatgatgtgtgctctgctgcagctgacattgataggaaacatgaaactggagtagatggctctttggggggcgctgcagaatcagctatgtgatggctgctgtatcattgagtttgctgtttacagatggattgatgatgatggagaatgctgaactggtgtttattatctccttttctgatttaggagttttatttgcagggcatgaagatcttcggagaacttgagtgctgttcggagtgctcatctgatatattaaaatgtattcctcattaacttgagattcgctccttggagcaaacttctaaatgtaaagctggtgttgtaaggcgatttcatacagtgaggtagaaaccaaccatgtatttgtcgtttcaggctcatgattccatgaagagttcttggagcacatttctgggatgtcggttgaagatacaagggagtatacacttcctcaagtaaagtacacatatacaagactaataaacaactcatcttctaggcacttgcatttgaatcggaatgctttggctagtaaaatggtccaaatatgcttgtctacatacttctgatgcacttaatttgcttgaagttctgtttttatatcttgtatcaggaatggttcaaaaagtttgacttgctataccaatacttgtactttatcttttgacagtcacaatgaattgtgatgtaggttttatccatcttgtctactgctttttgaccagtctacctaaagttggtgcccttggtagctccagagataagctgtgaatcttgaaagttgaaacaattgcattgttacaaatttttttttttaaattttttgcttcactattgtttctgcttttgtctgcattgttcgctgcaccttaccatgctgtgacggttgttgtcatgctggaaaacctgtgcaggtttttcaagggggttgacattggagtatgttttgagggaagtcagtgcatacttcattttgtgaatgaggactatgttgcggatgctcaaccggtgaggattacatgttctatcaggagtgaagacttgtgcacgagagctgcaagtgaacctttctgcatgtggatgcttatttatatcaacatgtgtctcccgg

SEQ ID NO: 145454 - DNA, 3385 bp, Zea Mays
cttttcttcttttgccttctttcttggtggccccatccgactccgcctgctcttcctcggcgccccatccatctgccttgcgtctgctccctctccaccaaaccctagccggccaacagagcttattgaaggccggctaggcgagagcagcatccaccgccgcgctctcatggcggcgcccaaaccgatctgggtgcgccaggctgaggaggccaagctcaagtccgaggcggagaccgctgccgccgccaaggccgccttcgaggccaccttcaaggccctcgctgccgcacccggcgacgacgacaaggacgccgaccccgccccgccctccccggccgaacccgcctcccccgagtccgatgacgatgccccggccccgccaggcccggtcgacccgtccaagtgctccgccgctggccccggcatcgggggcggctccgccggaactccctccaccttcaccgtcgtcgccaaggaccgccacagccggaggctcaccgccggcggggcgctcgtgcgcgtgcgtgtctcgcctgctgctgcagtcggcggggacgatctcgagggtgctgtcaaggacaacggggacggatcctacacggtcacctacgtcgtccccaagcgcggcaactacatggcgcgccctccagtgccttccccagcctcctcggggccatgcctggttcctcagctggttcctcgagtggagtcatgctgcctggggttggtgcttcattgggggagatatgccgggactacatgaatgggaggtgcacaaaggtggagactgactgtaagttcacccacccaccgcaacagctgctgatgtcgatgcttgcagccacgagttctgtcagtgctcttgggcatgcgccgttggcgccctctgcggctgctatggcagctgcacaggccatcatggctgctcaggcactgcaggcacatgctgcgcaagccaaggccgcaggtggggcttcaggctcagtacacaaagctgatgaagctgatgccctgaagagaacagttcaaattagcaacctgagtccacttcttactgtggattatgttaagcagctatttggattgtgtggtaaagttgttgattgtaccatcacagattcaaaacacattgcttatgttgaatactccaaacctgaagaagcgactgcagcgttggagttcaataacaagaatgttggtggtcgtccattgaatgtggagatggctaaatctcttccttctaaagcaaataataacttgcctatgatgatgcagcaagccattcagctgcaacagatgcaattccagcaggcactaatgatgcaacagtcaatagcaacccaacaggctgctgcacgtgctgccaccatgaaatctgccactgaagcagctgcagcaagggctgctgagataagcaggaagttgaaggcggagggctttggtgcggacaacatggaagaaaagcatgccaaagggaagtcaagatcaccatcgccctctactcgtagatcaaaatctcggtcgagatcacctatcaaataccgtaggagcaggcggtcccgctcctactctcccccagttagacgctcaagggagcagcgatcacgatcaccatcaaaatctcgccactcaaagtacggtagtgatcgatcgcatagggatgataaggacaggtatagcaggtccgggagaagggagagtgaacgatctcgtgatcatcattcatctagttcaaggaggaacagaagtaaaagtagaagtccaaggcataagaagccctccagagttgattctaggtcacccaagaaacaaagagaggaaagtttaagcccatcaaaatcaaggtcagcaagggctggttcaagatcaccacgccatcataagggaagcaaatcatcgccaactcgtgaccgtcattctcgccatagcaggcattcaaggtccagatctcctggcagaaagcaccgtcacagtgataaaagggacagcagaaagtctgagattcaggacgacaaaagaagatctcatagaggtagcagacacgacaaagatgaaagttcagtaaaggacgaaggggaaagatctcatagaagcaatagaggtgacaaagatgaaaggtctgtaaaggatccagtggaagataaagggatggatactaaagttgttgcacataagaggagctcaacagtatctgaagatgaaattctgaacaacaatagtagtaaccataagaaatatagacatgaagttggtttggaagttgatggaaatgatgtgtgctctgctgcagctgacattgataggaaacatgaaactggagtagatggctctttggggggcgctgcagaatcagctatgtgatggctgctgtatcattgagtttgctgtttacagatggattgatgatgatggagaatgctgaactggtgtttattatctccttttctgatttaggagttttatttgcagggcatgaagatcttcggagaacttgagtgctgttcggagtgctcatctgatatattaaaatgtattcctcattaacttgagattcgctccttggagcaaacttctaaatgtaaagctggtgttgtaaggcgatttcatacagtgaggtagaaaccaaccatgtatttgtcgtttcaggctcatgattccatgaagagttcttggagcacatttctgggatgtcggttgaagatacaagggagtatacacttcctcaagtaaagtacacatatacaagactaataaacaactcatcttctaggcacttgcatttgaatcggaatgctttggctagtaaaatggtccaaatatgcttgtctacatacttctgatgcacttaatttgcttgaagttctgtttttatatcttgtatcaggaatggttcaaaaagtttgacttgctataccaatacttgtactttatcttttgacagtcacaatgaattgtgatgtaggttttatccatcttgtctactgctttttgaccagtctacctaaagttggtgcccttggtagctccagagataagctgtgaatcttgaaagttgaaacaattgcattgttacaaatttttttttttaaattttttgcttcactattgtttctgcttttgtctgcattgttcgctgcaccttaccatgctgtgacggttgttgtcatgctggaaaacctgtgcaggtttttcaagggggttgacattggagtatgttttgagggaagtcagtgcatacttcattttgtgaatgaggactatgttgcggatgctcaaccggtgaggattacatgttctatcaggagtgaagacttgtgcacgagagctgcaagtgaacctttctgcatgtggatgcttatttatatcaacatgtgtctcccgg

SEQ ID NO: 145455 - DNA, 2788 bp, Zea Mays
cttactgagcattccattaccatagtttgcagcagctgaaattgttttagcatacatctctaaattgaaattttgattagcagtttgtttttcttatcccagtcttgttgctcacttgcatattttatctttgcaggctcagtacacaaagctgatgaagctgatgccctgaagagaacagttcaaattagcaacctgagtccacttcttactgtggattatgttaagcagctatttggattgtgtggtaaagttgttgattgtaccatcacagattcaaaacacattgcttatgttgaatactccaaacctgaagaagcgactgcagcgttggagttcaataacaagaatgttggtggtcgtccattgaatgtggagatggctaaatctcttccttctaaagcaaataataacttgcctatgatgatgcagcaagccattcagctgcaacagatgcaattccagcaggcactaatgatgcaacagtcaatagcaacccaacaggctgctgcacgtgctgccaccatgaaatctgccactgaagcagctgcagcaagggctgctgagataagcaggaagttgaaggcggagggctttggtgcggacaacatggaagaaaagcatgccaaagggaagtcaagatcaccatcgccctctactcgtagatcaaaatctcggtcgagatcacctatcaaataccgtaggagcaggcggtcccgctcctactctcccccagttagacgctcaagggagcagcgatcacgatcaccatcaaaatctcgccactcaaagtacggtagtgatcgatcgcatagggatgataaggacaggtatagcaggtccgggagaagggagagtgaacgatctcgtgatcatcattcatctagttcaaggaggaacagaagtaaaagtagaagtccaaggcataagaagccctccagagttgattctaggtcacccaagaaacaaagagaggaaagtttaagcccatcaaaatcaaggtcagcaagggctggttcaagatcaccacgccatcataagggaagcaaatcatcgccaactcgtgaccgtcattctcgccatagcaggcattcaaggtccagatctcctggcagaaagcaccgtcacagtgataaaagggacagcagaaagtctgagattcaggacgacaaaagaagatctcatagaggtagcagacacgacaaagatgaaagttcagtaaaggacgaaggggaaagatctcatagaagcaatagaggtgacaaagatgaaaggtctgtaaaggatccagtggaagataaagggatggatactaaagttgttgcacataagaggagctcaacagtatctgaagatgaaattctgaacaacaatagtagtaaccataagaaatatagacatgaagttggtttggaagttgatggaaatgatgtgtgctctgctgcagctgacattgataggaaacatgaaactggagtagatggctctttggggggcgctgcagaatcagctatgtgatggctgctgtatcattgagtttgctgtttacagatggattgatgatgatggagaatgctgaactggtgtttattatctccttttctgatttaggagttttatttgcagggcatgaagatcttcggagaacttgagtgctgttcggagtgctcatctgatatattaaaatgctcatgattccatgaagagttcttggagcacatttctgggatgtcggttgaagatacaagggagtatacacttcctcaagtaaagtacacatatacaagactaataaacaactcatcttctaggcacttgcatttgaatcggaatgctttggctagtaaaatggtccaaatatgcttgtctacatacttctgatgcacttaatttgcttgaagttctgtttttatatcttgtatcaggaatggttcaaaaagtttgacttgctataccaatacttgtactttatcttttgacagtcacaatgaattgtgatgtaggttttatccatcttgtctactgctttttgaccagtctacctaaagttggtgcccttggtagctccagagataagctgtgaatcttgaaagttgaaacaattgcattgttacaaatttttttttttaaattttttgcttcactattgtttctgcttttgtctgcattgttcgctgcaccttaccatgctgtgacggttgttgtcatgctggaaaacctgtgcaggtttttcaagggggttgacattggagtatgttttgagggaagtcagtgcatacttcattttgtgaatgaggactatgttgcggatgctcaaccggtgaggattacatgttctatcaggagtgaagacttgtgcacgagagctgcaagtgaacctttctgcatgtggatgcttatttatatcaacatgtgtctcccggataatatagcttgccgcttgcgagttgggatatgagcgctaatctaagcttggagtgattcaccaaaccgctctaagattaaggaaatatagggatattcaaacaacaaatggagttaatccaggtcgtgcctgtgggaaaaacatccatagacttcaatttgttagggaaaaatattttctaaaataagggtgaaatacactgttttttctctttcttttttgctcagaaagaataaaattgagtaaggaggtgctaaattctgtgccctggttcttttccctaaattttcagatttgtttttgaggtaactttacgaaatctggtcgatgtgaattgcaaatgtataaatttgacgtgataaa

SEQ ID NO: 145456 - DNA, 2329 bp, Zea Mays
cttactgagcattccattaccatagtttgcagcagctgaaattgttttagcatacatctctaaattgaaattttgattagcagtttgtttttcttatcccagtcttgttgctcacttgcatattttatctttgcaggctcagtacacaaagctgatgaagctgatgccctgaagagaacagttcaaattagcaacctgagtccacttcttactgtggattatgttaagcagctatttggattgtgtggtaaagttgttgattgtaccatcacagattcaaaacacattgcttatgttgaatactccaaacctgaagaagcgactgcagcgttggagttcaataacaagaatgttggtggtcgtccattgaatgtggagatggctaaatctcttccttctaaagcaaataataacttgcctatgatgatgcagcaagccattcagctgcaacagatgcaattccagcaggcactaatgatgcaacagtcaatagcaacccaacaggctgctgcacgtgctgccaccatgaaatctgccactgaagcagctgcagcaagggctgctgagataagcaggaagttgaaggcggagggctttggtgcggacaacatggaagaaaagcatgccaaagggaagtcaagatcaccatcgccctctactcgtagatcaaaatctcggtcgagatcacctatcaaataccgtaggagcaggcggtcccgctcctactctcccccagttagacgctcaagggagcagcgatcacgatcaccatcaaaatctcgccactcaaagtacggtagtgatcgatcgcatagggatgataaggacaggtatagcaggtccgggagaagggagagtgaacgatctcgtgatcatcattcatctagttcaaggaggaacagaagtaaaagtagaagtccaaggcataagaagccctccagagttgattctaggtcacccaagaaacaaagagaggaaagtttaagcccatcaaaatcaaggtcagcaagggctggttcaagatcaccacgccatcataagggaagcaaatcatcgccaactcgtgaccgtcattctcgccatagcaggcattcaaggtccagatctcctggcagaaagcaccgtcacagtgataaaagggacagcagaaagtctgagattcaggacgacaaaagaagatctcatagaggtagcagacacgacaaagatgaaagttcagtaaaggacgaaggggaaagatctcatagaagcaatagaggtgacaaagatgaaaggtctgtaaaggatccagtggaagataaagggatggatactaaagttgttgcacataagaggagctcaacagtatctgaagatgaaattctgaacaacaatagtagtaaccataagaaatatagacatgaagttggtttggaagttgatggaaatgatgtgtgctctgctgcagctgacattgataggaaacatgaaactggagtagatggctctttggggggcgctgcagaatcagctatgtgatggctgctgtatcattgagtttgctgtttacagatggattgatgatgatggagaatgctgaactggtgtttattatctccttttctgatttaggagttttatttgcagggcatgaagatcttcggagaacttgagtgctgttcggagtgctcatctgatatattaaaatgctcatgattccatgaagagttcttggagcacatttctgggatgtcggttgaagatacaagggagtatacacttcctcaagtttttcaagggggttgacattggagtatgttttgagggaagtcagtgcatacttcattttgtgaatgaggactatgttgcggatgctcaaccggtgaggattacatgttctatcaggagtgaagacttgtgcacgagagctgcaagtgaacctttctgcatgtggatgcttatttatatcaacatgtgtctcccggataatatagcttgccgcttgcgagttgggatatgagcgctaatctaagcttggagtgattcaccaaaccgctctaagattaaggaaatatagggatattcaaacaacaaatggagttaatccaggtcgtgcctgtgggaaaaacatccatagacttcaatttgttagggaaaaatattttctaaaataagggtgaaatacactgttttttctctttcttttttgctcagaaagaataaaattgagtaaggaggtgctaaattctgtgccctggttcttttccctaaattttcagatttgtttttgaggtaactttacgaaatctggtcgatgtgaattgcaaatgtataaatttgacgtgataaa

SEQ ID NO: 145457 - DNA, 1354 bp, Zea Mays
agcgctcggaaagctaattgcacacccaaccgagaaaccaagccagcgagcgcaagcaataaacaacacatgccccacctcgccgccgccgcggcagtccccgcggcgcgtcccacggaagcgggccgcgtcgcgttccggcgccattggagcacgccactgccggagcctccgcgcctgcgcctgcgcctgcgcacgcgcgcgcggggcgtccggcgtgaggacggtggcggcgtgcgcacggaggagcaggagcagagtcagactcagacggcaccgcggacgttctacgaactgctcgggatctcgtcgcgggggagccccgatgatgtccgggcggcctacaggaggatggctctgatgtaccacccggacgtgtccccgccgggcgccgcggccgagaacacccgccgcttcatcgaggtgcaggaggcctacgagacgctctccgacccaagccgccgcgccagctacgaccgtgcgctcgcccgcggcgtctgccgcatcggcttctccgggcgccgttcccagtcccaccgcgcctactgccaccaccaggagcaggaagacaaatcttgctggagaaggtcttgggaagaccaggtcgcagagctgcagaggaggagcatggcagaggattcggaagagaacctgtcgtggggcgctcgtatgcggagaagaagggcggaggcatcatcagcagcagagtagctattccgtgacagtaaccgttccaatgcagttattttatactcgtaccgtacgtaacatctgaaccgaaacgcaatgagatcctctgcagtaaccacgtatgagtcactgacatgtggggccgatctaaatttggaccccacatgtcggtgatgggaagtcctccaatgtaaatagtagaaacatcaataacgaagaagcaagctaagctgttcttccagtattcagaatgtttcctgtatttgttcagttgttttcctttcagaagcggcgatttcagacgtgttaagcccaccgggctcccggcccgctacgattttaagcccaccgtaaccgaagcacctcactaggaagcatctatctacaagactacaaatgacctgtacacaagtagaccccttccttttttttgttttctaactcttggggttgagaattgagattaaaagttaacaatctatttgacatcttcctagttccttttagcttagctttctttatgacaggttccttctcccgaactcggaagcaagtgaattttctacacgagttcttgctagtcttgctagtgggctatcgtttatataagaagctagtacactcctcgccgcattgtgacaacacataaatattggataaaata

SEQ ID NO: 145458 - DNA, 2462 bp, Zea Mays
cccattcagtcgcggacggcggacgctcctatcccctagcctagcgcgcgcggacgcagccactatgccgggccatccaacccctgccgacgcgctcctcggcggcggcacatcccgccaccacgcggagcttctcctccatagcggcgatgacggcgtctctgtcaaggatctccgcctccgccgcgtcgtcccgcccgccgccggctccctcgataccttccccgagtgcgccgcacccgtgaagcccggatttgtcgagatcacgcctctagaggccgtgtcggctgctactgcggcggcggccggggactttgaccggaagttggcgcccccgcggtccaagctcgtccgcgatccgcgttcgtttgggtaccggcgtctgctgcctttcctgaacgagctgacgaagaacgatagctcaatcggcaaggaggtgttcccgcaagacacagctgcgcactcaaaggatgtgctcggcggatctgattctcggctggctgatgaagctataggcgttagccactgcgaacctgaagccatggtggttaacaccggaggagacaccgatgtgaaagatgcctgcaacaatgtctcggaagagatcaagattgcccctcatgacctaaccaacaaaccgttgcttgccggatgcacaaggtcgaggtttgttcatcatccgagctcgttcagctacaagaggatgctgccatttctcatggagaatgacatttctgctcaggaatgtaacagggtcaaaattcgaaaaattgcagaggaaaggcagctagcatcaaatgagaatgatgtctcagccagtgggcagcattgtcttgctgcatctgatgactcttctcaggaatgcaatagaggtcaagttgaaacaatggaagaagaaaagccagcaaaagcagatgagaataatgtccttggtggcagacagcttcagcctcctgttctagaagcgcctcctcctgatttcagtgtagttgaaatgcaaaatgtcatgcagcatgaagcttcggcttcaagtcaagttcccctaacttcttttgagggtgaattaacatcagctggggacagtgtccaggctgttggagaacatcagcttgttgcatcagaagagtctctagacgaacacaaaagagatgaagtcaaaagaagcatacatgatgcagtaaaatcagatgggggctatgctttggatagcagagaatttcagcttgctgcatcagaagtctctccagaaaacagcatggctgaagtgcaaggagctgcacaagaagaatcgttacctttagatggagttgaggaaaggtcagacaagggtgactttgtttccacagagcaggctcagctctgtgtcacaaatgaatctttggctgcacagctgcaaggtaatgttgaattcgctgaagtaccacagtgccaaaacttggacccaggatgtcatgatgttggttttggtagccgtaccaagagagtgataccattgttgcatcggcattgtgcacaacaacctcaggattccgtggtttctcttgatgatcagcttcttgacgatgacatacaaatgatctgcagacctgattcccgtgctgttgacagatacttatcagtcgaggaaatgtctggatgcattatgttaactgagtcagcatcaaacaaagcagggatatcgcggccaagaggtgcccattcaatggaaaaaggatctctgtctcctaagaaaccttctccaaagaaaggaatactcaagaggaatacaagggggtgtaagggtatctgcatgtgcttagactgctgcacattccgactacatgctgaccgagcttttgagttctctaggaagcagatgaaagaagcagatgatataataactaacttactgaaggaggtggccagtcttaggagtctgctggagaagcctgctggccaacaggaatcaacgcaagcagcttgcagacatgcttctcgggtggaggaggtggccagaaacagttgccagcagatgttcgtggatctaaattcccactgcagaatccctaaaccaagggttagattcaccgaatacgtcgaggaaaagaaggccttaccatctccacgcaggagcaaccgtagtaggtgacagaatttcagaaagtggtggcggcctgacctgctgaccctacggatcgtgttgcttggttgttcagtacataatctgtgctgcttggttgagtggttgtcacagaaggaagattgaaatgaaatgaccgacttttttttgcgaactggaacatgcctatttgcaaactttttagttgtgaaatgatggtcccttggttgtaagaagtctggcatgtgttggtttatgatgcttgaggtctgtactaccaagtactgtgtgctccctattttccacattgtttagatccaactccaagaaagagttctaaaattgggtcctaaattttaaaata

SEQ ID NO: 145459 - DNA, 1468 bp, Zea Mays
tgtcgtgactcgtgattcgtgaacggcggcgacaagaagccgggagagatgccgctggccacaactgctccgacgccggcgccgccctgtcctccgccgagtccagcagcggcaccagtccggacgcagctcctctcctccgtcgcgaagctcgcgctcacggccgcgctcgtgtgcggctctggcggtcccgctgccgtcgtcgtcgttccggccgccgctcaggccgtcccgttcgtccgtcctcctcctcctcccctgcaaggaaggcccttcgcctcctccactccttacgcgcagtcccagaagctgcagcttggcctcgacaagctcggaaagatcaggccatgcccgtccaccaacccggggtgcgtgtccaccaacccgctgggatcctccggctccttcgcctcgccactgctcatcccggaatcatccgcaggggagaagaccgtcgcctcgctgcggcaagccatcgagaagacgcagcgtaatgtggagtttaaggtcgacgaagacactccatatggacactacatcgaggcggagatggacggcggcgtcggccgggacgtgatggagttcctggtgaagaaagacgccggcgtggtggcgtaccggtgcatggccaccaaggtcaccttcgtctaccccttcaccaccgctgtcggcgactccaagggccagaagcagaggatcgcggccatctcgcaggagctcggatggtacgccccggacatccagtcctccatggactccgtcgacgacgtcaattacgttccgtgaagaattaagaccgtattacgaatcgtcacttcatcgatacgatcgggagcagagctaggggcggatctggttgattttgatgccgatggttcttacgatatgaggcgtgtccgtcttcagctctttataaaagggattcagcttttagctcctcacgtggagcgacttttacagtgaaaggtggtagagctgttctgtaaaatgtttgataaagataggtctacgagaagtcagttctttcggctctgactaagagcatctccaacaacaaaccctaaaatagagtcctaaaatttaaaataggaccatatttagaatgtttagggtctcaaaagaaatgtttactccaatagtcaggccttaaataatgctatttaagaaataaatcatgatattaggaaataaatggttggagattaagtggaaatgaggatagggctctagtatatgggtactatatttaggacccgagagaccgagccctataaccatttgatgaaattttataaaatagggccgctgttggaaggatgttttatagttttgagctctatatttaaaataggatcatgtttagagtctctcttggagatgctctaatgttaaaaaaaaaacggtttcggctccaggactcctttgtacattttctaaattaagagaacgtgataacaaattttgtttc

SEQ ID NO: 145460 - DNA, 1549 bp, Zea Mays
atgccgctggccacaactgctccgacgccggcgccgccctgtcctccgccgagtccagcagcggcaccagtccggacgcagctcctctcctccgtcgcgaagctcgcgctcacggccgcgctcgtgtgcggctctggcggtcccgctgccgtcgtcgtcgttccggccgccgctcaggccgtcccgttcgtccgtcctcctcctcctcccctgcaaggaaggcccttcgcctcctccactccttacgcgcagtcccagaagctgcagcttggcctcgacaagctcggaaagatcaggccatgcccgtccaccaacccggggtgcgtgtccaccaacccgctgggatcctccggctccttcgcctcgccactgctcatcccggaatcatccgcaggggagaagaccgtcgccaaaagaaattctagctcttcccctttccaaattaaacatagcgtcaatcgtgtgatgctttgcttttgcgtttctcaattgatctcttgctactttgtggtggccggcggcgtacgtacctgctgcaagtcgctgcggcaagccatcgagaagacgcagcgtaatgtggagtttaaggtcgacgaagacactccatatggacactacatcgaggcggagatggacggcggcgtcggccgggacgtgatggagttcctggtgaagaaagacgccggcgtggtggcgtaccggtgcatggccaccaaggtcaccttcgtctaccccttcaccaccgctgtcggcgactccaagggccagaagcagaggatcgcggccatctcgcaggagctcggatggtacgccccggacatccagtcctccatggactccgtcgacgacgtcaattacgttccgtgaagaattaagaccgtattacgaatcgtcacttcatcgatacgatcgggagcagagctaggggcggatctggttgattttgatgccgatggttcttacgatatgaggcgtgtccgtcttcagctctttataaaagggattcagcttttagctcctcacgtggagcgacttttacagtgaaaggtggtagagctgttctgtaaaatgtttgataaagataggtctacgagaagtcagttctttcggctctgactaagagcatctccaacaacaaaccctaaaatagagtcctaaaatttaaaataggaccatatttagaatgtttagggtctcaaaagaaatgtttactccaatagtcaggccttaaataatgctatttaagaaataaatcatgatattaggaaataaatggttggagattaagtggaaatgaggatagggctctagtatatgggtactatatttaggacccgagagaccgagccctataaccatttgatgaaattttataaaatagggccgctgttggaaggatgttttatagttttgagctctatatttaaaataggatcatgtttagagtctctcttggagatgctctaatgttaaaaaaaaaacggtttcggctccaggactcctttgtacattttctaaattaagagaacgtgataacaaattttgtttc

SEQ ID NO: 145461 - DNA, 1285 bp, Zea Mays
ggcaaacaccacgcgccgcgggcccttcttgcgtcagcatcgcacccgcacttgtccggtctgtgggcctggctgtttgttaggactgcccggcccggtgccccggtagtagtactagtagtatagctagcctagtagggtaaggaaacagtggtcgtcctctaatccgaatcggaaggcagcggatcggctcggaccgggccgggccggggcgtgtggctgcgctgcgtcgcctcgcctcgcgtcggcgattcttccggcgaaccaacggcgccagccacacctgagcgagcggcgcagaaaggtggcgcgtggacgccacgctcgcctcagccttagggatcgagggccctttccgtccgcgtggctgctgctcctctcgtctctcctcccacccgtccaaggcatggagcactgctatgtgggacagccgatctcgagggccgaggcaatgcccgagaggaggtccaggttctggcagatggatgcgcctcctccgccccgggcggaggtcatctgcccccagcctcgccgcgccacccggattcccctcaccgctgtggaaaccctgaacaaagccagccccaagatgaacggtgcatttccgccgtacagatcggactccacttgcgatatacttgatcttatcctcagtaagaatgactcggatggagattcgagcagccaggtgggcttcttatgcggctcacctccgatacgcgctgacaaccctgttatccatgatccacagtttggtaaaagactgccatccttttctcctctaggagggagctcctatggcaaaatgccagcagtacgagttgaagtaggctcgccatcttgcggcgttagcagcagcccaaaagtaaggattgaaggtttcgcctgtggcaactccgagacccactatgcagttacctttgtctgagcattttgttggtatgttcctgattttgcccttggaccgaccgaccgctcgctccttgtgaatcaccgtggtggtgtgcaggatattaagtagtgcatttaagctagcctgattagagttgccttttgcccttctgactggcaatcgaaactgcacaattgcagtgagtagtgagatgtatataagtgaggtccccgcatatttaccttatgatgtatgtgtctagtaaatttagctggagatctggtgtttcatggataagagcctgtgaatagagttgagtttttgcattcagaagtaagatgcaacatggagttttcagttattattatgaatgcatctttgttttgtgtcaca

SEQ ID NO: 145462 - DNA, 915 bp, Zea Mays
gggccctttccgtccgcgtggctgctgctcctctcgtctctcctcccacccgtccaaggtgaggagggtttctttccgtgcgccgaggtcttggcccgtcggtcgtttacttgcagtttattacctcgtttcttcttcttgggattttgtggtttgtccgcggcagttgatctgcgattcgcttgcattcggggtcggttcttgcgaaacctagcttgaccgcaggcatggagcactgctatgtgggacagccgatctcgagggccgaggcaatgcccgagaggaggtccaggttctggcagatggatgcgcctcctccgccccgggcggaggtcatctgcccccagcctcgccgcgccacccggattcccctcaccgctgtggaaaccctgaacaaagccagccccaagatgaacggtgcatttccgccgtacagatcggactccacttgcgatatacttgatcttatcctcagtaagaatgactcggatggagattcgagcagccaggagggagctcctatggcaaaatgccagcagtacgagttgaagtaggctcgccatcttgcggcgttagcagcagcccaaaagtaaggattgaaggtttcgcctgtggcaactccgagacccactatgcagttacctttgtctgagcattttgttggtatgttcctgattttgcccttggaccgaccgaccgctcgctccttgtgaatcaccgtggtggtgtgcaggatattaagtagtgcatttaagctagcctgattagagttgccttttgcccttctgactggcaatcgaaactgcacaattgcagtgagtagtgagatgtatataagtgaggtccccgcatatttaccttatgatgtatgtgtctagtaaatttagctggagatctggtgtttcatggataaga

SEQ ID NO: 145463 - DNA, 1714 bp, Zea Mays
gggccctttccgtccgcgtggctgctgctcctctcgtctctcctcccacccgtccaaggtgaggagggtttctttccgtgcgccgaggtcttggcccgtcggtcgtttacttgcagtttattacctcgtttcttcttcttgggattttgtggtttgtccgcggcagttgatctgcgattcgcttgcattcggggtcggttcttgcgaaacctagcttgaccgcaggtaggtagctctgttcttgttaattttgatttgaagggcatcacatcagtcaccagagacctatttgtttctttggttgatgatgttttttccttcagagatcctatgccagatttctcagtgaaacactgtcttctcccgttgtcgagatttcaggaaccagtcctagttctatatgtttcacccataaaactccattctttcccgtcgctaaattttttttcaccacatttcacgctactgcctcaagatctgtttggattaggttactgaaaccctcacgaaaaaacggcggaaatataaagaaacacgagaacgtgtttcgttttttccgtatagaaggcaacaccttttcggcaccaagcatttcctttgcttcttttccaattggaggtcaatgccgtaacgaaagaaggaaagctcgtttgcatccttttttgcgggccatcgcggtgttgataaggaaaaggcgattgccccaccagtcctgtttggatttcctccgttgttttgatttttttgtacgcgcattggttcctccacgcttgctcgctctattgtagtcatttccttccaatttagcggactcaatttctcctgatcgtcaggcatggagcactgctatgtgggacagccgatctcgagggccgaggcaatgcccgagaggaggtccaggttctggcagatggatgcgcctcctccgccccgggcggaggtcatctgcccccagcctcgccgcgccacccggattcccctcaccgctgtggaaaccctgaacaaagccagccccaagatgaacggtgcatttccgccgtacagatcggactccacttgcgatatacttgatcttatcctcagtaagaatgactcggatggagattcgagcagccaggtgggcttcttatgcggctcacctccgatacgcgctgacaaccctgttatccatgatccacagtttggtaaaagactgccatccttttctcctctaggagggagctcctatggcaaaatgccagcagtacgagttgaagtaggctcgccatcttgcggcgttagcagcagcccaaaagtaaggattgaaggtttcgcctgtggcaactccgagacccactatgcagttacctttgtctgagcattttgttggtatgttcctgattttgcccttggaccgaccgaccgctcgctccttgtgaatcaccgtggtggtgtgcaggatattaagtagtgcatttaagctagcctgattagagttgccttttgcccttctgactggcaatcgaaactgcacaattgcagtgagtagtgagatgtatataagtgaggtccccgcatatttaccttatgatgtatgtgtctagtaaatttagctggagatctggtgtttcatggataagagcctgtgaatagagttgagtttttgcattcagaagtaagatgcaacatggagttttcagttattattatgaatgcatctttgttttgtgtcaca

SEQ ID NO: 145464 - DNA, 899 bp, Zea Mays
ctttcgcctataaagagatcgatccgtgccactggctcactcacggcagctctgaagcgagaaagagatcgatcgtattcgtatccgcggaacaagcagcgaaggatcggagcctatccaatggccgagggcaagagcagctccggcggcgacctgttctccagcggcaagctggtggcgggggccgccgtgtcggtgttccagcagaagagcgtggagaacgtcgacaagcaggaggtcgccggcgcggcggccgagctcctgcacgcggcgtccgcgtacggtaagctcgacgacaagccggccgggcagtacgtcgagaaggccgaggggtacctgaaggagttcagcgcgggacacgccaccgagcaggagcagcctgcggcggcagcaggcgacgacgcggcgcccaagtcaccggcgccggaggcgcccaaggagccggcggcggtgcctgcgccggccgcggaggaaggcagcaagtcgtcggaggggttcggcctcggcgacgtcatgaagggcgccgagcagctggtgggagggaataagcagggcggcggggaggagagcgccggcggcggtgggctgtttaagatggcccagggcttcctcaagtagatattgtctggccaacgtatatacgagtacgtaattagcttcaaaataatgttcccctcgcctttatttgctgttcaagtccctgtaataaccgagaacgttaattgtagcagtgtgttttttatatgattaaataagtactatgttgtataaggctagtgcagctgtgcaggttactctatattcttactctatatcactatttgtagtctactcatcaattaataaatagattgcttgataatatacatcaagaaggagatcaccatagagttcataac

SEQ ID NO: 145465 - DNA, 2217 bp, Zea Mays
gtgagtgctgtgcaagctgcaaggcacccgttcaaaactcactccccgcggcgcagccgggcgaggctggtgaaggaacccgcacgagtcgtcaggtcaccgccggcgctggagaaggctacttcatcaggggtggacgcacgtgggtcggcggccatgtcgctgctctgcttcctactggaccttcgcaacatcccccctcccctgctccaccgcctcaaggagtgcctgctcgacctcgccaacctctacgccgccactacgtcacagacacacgcagtgaccgcatcccccgccgccgccggcacgctccccgaccgcttggccctcggctacgtctacgatccttcatccaaaccatcctcctcgtgctcctcctcttgccctgagctaaagattgggtataggcctggtgaaaaattcagtctacgagatttccaccatgccgtaaataacctacctatggatggctttcttgctgatcaacatggtggatctttgcctattagagatgtatcactgacaagcttttttagcaacaaagccatctactcttgggctactgatgacatctccaaaaaagtgattgctatatgtatgtctgcacaaaatacagaagctctccgaagaactcttatggatgcagcagaacagtgtgttgccgtggattttataatgttggaagcagaagctgcattcatgtacggccgtgcttcagaaaatgccaattcttttgtgaacagaatctgtgatcttgaaaactgtgtggtacggagatacaatcctgagacccaagttttgcatggcctagttaagaggtggttagaagagctaaaggatgacaaagaggatacactgcaagctgtatttgtgttcagtgatcccatcattgattctgttaaacacatatattgcaacctgtatgcatcagcaaaccagataactgatggttttccaccttgccaggcatgcaagtgccatggtcaccctattgaccttttcaccccaagtaaggcaaaatggacgtgtccaacaactaatcgacagcttgtagtttctgatattgttgatactgctgtaaggattggagaacaaacagtattgtttctacctactttggaaggtagctcaaacttgcggcgtgtctctacttccatttcttttgttgtaattgagcgcactgaattggcctcaatgaatgaaggagtcataatggggaggtcttatgttgtgattcccagttcaaatgatgttgaagcttctctagctgatgagagaacagatcagaacaccaaaattttctatggtctatgtgaaactcttttcaagcttgaccagggacttgtttgttcctcatcatgcaatattgaaacaatgaaaattggaactcttcagtgttattatcttcttcaaccttctgaaaaaggaccaatgcttctgaggagactcgctgcatctgaagagatattgcctctcccagacatgactcgagattgcagctctaagattaccatggaaatcaggaattcaatcgaaacctctttatctaagattatgctcaaggattacaaccctctacatcatgaaagaggctttcattcagaactgaatcgcctggtgagggacagcctgcaatttggatcaattgctccgtcctgtgccccgaaggaccctcacaacattggttcgttcagcgaacctcaggtaccaacatgtcaggacctggaagaaagcatgtccctgaacgaacatgaggatgcggctggaggtctcaacgaccatccgtactcgttcagcgagcctcaacctcaaacatcagcattcataactccgagcaagaacaaggcatcgatccagtccaagaaagggaaggcctctcccagcatcagtgaggagtgggagaagctcatcatcatcgacgacctcgacgacgactttgccagccccgcacatcccagaaccgctgttcacaaacctccccgccccaagccaccgtccccagtgaagccgctggacgagaagacttcaaggatcctggagaggctggagccccccagggcgaagaagcagagagcgaacattgttagcaaggccagcactggcgcagcaccggcacctgccagtaaacagatcaagaagccgttgctgctgccgcgtgagccgagcgcaagccagccgctgcgaccttccttcagcaggcttaggagagttccctac

SEQ ID NO: 145466 - DNA, 1762 bp, Zea Mays
accttggtgttttccttgagcaaccgcctctcctcctcctccccttcttgctagtagtatataacatcccccgatcccgtccctcgcaaaatttcaggcctctcgccgcgccatttccaccttaaaactgatcccttcgcttgaatctcccttcttcttaaaatagatcgcgcgcgcatgatgacagtcgaccttggcctgcaggcggcgccgccgccgtcgtcttccggcggcgtgccgagcagttgcacggcgctgccgccggggttccggttccaccccacggacgaggagctcatcgtccactacctccgcaagcgcgcggccgcggcgccgtgcccggcccccgtcatcgccgaggtcgacatctacaagttcgacccatgggacctgccagccaaggcggttttcggggaggcggagtggtacttcttcagcccgagggaccgcaagtaccccaacggcgtgcgccccaaccgcgccgccgggtcaggctactggaaggccaccggcaccgacaagcccatcacgctctcctcctcctcctcctcctccgccgccgccgccgccggcatgatcggcgtgaagaaggcgctcgtcttctacagggggcggccgcccaagggcgtcaagacgagctggatcatgcacgagtaccgcctcgccgaggcgctccacgccgtcgtcaacgcctacagacccacgcggttcaagaacaacgcctcgtcgtccatgaggctggacgactgggtgctgtgcaggatctacaagaagaccaccccgcagctggcgtacagcatgtcgccgccgccgcacgaggaggtggaggcgtcgtcgacgtcgttcatggacggcggcggcggcttcgacctcagccgcctgcacccggcggacgactccgcctccgtctccgccgacgacgacatcatggcgttggcggcggcggcggccacgtcgtactacgccgcccggccgctgccgcgcccggcgtccatctcggactacctcctcgactactcggccgtgtccgagctgttcgaggccaccccgctaacggagacgacggcgcagcccgggacggcgacggacgcagcaggcgggttctactacgacttcggtaacggcggcggcgagcctgctgcagccgcctccgtagtagcgcagcagcatcagctgagcccactcaagaggcggtcttccgtggacgaggataactgcaacggtggcattactgacatgctgcacgcttcgtcgtcgtccagcagcaagagggtgatgggcgatcatcactcatcgtcgtcgtccatggctgcaaacagctccgtgtttgagcccggacagacttcttctcatcagctgcacgacagaatatgacgcagcagcatgcatgcatgggtggtcgctccctcgctgctgattatgctagggctagctaggaaagaataccgctgctgattattaatttcattagtattcatgattgataaggaaggaattcaacatttatggattattagtatatattatatatgtagttataaataatatatatacttacccaagtttatattgtaactgtgtaaaaatagattgattagagcaaaaggatatttacagtgacgatttcactggctatagttagatctgattgtagctagatgtaatgcacctaggtagctataggttgtaacatgcatgtaagaacacatttgttgaataagatcccataatatgtataaaaatctgttttccattatatata

SEQ ID NO: 145467 - DNA, 125 bp, Zea Mays
ccagggaacagtcttccagcgctggttgtctccctcacaccactcccacagcacaagtgacgtcccgtcgcgcacaccaccgtggtccttgtcccaggccatgtaaggcgtcaaaattcaggtag

SEQ ID NO: 145468 - DNA, 116 bp, Zea Mays
gtttccatacatgtttttgttatgaaatagatcgatggtttacactaaaatttatacccatttatgctgttttggttcacgttttacgctgaaatccgcctgaactcccacgcacg

SEQ ID NO: 145469 - DNA, 1635 bp, Zea Mays
cgcgctgcggctggcacagtgcctctcgctcactgactgactgtaataccagagatcgaacaacttggtcctgcagctcaagaagagagtttttgtgcatttgggggccgggggcaagagagagagagagagccatggcggcggaccagcagccgcagctgcaggaggagatgaacgacgctgccggcggcggcctcaggctgcctccagggttccgcttccacccgagcgacttcgagattgtcagcttctacctcaccaacaaggtgctcaacacgcgcttcacctgcaccgccatcacggaggccgacctaaacaagattgagccatgggacctccctagcaaggcgaagatgggcgagaaagagtggtacttcttctaccagaaggaccgcaagtacccgacggggctgagggcgaaccgggccaccgaggccggttactggaaggcgacgggcaaggacaaggaggtctacaacgccgcggaaggggtggcggtactggtcggcatgaagaagacgctcgtcttctacaggggcagggctcccaggggtgacaagacaaactgggtcatgcacgagtacaggctcgaaggcagcggcaggctccccgccggcctcgcgtccgcaaccggctcagccgccgccaacgccgcggcggccttgaaagcttctgcttataaggtgcgttgcgtggcagtagcggtagtgtaacagcaccggcatgatgtggatgtatccatattgatctacatgtgctttattttgctaattaccctaatctgattccgctcctggtttgcaaaaacgaaattcggcgcagcaggatgagtgggtagtgtgtcgtgtgttccacaagaccactgggatcaagaagaccactgctgcaccggcgtaccaggtggccatggccggcgctgagatggatcagaatcagaacaacttcccgggcatccccttccccatgccgatgcaatttcccatgctgccagacttctccttggacccggtgcccccctactaccccaacgccgctggcgcggggatgtcgatgcttcctatggcagcaggtataggtggtggcgccggtgggttccagctcaacggcgccgccctgttcggcaatccgatggccgcgccgcagcccatgagcttctaccaccagatgggcgcggcggggacagcttgcgctggcggcttcgatgtttctgcgccggagagtaggccgtcctcgatggtgtcgcagaaggacgaccaggctaatggcgctgagatctcgtcgatgatgtccgtggccggcccagggcctgcgaccaccaccaccatagagatggatggcgtgtggaagtactgaaaacgtggagggtggagggcaaagacatgaattcgcataaattaaatatgcatgtaatatctatatctgcattgcattttgtgaaatatgatgcatgcatggtttgtatattccgtaataaccagtagttggtaagctatgtgtgtgtatggatgtactagctagtacatgcaccgtatcattgcatgtgtggtatatgtctcgtttggtgttagtaatctgcttggttgtgctgatgactgatggttgtaagaagcagattcgagtttggtacaatattat

SEQ ID NO: 145470 - DNA, 1567 bp, Zea Mays
cgcgctgcggctggcacagtgcctctcgctcactgactgactgtaataccagagatcgaacaacttggtcctgcagctcaagaagagagtttttgtgcatttgggggccgggggcaagagagagagagagagccatggcggcggaccagcagccgcagctgcaggaggagatgaacgacgctgccggcggcggcctcaggctgcctccagggttccgcttccacccgagcgacttcgagattgtcagcttctacctcaccaacaaggtgctcaacacgcgcttcacctgcaccgccatcacggaggccgacctaaacaagattgagccatgggacctccctagcaaggcgaagatgggcgagaaagagtggtacttcttctaccagaaggaccgcaagtacccgacggggctgagggcgaaccgggccaccgaggccggttactggaaggcgacgggcaaggacaaggaggtctacaacgccgcggaaggggtggcggtactggtcggcatgaagaagacgctcgtcttctacaggggcagggctcccaggggtgacaagacaaactgggtcatgcacgagtacaggctcgaaggcagcggcaggctccccgccggcctcgcgtccgcaaccggctcagccgccgccaacgccgcggcggccttgaaagcttctgcttataagcaggatgagtgggtagtgtgtcgtgtgttccacaagaccactgggatcaagaagaccactgctgcaccggcgtaccaggtggccatggccggcgctgagatggatcagaatcagaacaacttcccgggcatccccttccccatgccgatgcaatttcccatgctgccagacttctccttggacccggtgcccccctactaccccaacgccgctggcgcggggatgtcgatgcttcctatggcagcaggtataggtggtggcgccggtgggttccagctcaacggcgccgccctgttcggcaatccgatggccgcgccgcagcccatgagcttctaccaccagatgggcgcggcggggacagcttgcgctggcggcttcgatgtttctgcgccggagagtaggccgtcctcgatggtgtcgcagaaggacgaccaggctaatggcgctgagatctcgtcgatgatgtccgtggccggcccagggcctgcgaccaccaccaccatagagatggatggcgtgtggaagtactgaaaacgtggagggtggagggcaaagacatgaattcgcataaattaaatatgcatgtaatatctatatctgcattgcattttgtgaaatatgatgcatgcatggtttgtatattccgtaataaccagtagttggtaagctatgtgtgtgtatggatgtactagctagtacatgcaccgtatcattgcatgtgtggtatatgtctcgtttggtgttagtaatctgcttggttgtgctgatgactgatggttgtaagaagcagattcgagtttggtacaatattatcgtgaacctatatattatatatatgttaattatagtatgttgtttaattatatgaacttgattgccaaaat

SEQ ID NO: 145471 - DNA, 1564 bp, Zea Mays
cgcgctgcggctggcacagtgcctctcgctcactgactgactgtaataccagagatcgaacaacttggtcctgcagctcaagaagagagtttttgtgcatttgggggccgggggcaagagagagagagagagccatggcggcggaccagcagccgcagctgcaggaggagatgaacgacgctgccggcggcggcctcaggctgcctccagggttccgcttccacccgagcgacttcgagattgtcagcttctacctcaccaacaaggtgctcaacacgcgcttcacctgcaccgccatcacggaggccgacctaaacaagattgagccatgggacctccctagcaaggcgaagatgggcgagaaagagtggtacttcttctaccagaaggaccgcaagtacccgacggggctgagggcgaaccgggccaccgaggccggttactggaaggcgacgggcaaggacaaggaggtctacaacgccgcggaaggggtggcggtactggtcggcatgaagaagacgctcgtcttctacaggggcagggctcccaggggtgacaagacaaactgggtcatgcacgagtacaggctcgaaggcagcggcaggctccccgccggcctcgcgtccgcaaccggctcagccgccgccaacgccgcggcggccttgaaagcttctgcttataaggatgagtgggtagtgtgtcgtgtgttccacaagaccactgggatcaagaagaccactgctgcaccggcgtaccaggtggccatggccggcgctgagatggatcagaatcagaacaacttcccgggcatccccttccccatgccgatgcaatttcccatgctgccagacttctccttggacccggtgcccccctactaccccaacgccgctggcgcggggatgtcgatgcttcctatggcagcaggtataggtggtggcgccggtgggttccagctcaacggcgccgccctgttcggcaatccgatggccgcgccgcagcccatgagcttctaccaccagatgggcgcggcggggacagcttgcgctggcggcttcgatgtttctgcgccggagagtaggccgtcctcgatggtgtcgcagaaggacgaccaggctaatggcgctgagatctcgtcgatgatgtccgtggccggcccagggcctgcgaccaccaccaccatagagatggatggcgtgtggaagtactgaaaacgtggagggtggagggcaaagacatgaattcgcataaattaaatatgcatgtaatatctatatctgcattgcattttgtgaaatatgatgcatgcatggtttgtatattccgtaataaccagtagttggtaagctatgtgtgtgtatggatgtactagctagtacatgcaccgtatcattgcatgtgtggtatatgtctcgtttggtgttagtaatctgcttggttgtgctgatgactgatggttgtaagaagcagattcgagtttggtacaatattatcgtgaacctatatattatatatatgttaattatagtatgttgtttaattatatgaacttgattgccaaaat

SEQ ID NO: 145472 - DNA, 918 bp, Zea Mays
attcctatgcgcctcccgtctggccgtcttccagacgtctccaatcggagctcccagcgtctcggagaagaggagcagcacggcacggcagctgtggcgaggaaggctcttgtcctgtcccatcccaacccagcagccgtccaaggaggaggagatccaatcggcgtgcaggcgtccaccgtccatccatcgatccaattccaatctgcaggcctctgcgtcgcggcttgttcgtggaggagaggttgctgtggaacccgccgccagttagccatgtcgtcctccgtgctgagggctgcggccgacagggctattcgcaggcaggccctcacgctgacggacgccgcggcgtccaggatccggcagctcctcagcctcaggcagcggccattcctgcggctcggcgtcaaagcgcgtggttgcaacggcctctcgtacacgctcaactatgccgacgaaaaggggaagtttgatgagcttgtcgaggagaagggagtgaaagtgctgatcgaccccaaggctctgatgcatgtcataggcaccaagatggactacgttgacgacccgttaaagtccgagttcgtgttcgtaaacccgaactccaagggggagtgtggctgcggcgaatctttcatgaccacgggcagcaaagggtcgccatcgtgaggcggcgtcgtcgtctgtctgttggtgtaaagcaaacgcgtccgccgcaggatccagagctatacaggttctttaaggtttatcctgtaggcatctgtggctccgccggagtccttatagttgtataaacacagggcagctgactcgcatgtacttgtaaattcacttgaaatgttgacatggtcaggttttccccccatgtttatgcgtatctggtaatctcacggttcaagggctcgaatttgtgtggaa

SEQ ID NO: 145473 - DNA, 991 bp, Zea Mays
attcctatgcgcctcccgtctggccgtcttccagacgtctccaatcggagctcccagcgtctcggagaagaggagcagcacggcacggcagctgtggcgaggaaggctcttgtcctgtcccatcccaacccagcagccgtccaaggaggaggagatccaatcggcgtgcaggcgtccaccgtccatccatcgatccaattccaatctgcaggtgagcagctcgttgagattcccaatcaacagctcgaatcgcctgctctcccatcctattgaatgaaactatggcctctgcgtcgcggcttgttcgtggaggagaggttgctgtggaacccgccgccagttagccatgtcgtcctccgtgctgagggctgcggccgacagggctattcgcaggcaggccctcacgctgacggacgccgcggcgtccaggatccggcagctcctcagcctcaggcagcggccattcctgcggctcggcgtcaaagcgcgtggttgcaacggcctctcgtacacgctcaactatgccgacgaaaaggggaagtttgatgagcttgtcgaggagaagggagtgaaagtgctgatcgaccccaaggctctgatgcatgtcataggcaccaagatggactacgttgacgacccgttaaagtccgagttcgtgttcgtaaacccgaactccaagggggagtgtggctgcggcgaatctttcatgaccacgggcagcaaagggtcgccatcgtgaggcggcgtcgtcgtctgtctgttggtgtaaagcaaacgcgtccgccgcaggatccagagctatacaggttctttaaggtttatcctgtaggcatctgtggctccgccggagtccttatagttgtataaacacagggcagctgactcgcatgtacttgtaaattcacttgaaatgttgacatggtcaggttttccccccatgtttatgcgtatctggtaatctcacggttcaagggctcgaatttgtgtggaa

SEQ ID NO: 145474 - DNA, 1240 bp, Zea Mays
aagatccgaacttgacccattgctctagtttgcacatgtacgttcccatccaaaaaccctcggcaacggtgatgcgacgcccgtcccgttccaagtcctgacaaccgagcgtacgctgagctgcaagtaaacggcgctggctaccggaagagccgagccggaccaagtctcctcgtccctcacctcgtcgccgatggagggcggcgactcgtccggcgccggcgccggcggcgccgtggccgcggcggccaagtggcggagcgacgcgtcgcgggcgttccagtactacctggaccgctcgacgcctcacgccacggggcggtggctcggcacgctcgccgccgcggccatctacgcgctgcgggtttacatggtgcagggcttctacatcgtcacctacgggctcgggatctaccttctcaacctcctcatcggtttcctctcccccatggtcgaccccgagctcgacccttccgccgcctccgaggggccggcgctgcccacccgggggtccgacgagttcaagccattcatcaggcgcctccccgagttcaagttctggtatgccatcacaaaagcttttgttatagcttttgtgatgactttcttctcagtgtttgacgttcctgtcttctggcctatactcctctgctactggattgttctctttgtccttacaatgaagcgccagattgtacatatgatcaaatacaaatatgtgcctttcagtatcgggaagcagaaatatggtgggaagaagagtgccgtgagcccgagttcctcaaaagactgattccgaacctgccccagtagaaacttgccaggggaacaagatacgttggatgatgatatttgatgtgctcaataccaagtgtaatacttcattcatatctaggaggtagacggattttcgctcctgtttctgactctgggctcactgtttaattccatgttgtgcttaggtcgcttcctcctatgcttgtatagcgagtttcgcgtctcagataaattatttcgttttagttactacatatctgggccctaaaacaataagctctatgctctcagcaagtttggttgggtgttgagctgggtgaggtaggcggttggttatttttgtatcgaactggaacaggatgctaaactttaaacgcagaatattttgacccactgtagcatatcatagatagtacgtatcaaacatcgaaattcaaacgcagaatattgctgtctgcatttg

SEQ ID NO: 145475 - DNA, 3349 bp, Zea Mays
cgtcactctatcatatcatcagtgtggttcagtccgtgactcgcgctgcacaccacggccggccagcccgccaccgccggaggcaggtaggctatccgtgccccgttgattcccctctccattgcggccagccgtctccccctacctcccactgcgtcgacccgctccgctccactcccgcttttcaatcgaatccgatacgcgccccccttccatcccgttcctatccccccgaccccggcccaccaatcctcaggccactcgcgccgcatcgccaccccattcctcctcacatcacatcgatggaggccaaaaccttaacccctgaggcggacgccgccgccgcgccccaaaccctagccgccggggagctcgtctgggccaagccctccaagccccgccggcactgctggtggcccgcgcgcatgctcgccgcgtgccccgcctccgccacccgcggcgcccaagtctcctacttcagtgaccccgccgcccccggcgcgccgtccgcccctcccgcgcaggtccggcgcttcgccgacgccgacgccggcgccgacatgatggcccgcggcagcaccgcgcgcggattctccggggccgtcgcggaggcagaggcgcgcgccgtcgcggcgctgcgcgcccagctcgcctgcgcttgcgtcccgcccacgccgccgcccggagaggatagcagcgtcaccggcgtcgccaacctggcgcccgcggagttcctggccgcgctccgtgaggccgcattggacgtcttctctgccggcctgttggaccgcgccaggctcaagagctgggtccgggcggtcggggaggggtggggtccacatggcgcccggcactacccgcggcgcccgctgcacgaccttgtggacaagatcgatcttgatgtgcctgctggcgaagacagagatgctgatggttggcttgccgaggaccagcacaaggcattggagaggccggaggagacaccattgaggcacaagaagcgtggtgtcaccaaagtgctggatgcaggggaggatgagggcaagatggatagccctgagcatgtaacctcaggaaagcgacagcggaagaggagtaagtacctgttgccaccatacaccagcttggttgtggttgacaagattgccctcaaaccggttgatctgccaagggcattggtgaccgaagctgctgaagatggcagcgatatgtcgccattgccagacagcattgttgtggaagatgtcttgctgctggtgcgaagattaggggaggttcccaggcataaggacgactttccaaaggacgctgagggatttctctgtttgtttagaagcacaacatttgttcacggtgctgactatgagtcttgtaaggcatatgaatgtccactcgtgcgtggctctggaaaagttggcatggaaattgttgtcgctctagcctctgattcacatgcttttctgaatcaaggcagttgtgtgttgaagaggaccaggaaaaaagatgaagctgtgagtggtagcccttccatcaagaagaagcgggagaagacctctcttgccagcgctgatataccaatcgctcctgctattcctattaggcagttgaaagcagaagatatgagaaccctcatgaaggctgaaagtggtctaaggggtataggattaggagttaagaataataagggcaaaccttcacctttgaaagttcctatttcagctgcggatcctggagcagtggaattaggacacgaacatgcccaagcaaatgttctggctgtgtgcaatacgttccctgaacagcccgcaaaagaaaacgatgctactaacttggaagcaacaaggtcagaaatgaatatgcaaaatggtactgtagatgtgcctatcagaagtgttcagacagaagcaatgaaattgcaagctaataatcccatagatgtgaatgcacaaagcgttgctgtagatgtccctgtaggaagtgtttctaaggaagcaacagagccagaaactagtgtacacaaggacaagaatgtgcaaagcgatgtttcaggtgtatctgacagaattgtttctaaggaaccaacagagtcggaaactgacgatcacataaacgagaatgtgcagagtgtcgctgcagatatgtcttccagaagtgtttcaaaggaagcagcaatgaccgatgctgatattggcatacatgaaaatacgcaaagtgctgcagatttgcctgacagcagtgggccgtctcctatgcatgaagacatgtctcagcctgtggatggacataaggagcctgggagtgtagaagtctgcatagtccagcaatcttacgcttctctggaagctatggtgccagaaatgcttaagaaagctaacgctaatggcgcaggcacaatcggtgtgaattatacactcaaagacgagtttcaaaaggatggacaacctgtcgagaaagtgaagctaccagcagaagtggcgaaccattcctgtggtggaggtaccaatggcacttggctggaccctgctaaccttacacctaagaaaaggaagaaagtcgcgcagcacttcagcaatccagcagccgtcatagtggaattcgcacccggtgccactgttccgtccagacaggagctgctctccacattcggcaagtacggcgacttgatcgagtctcagaccgatatttcggaaactacccgcagcgcctctgtcgtgtatgggaaaagcgttgaggccgaggaggcgtacaggaacggttgccagtaccttcttggtcagtttgggcctccgttcgctacgctaaggcttgatttctccccaatcgtgccttcaccgtctcctcccgcttcgaaacctccgctccgagatattcggaagaacctcgaggacatgatttcgtcccggcgctcggctttgaacaaggcgacctcgtcggcagacgcccagctggaccctgttccagataagcttctgggggagatgcaggggctgttggcaaaagtcgacaggatgcttaccaggcctcatgctaatgctccttagccctgccaatctggagggttgtggctgtaacctattcggtagttaggcaactttggtgtctgctctgttagctgtgaatggcggggcttgttttgtggctgcttcgtgtactatatatatgccaataaggtcgcagcttcttttcgtgcccctgattttgatgttatgttagtagtatggcattgccattttgtcagagctgttggagtttgcaccggaaccctaaagtgcacttgtgctgtagtgcttgaaacattgctcagtcgtcttggtgaatcgttcgaatgtggtgctggtatgcattgaag

SEQ ID NO: 145476 - DNA, 2564 bp, Zea Mays
cgacctattttgacaaattcctccaccgctcatcctctcccgcgcgcttgcccctttccgcttggccttccgcccctcctcttctccgcacggagcgccgccacaggtgattgctagggtttcggggccgccgcctgcagcagccctaccgccagcgctcctacgcctgtgtccctgttcctctccgtcccgttctgccggcgtaccacggctgacggccgacgccctgcagatccagcaaaggcaacgctgagatccctacgacttcgaacggcctgtgacctgtggatctgtgccagcctgttggtcgagctacctgctccagaccgagcagcccgtgttaaagctagctaaggaaacagggcctaagtgagctcagaggaaaaaaaggaacgcaatggaggaagggaacgtgcgggtggacctcgacaagctccccatcaagcgccttgaggccattgaggagactggcaacgagcactacccacctgacactagcaacgaggagcagcgactcgcggccatccgccggattgacttctcctgggtcatagagaaggatgcaaagaaggccaagaaggcggctgaggctgacactgcccagcaggcatggccctggcagggccttatggagagcctgcagcaggcacatcaggagctctctgtcgtcatagacctcatcggcacggttgaggctaacgacgctgtggcagtcgcctcgacaacgaagcccaagtcgcagccaaatgaaatactggttgacatggcagtctctgctgccaccaagctccagcgccttaggcatttgtcatggtacttcaaacaatctgctaagactatggagcaacaattccaaaaggagactaggttctacggctccttaataagattgcagcagaactggaaagtgaagcggcagcgggctgttgggagtccaggaagtgaaggcttcatgtttgatctagttgatagttctcagctagacacaacaacagtgcttcgattatcaccattatctttaattccgattgatcaagactcttcaggcactttgtctgtacaaattccacagaagtctttgcgttccttgagccttaaatttcatggagacatagtcaataatgcagaaagcagtgctatcaaaaagaaagaaggcacattaaccaacactactgctgaagccgaaaaggatgttttggcagatgatgatgtcaataagtctattagatatgcacattccatccttcgtgacatccacaagtccatatttgaggagcaggtatttgatatggtgatccgggagacgtttaaccagtctcaaggcatcaatgttactgggatgtgcgaagattttctccaattagctattggccaggagtgttcgttgtgcctttcgcttgagctctctggacagaacaataacgcaggaacagtaggacagcaagatcatatggatacaaattatcctggaaatcttgcagtagccactgtaaatgggaaggagtcctcaaataaggatgtgagagggtttcctaaccccaaaagcttagaaatctacctgctccatatgttccatgaaattcttaggaaactcagggagaaatctcgtcatgtggttcgctaccagagttctgctcaggctgcacctgacgattgtggcctgctaagccatttttgcatgacagtggctcacaggatattttctaacaaagtacatttggagctggaaagcgtggttagtagggttccttatctccatctgcgttcccttcctacatggcattctcgaacttcttcctggtctctctgcttgaaagttcctcagcctatcctggccaccggtcgagtcacaaagccttcagactatcacgagctgaagtacaaatccaggtcgcagtttagtacaaaggtgatcttgaaagatggccaaattagtttaatgggtgagggctccccaagcattgttgggtccttgactgggaagccatctgattcacgtctgataaatagttacaattgtgacttggaagacctcccaatgatgcttctgcagcaggtcgccagtcaagtaatccactggctccatgatgaagcgatgattcttgggatgaacgtgaccagagatttcctgtgcctgtactttgaccttggccaaggcgaaacacttggtctattggcacatgtcgacccggatgacacctatggctgcatctcatggtacctcactgttgaacacccaatggaggaggggaagatgtcagctggcagtccagagtcagagaagcgaaggtttttggggtacctttccctggaagtgctttactctaccctgatggacctgataaaattgtgcagcacaagtgatcaaattcgtgcctcttgatcgacataagtggatgaaatgatgtatgtccgtgcagtgtttaagagtatgtaaattgaggcattatgtgcaccttttgtttgctaataggatgtttggcttgaaaaatggagtccatcctctcactcttcagtatgtttgtttggttcatgaatgaaataagctgatacatcaccatctt

SEQ ID NO: 145477 - DNA, 2274 bp, Zea Mays
cgacctattttgacaaattcctccaccgctcatcctctcccgcgcgcttgcccctttccgcttggccttccgcccctcctcttctccgcacggagcgccgccacaggtgattgctagggtttcggggccgccgcctgcagcagccctaccgccagcgctcctacgcctgtgtccctgttcctctccgtcccgttctgccggcgtaccacggctgacggccgacgccctgcagatccagcaaaggcaacgctgagatccctacgacttcgaacggcctgtgacctgtggatctgtgccagcctgttggtcgagctacctgctccagaccgagcagcccgtgttaaagctagctaaggaaacagggcctaagtgagctcagaggaaaaaaaggaacgcaatggaggaagggaacgtgcgggtggacctcgacaagctccccatcaagcgccttgaggccattgaggagactggcaacgagcactacccacctgacactagcaacgaggagcagcgactcgcggccatccgccggattgacttctcctgggtcatagagaaggatgcaaagaaggccaagaaggcggctgaggctgacactgcccagcaggcatggccctggcagggccttatggagagcctgcagcaggcacatcaggagctctctgtcgtcatagacctcatcggcacggttgaggctaacgacgctgtggcagtcgcctcgacaacgaagcccaagtcgcagccaaatgaaatactggttgacatggcagtctctgctgccaccaagctccagcgccttaggcatttgtcatggtacttcaaacaatctgctaagactatggagcaacaattccaaaaggagactaggttctacggctccttaataagattgcagcagaactggaaagtgaagcggcagcgggctgttgggagtccaggaagtgaaggcttcatgtttgatctagttgatagttctcagctagacacaacaacagtgcttcgattatcaccattatctttaattccgattgatcaagactcttcaggcactttgtctgtacaaattccacagaagtctttgcgttccttgagccttaaatttcatggagacatagtcaataatgcagaaagcagtgctatcaaaaagaaagaaggcacattaaccaacactactgctgaagccgaaaaggatgttttggcagatgatgatgtcaataagtctattagatatgcacattccatccttcgtgacatccacaagtccatatttgaggagcaggttccatgaaattcttaggaaactcagggagaaatctcgtcatgtggttcgctaccagagttctgctcaggctgcacctgacgattgtggcctgctaagccatttttgcatgacagtggctcacaggatattttctaacaaagtacatttggagctggaaagcgtggttagtagggttccttatctccatctgcgttcccttcctacatggcattctcgaacttcttcctggtctctctgcttgaaagttcctcagcctatcctggccaccggtcgagtcacaaagccttcagactatcacgagctgaagtacaaatccaggtcgcagtttagtacaaaggtgatcttgaaagatggccaaattagtttaatgggtgagggctccccaagcattgttgggtccttgactgggaagccatctgattcacgtctgataaatagttacaattgtgacttggaagacctcccaatgatgcttctgcagcaggtcgccagtcaagtaatccactggctccatgatgaagcgatgattcttgggatgaacgtgaccagagatttcctgtgcctgtactttgaccttggccaaggcgaaacacttggtctattggcacatgtcgacccggatgacacctatggctgcatctcatggtacctcactgttgaacacccaatggaggaggggaagatgtcagctggcagtccagagtcagagaagcgaaggtttttggggtacctttccctggaagtgctttactctaccctgatggacctgataaaattgtgcagcacaagtgatcaaattcgtgcctcttgatcgacataagtggatgaaatgatgtatgtccgtgcagtgtttaagagtatgtaaattgaggcattatgtgcaccttttgtttgctaataggatgtttggcttgaaaaatggagtccatcctctcactcttcagtatgtttgtttggttcatgaatgaaataagctgatacatcaccatctt

SEQ ID NO: 145478 - DNA, 178 bp, Zea Mays
atttatgcaactaagtctacagtggcaacagagaagggttaaaaacacgagctttcactcgtttgatatatatggagaggactttaggtattgactaatgactagaaagacttctttctgtctgcatgaaaggcggcatacaacagcggaaaaagcaacccctagttatcaaatatac

SEQ ID NO: 145479 - DNA, 983 bp, Zea Mays
tttaagtcggttcactccttcgtcttgggacatgtcactataccgaagctttatgggtgatagcttcggcactgcttttgagaggatctgccgaaggtgtttcttcttacaggatcttcggcgacgaagcatacccccaacaggcctgaaggatgtgatgcaaaacgtcgatgcaggtctgggatgtccgcctcattatggatcaaaattcatgacgttctaaaggtgtcgaatgagtacctatatactccctccatcccagaaaacaaggcgcctcattacactattggaagctggacgacatggatgactctggcaagatgcggtgggagcacgacgacatggatgactccgaccacgagttcgataggaagcctagcaatagtacgcagtagcaaggttgaccataggggcagtggagagtaacccaacaccccctcctccgaccgtcataacgcttctttcctctggcttcatttcttacctatgtatggatggtcttcaccgctggttacatctagcaagtcctcccagggtgacatgaaggagattgtcatgctgccaaagcacatcaaggacaatgcaaacaaggacagaggaagatcgaacatgccatttccaggtggtgacatttctattctcgcgcgcccacccaacatttttgcttttactaaatgactatgtgcgtgaatgcttcgtggatgttgatagggattatctgtgcttgacaaaacggtatcccagacttgcaattactccagaattttctaaggttgggcattctgtacattgaacttttgttgctgatcgatattaaatgtggcttttggcattctctatcactctagctaggtccttggatgagccacactattgacatgggtttaggtgagtgactcatcgcggcgcctttatatggctcgatcaattccaaatttgctatagtatggttgtcgctagaatttcctcatttggcatgcaat

SEQ ID NO: 145480 - DNA, 1203 bp, Zea Mays
cagacagagacaggagacggcgcttggcttctgccttctccttccctcacgctctcggtctctccctctctctccccaaaacctaaaccctagagccgccagacgccactgtccgtggagcagagcaggctgcagcaccgccgcgccggtgtgcggcgtgccggcgtgtgccctccgtcgtctgcccgtctgcccgtctgttcttcgctgtctgctcaagacacggtgaacagtctgttcttcgccgtctgctcgtcttccccgacggcgccctagccctgttcggctgtccggcctccggcgcccacttgcccatcgccggtcggcggctcgcctccatggaagcccaagaaccggatgggcacgaaggtcattcacgtccgccaataccatgaatttctggatcaatgatcaagcgcacgagcacgaggaagaagcttgtgccagcagctaagaagatttcagcggctgctagcactgcaccttcatcatccacatcttgttgtggtgctgtctctgtatctatagaaagctccaaatctgagttgctcatttatctagatgaatcaaatgtgtccataaatgagaaacactttgatctgcttaactattagaaggtgaatagtcatagatttcctatggtatcttctatggcaaagaggttcttggatgttccagctagcagtgtgtcatcagaatccacttttagcactaggggtaggatccttgatgattacaggagttcattgaagccagcaacaattcaggctttggtgtgtgcttctagttggatacgcgggtctcgaagttcacctattcttttaactggagaaggtgatgatggtgacatcgagtccgtggaatttccaaagtgtgtggtggcaagtaattaggcacatggtcacatactcacatggaggagatggaggagagggagagataggacccgagagaggagacatgagaggcacatggtcaatatattttgttggctgtaattgtaagcctgtaattgttggttgcaaccgttgctaacctggcatattttgttggctccctacaactttgtcctgaactcctgaacctgaagtcctgatctataattgttggctacatcactgcgtgtattttggttctagaactgaaactctgaaagtatgaaattatggattatggaatggaactattatgaactataagtct

SEQ ID NO: 145481 - DNA, 2465 bp, Zea Mays
cttcccaatcaaaccgaggccgtcatccttatctgaatcgcgtgctttccagccctctgcccgctgtgccccacccccacgcccggcgacccgcaggccgcacccacccacccacccgcacccagcgccatgtccaccgcggccaccgcgtgcgccacgcgggcggcggcgcgtccgcccctcaacacggctccggcacgccgcgcgccgccttctgccgtgcgcccgccatcggccacccccgcccgccgcgccgccggctgttgcttctgcgccgccgcctcctcggcgtcgtcgccctccacctgggattggacccgatggagccgccacttcgacgaggtcgaccaggcggagagctacgcatccctcctccagttccagctagaggaggcggtggagaacgaggatttcgcggaggccgccaaactcaagagggacatcatagaggccaccggaaacgacgctgtagcccacgtcatggccgagctcaagaatgctatagaggaacagcggtaccaggacgcgtcaaggttgacaaggcttgctgggaccagcttggtaggttggtgggtgggatatgctaaggacactgatgattccatcgggagaattgtacgaataagccctggtgtcgggagatatgtggcgaagagctacaacccaaggcaattggtcactgcatcttcaggaactccattatttgaaattttccttgtcaaagaagatgatgagacatatacaatgaaggtggtacacatgcgaccaacaaaaggaacttcaggtgcaccatccatatcatcaacaataacagaaagcccagcaaaggtagagaatgaaaattcatcagaaagtagtgctatatctgacagtgttacagaggaggcaaatacagatactacggtaagaggaaatgaggatgctgaagagaaagcacaagatgttggtagcagcaaggatagtagtgtcgaaggattaaaaagtgttttgaatttttttaagtctcggattcctgaattcaaagttcaggtgataaatgttgatgtggctgaggaaactgaattagctgcaaattcgtctgaagaattagtgcaagatgatgtgaaaagtactccagaaagctcattggaagagccagccactgaggaactcgagcaggaggaagatgttccggaagaaaatacggatgaagaaagtaaaagcacggaagtgaagctttttattagtggagtggttcacaataaagaagatgctggagcaaaatcatatgttcgagttccagctgaaataaataacatggaaaaggactcctttgaactgtacattcctggagaaggttctgatcgtgatttggctgaaacaaaggctgcaaaacagaaagttgcagatatggctgctaaattagcctcagagcttatgccgtctgatgttgccaaggcattatggggtacagccaagagttcttcaaagataaataaagaagttcaggagcttttaaggcttacgttaagcaaggcccgagtcaagctgaccgaaaataccatttttaaacgaatcattatggacactaacagcacagatccatttaatggtctctatgtgggagcatttagtccatatggaccagaaattgtgcagcttcgtcggaagttcggccactggaacagtactgatgacgttgagtttttcgagtatgtcgaagcagtaaagttgactggtgatctgagtgttcctgctggccagataacgttccgtgctaagattgggaagggcaagcgacttgagaatcgaggagcatatccagaggaatttggtgtgattgccagttacaaaggtcagggtagaatagctcagcctggattcaaaaatcctcgatgggtggatggtgagctgttggtactcaatggcaagagtacaattccacaccttggaggcgcagagctcggtttcctgtatagtgtacctgagcagagttttctggttctcttcgatcggcttaatcttcccgagtgatgagactcctaaagggagcagactcctcacatgtagattgcatgaacgcgcagaggccggccacagctccaagtgaccgaaacaggtctggggggccgtttccccatcgtcttctgccctctgggcttcctgccaatcctttctccgcacctactttttaggagctcatgtgcttaactcgtttcagagtgtgagggaaagtcgacaccattgctggtctaaactaacggaggagtcttaatactaataatatatatgttatagcatggtagtttgctctccaatgccacagttgtagctgtattgggtatgggcatgacagttttgcgagttttacccgtcatcgttgatttcagtaattaccgaattgaataaaaatcgttctggtgtatcgtgatgttacaattataataatataaaacaaggcaaataaagtctcatgatttatgatc

SEQ ID NO: 145482 - DNA, 691 bp, Zea Mays
gtaatttcgtcctgccgatctgattgtttgaaagatgctaagatattgccagttacaaaggtcagggtagaatagctcagcctggattcaaaaatcctcgatgggtggatggtgagctgttggtactcaatggcaagagtacaattccacaccttggaggcgcagagctcggtttcctgtatagtgtacctgagcagagttttctggttctcttcgatcggcttaatcttcccgagtgatgagactcctaaagggagcagactcctcacatgtagattgcatgaacgcgcagaggccggccacagctccaagtgaccgaaacaggtctggggggccgtttccccatcgtcttctgccctctgggcttcctgccaatcctttctccgcacctactttttaggagctcatgtgcttaactcgtttcagagtgtgagggaaagtcgacaccattgctggtctaaactaacggaggagtcttaatactaataatatatatgttatagcatggtagtttgctctccaatgccacagttgtagctgtattgggtatgggcatgacagttttgcgagttttacccgtcatcgttgatttcagtaattaccgaattgaataaaaatcgttctggtgtatcgtgatgttacaattataataatataaaacaaggcaaataaagtctcatgatttatgatc

SEQ ID NO: 145483 - DNA, 621 bp, Zea Mays
gaccgcgcacaagggagatagagcttcttctccccgtcgagctcgagctcccggtggcgcgccgccgagcccctttcccacgctcgccctgtccgttcccccctccacgcctgcagggcgcttgcgtcggcactctctggtcctcgcgccgcctcctggagtcggtcatcgttcggctgccgcccagaagctctccaccgccggcgtcgtcgatgccctccacctcgggcgctcctcctgcaacagctgttatagaagaaagggagaaagaaggtagttttgagatggagtccttcttaattgatgatttccatggcattgatgatgagcctttagcaattgtagaagctcctattcgacatgatcagcaactagctgctattgattgggacacactacatatttttgatagtacagatgaagaaggaaggatagaaatagttgatgataaccaaatgtatgtgctattggggctaagagatgaggatgacgctgccgagaagggtagtgaaacttctgaacaggcagatagtgcacgtgctgctagtggcaatgtctcctttgtcgacaatgacactcttggtgcagccatccctgttaatgatgacataccaggggaaa

SEQ ID NO: 145484 - DNA, 2096 bp, Zea Mays
atccagtcgaaacccactcacttgatggcaaagtagcgaatcccacgtttcataatggctcggttccaaatttctcccttcccaagcatggcgtccctgccgcagcccccgcgatccccttctcaagcctggcgtccctgccccccgcgatcgcgcctgccaagcatggcgtcgtcgcggccgttgcccccgcgatccccttccatcgacctgccaagcatggcatcgccccggccgttgccacgcccgccgcacacgccgcgatgagatcctggaccccccgcgacatcctcctccaccgcgccatggccgcccccgacgtcctcgcgcgccgctccccgaggtgggcatggtgcgcacgaccatcgcgggggtcacgacggcggcgcggttccaggagctggtggactggatggaggagtggaaggcggcgttcagggacaacagcaagtggacggagacggtgaacctggggctcgggagcctcgcgctcatcatgtccgggctgcttccgttcgccatcgacggggacctcgggttcgggaagcccagcctcgtgctaccctgggtgcgccatggccggctgggatccgcgtccgtgatggtggtgccctgccccagcggcgacatgtcgtggttcttcggcggcaccaggatgtggctgcggctcatggaggtggtcgaatccgaccctttgatgaagcagacaacgaacctgggaatggcgacagaggcgggatcccgtctgtgactgtgagctcgcgctggcggtacctgccattacggtgtacgggtatcatcgccatcatcatccagatccaggacttctgagcacatggaagatgaaggagacgttgcaactcctttacactttccaaatttttattaaatataccaatatcacgaggtgaaccttcgagtttagtgatttttcatatccatggtttgcaggcaagtaaacttattacatataatccattgaacttcatgtcttggtttgtccaattcgacatcgaagggctcgccatgtggggtgacgtcgacggggcttcacctgtcctattctatcattattgtgattactgactatgccattgtttgtgctactgctgcttatgcttgcagtgccacaaaggcaagcgaacctttgatttggtccatgttctggtctaaccttgttgggtccacactccatgggtcactttcacattactactaccatatctgtgagacagtgcattcaagtaacggtacaatacaaagggtggcaaatgataatagcctgaagaatgatggcacaaaatgatctagagtattctttatcttacttagattttgtcaacattccatcatcatataatctcgaatattttcataaactggttgtgtaaaatggggggatctttctccatgaatctcaatggatctgttgtgcactgcatagctgcggagaagaaaaaggtatcaaatatcaagcagctttacggcagcgaaggatcattcactatgagtggatattaaactgttgcaaggaaaacatcttcattttcatcctaggaagttgaacgatcattctctttttgggcactgctgaaggtgatgttgttcacccaactgagtgtatgccccagctgcttgagcaagttcggcatcacaaagcgaatatcgattgcaatgattatattgtcatggtgactacattggttcttgaggttgaggatttgtctacacaacaagtgaatgataagctcctagaagctgtacaaccttaagcactcgagcaatggagcaatgtggtatgatgagagcataggaggtttgtcgagatgaggtcgaaacatggccccaatgtaactagaccagagcaattgacaatctaggcaatatccgctatctggtccattgtttctctcgtgggtccattgtttctgtcgtgggtcagacgtcttcgacgtgaagagaggttgttttgtcatttccacattctgaagcgtaatgtagtgcagtggacgcatatagctactacgtatgttaaagttgtattttttatatctcatattagatgtatttactattttacaagccttatgaaaata

SEQ ID NO: 145485 - DNA, 2083 bp, Zea Mays
atccagtcgaaacccactcacttgatggcaaagtagcgaatcccacgtttcataatggctcggttccaaatttctcccttcccaagcatggcgtccctgccgcagcccccgcgatccccttctcaagcctggcgtccctgccccccgcgatcgcgcctgccaagcatggcgtcgtcgcggccgttgcccccgcgatccccttccatcgacctgccaagcatggcatcgccccggccgttgccacgcccgccgcacacgccgcgatgagatcctggaccccccgcgacatcctcctccaccgcgccatggccgcccccgacgtcctcgcgcgccgctccccgaggtgggcatggtgcgcacgaccatcgcgggggtcacgacggcggcgcggttccaggagctggtggactggatggaggagtggaaggcggcgttcagggacaacagcaagtggacggagacggtgaacctggggctcgggagcctcgcgctcatcatgtccgggctgcttccgttcgccatcgacggggacctcgggttcgggaagcccagcctcgtgctaccctgggtgcgccatggccggctgggatccgcgtccgtgatggtggtgccctgccccagcggcgacatgtcgtggttcttcggcggcaccaggatgtggctgcggctcatggaggtggtcgaatccgaccctttgatgaagcagacaacgaacctgggaatggcgacagaggcgggatcccgtctgtgactgtgagctcgcgctggcggtacctgccattacggtgtacgggtatcatcgccatcatcatccagatccaggacatttccggatagatgacataatctgttcatctcaaatgccacaacattcgtgggcacatgttgccttgttggcttcatttagctcgcccgacatcatattttagcaactatctgtcatatataatctactaaaatggtttattttttcatttactcttatactctcatttttccaaccaggacttctgagcacatggaagatgaaggagacgttgcaactcctttacactttccaaatttttattaaatataccaatatcacgaggtgaaccttcgagtttagtgatttttcatatccatggtttgcaggcaagtaaacttattacatataatccattgaacttcatgtcttggtttgtccaattcgacatcgaagggctcgccatgtggggtgacgtcgacggggcttcacctgtcctattctatcattattgtgattactgactatgccattgtttgtgctactgctgcttatgcttgcagtgccacaaaggcaagcgaacctttgatttggtccatgttctggtctaaccttgttgggtccacactccatgggtcactttcacattactactaccatatctgtgagctgcggagaagaaaaaggtatcaaatatcaagcagctttacggcagcgaaggatcattcactatgagtggatattaaactgttgcaaggaaaacatcttcattttcatcctaggaagttgaacgatcattctctttttgggcactgctgaaggtgatgttgttcacccaactgagtgtatgccccagctgcttgagcaagttcggcatcacaaagcgaatatcgattgcaatgattatattgtcatggtgactacattggttcttgaggttgaggatttgtctacacaacaagtgaatgataagctcctagaagctgtacaaccttaagcactcgagcaatggagcaatgtggtatgatgagagcataggaggtttgtcgagatgaggtcgaaacatggccccaatgtaactagaccagagcaattgacaatctaggcaatatccgctatctggtccattgtttctctcgtgggtccattgtttctgtcgtgggtcagacgtcttcgacgtgaagagaggttgttttgtcatttccacattctgaagcgtaatgtagtgcagtggacgcatatagctactacgtatgttaaagttgtattttttatatctcatattagatgtatttactattttacaagccttatgaaaatagcaatatgagtggtact

SEQ ID NO: 145486 - DNA, 2790 bp, Zea Mays
atccagtcgaaacccactcacttgatggcaaagtagcgaatcccacgtttcataatggctcggttccaaatttctcccttcccaagcatggcgtccctgccgcagcccccgcgatccccttctcaagcctggcgtccctgccccccgcgatcgcgcctgccaagcatggcgtcgtcgcggccgttgcccccgcgatccccttccatcgacctgccaagcatggcatcgccccggccgttgccacgcccgccgcacacgccgcgatgagatcctggaccccccgcgacatcctcctccaccgcgccatggccgcccccgacgtcctcgcgcgccgctccccgaggtgggcatggtgcgcacgaccatcgcgggggtcacgacggcggcgcggttccaggagctggtggactggatggaggagtggaaggcggcgttcagggacaacagcaagtggacggagacggtgaacctggggctcgggagcctcgcgctcatcatgtccgggctgcttccgttcgccatcgacggggacctcgggttcgggaagcccagcctcgtgctaccctgggtgcgccatggccggctgggatccgcgtccgtgatggtggtgccctgccccagcggcgacatgtcgtggttcttcggcggcaccaggatgtggctgcggctcatggaggtggtcgaatccgaccctttgatgaagcagacaacgaacctgggaatggcgacagaggcgggatcccgtctgtgactgtgagctcgcgctggcggtacctgccattacggtgtacgggtatcatcgccatcatcatccagatccaggacatttccggatagatgacataatctgttcatctcaaatgccacaacattcgtgggcacatgttgccttgttggcttcatttagctcgcccgacatcatattttagcaactatctgtcatatataatctactaaaatggtttattttttcatttactcttatactctcatttttccaaccaggacttctgagcacatggaagatgaaggagacgttgcaactcctttacactttccaaatttttattaaatataccaatatcacgaggtgaaccttcgagtttagtgatttttcatatccatggtttgcaggcaagtaaacttattacatataatccattgaacttcatgtcttggtttgtccaattcgacatcgaagggctcgccatgtggggtgacgtcgacggggcttcacctgtcctattctatcattattgtgattactgactatgccattgtttgtgctactgctgcttatgcttgcagtgccacaaaggcaagcgaacctttgatttggtccatgttctggtctaaccttgttgggtccacactccatgggtcactttcacattactactaccatatctgtgaggtaaccattgttacatgacctactcatatatcttttgcttgtacattcaagtaaagattgtctatttcaaccacaccaaaagtaaagaaaattattaagttggtgaattgacaaaagaaatgaagcaagtttttaggtgttgaagtataagtgattcgcccaacttttcccatcagcttgacttttagtttgggggtaaactaacctacacatagcaggcatcagatatagcatattacaataagctaggtatgtgtttgtattcttagttcttttagtatattacataagctacatccctcgtgatgccttaatctaggttatatctcaatgatgatttctttataacatgctgatcataaagcatttgtagacagtgcattcaagtaacggtacaatacaaagggtggcaaatgataatagcctgaagaatgatggcacaaaatgatctagagtattctttatcttacttagattttgtcaacattccatcatcatataatctcgaatattttcataaactggttgtgtaaaatggggggatctttctccatgaatctcaatggatctgttgtgcactgcatagctgcggagaagaaaaaggtatcaaatatcaagcagctttacggcagcgaaggatcattcactatgagtggatattaaactgttgcaaggaaaacatcttcattttcatcctaggaagttgaacgatcattctctttttgggcactgctgaaggtgatgttgttcacccaactgagtgtatgccccagctgcttgagcaagttcggcatcacaaagcgaatatcgattgcaatgattatattgtcatggtgactacattggttcttgagatgtccatgctgatggcttgtgaaatcaggctcttggcctaagattgacttagatgacccttcaaagaggatgaaataactgaataacaaatctaagcttctgattgttgaggatttgtctacacaacaagtgaatgataagctcctagaagctgtacaaccttaagcactcgagcaatggagcaatgtggtatgatgagagcataggaggtttgtcgagatgaggtcgaaacatggccccaatgtaactagaccagagcaattgacaatctaggcaatatccgctatctggtccattgtttctctcgtgggtccattgtttctgtcgtgggtcagacgtcttcgacgtgaagagaggttgttttgtcatttccacattctgaagcgtaatgtagtgcagtggacgcatatagctactacgtatgttaaagttgtattttttatatctcatattagatgtatttactattttacaagccttatgaaaatagcaatatgagtggtactaaattattgatatgt

SEQ ID NO: 145487 - DNA, 942 bp, Zea Mays
tttttcatttactcttatactctcatttttccaaccaggacttctgagcacatggaagatgaaggagacgttgcaactcctttacactttccaaatttttattaaatataccaatatcacgaggtgaaccttcgagtttagtgatttttcatatccatggtttgcagtgccacaaaggcaagcgaacctttgatttggtccatgttctggtctaaccttgttgggtccacactccatgggtcactttcacattactactaccatatctgtgagctgcggagaagaaaaaggtatcaaatatcaagcagctttacggcagcgaaggatcattcactatgagtggatattaaactgttgcaaggaaaacatcttcattttcatcctaggaagttgaacgatcattctctttttgggcactgctgaaggtgatgttgttcacccaactgagtgtatgccccagctgcttgagcaagttcggcatcacaaagcgaatatcgattgcaatgattatattgtcatggtgactacattggttcttgaggttgaggatttgtctacacaacaagtgaatgataagctcctagaagctgtacaaccttaagcactcgagcaatggagcaatgtggtatgatgagagcataggaggtttgtcgagatgaggtcgaaacatggccccaatgtaactagaccagagcaattgacaatctaggcaatatccgctatctggtccattgtttctctcgtgggtccattgtttctgtcgtgggtcagacgtcttcgacgtgaagagaggttgttttgtcatttccacattctgaagcgtaatgtagtgcagtggacgcatatagctactacgtatgttaaagttgtattttttatatctcatattagatgtatttactattttacaagccttatgaaaatagcaatatgagtggtact

SEQ ID NO: 145488 - DNA, 727 bp, Zea Mays
taggagttcctttttctttgataatggtatattgaacacataatttgaagtatatgtgcctgttaatttttctaggtatcaaatatcaagcagctttacggcagcgaaggatcattcactatgagtggatattaaactgttgcaaggaaaacatcttcattttcatcctaggaagttgaacgatcattctctttttgggcactgctgaaggtgatgttgttcacccaactgagtgtatgccccagctgcttgagcaagttcggcatcacaaagcgaatatcgattgcaatgattatattgtcatggtgactacattggttcttgaggttgaggatttgtctacacaacaagtgaatgataagctcctagaagctgtacaaccttaagcactcgagcaatggagcaatgtggtatgatgagagcataggaggtttgtcgagatgaggtcgaaacatggccccaatgtaactagaccagagcaattgacaatctaggcaatatccgctatctggtccattgtttctctcgtgggtccattgtttctgtcgtgggtcagacgtcttcgacgtgaagagaggttgttttgtcatttccacattctgaagcgtaatgtagtgcagtggacgcatatagctactacgtatgttaaagttgtattttttatatctcatattagatgtatttactattttacaagccttatgaaaatagcaatatgagtggtact

SEQ ID NO: 145489 - DNA, 1570 bp, Zea Mays
gcgccatctcgctccgtccatccctgtcgccaccaatccatcgcttccgcttcggcctcaacgacggccgccaccaccgctcccatccctctcctcctcctcgcccagcggccattaccacagcctcccccatcaagccgggatggctgcacagcctgcactcaaggcgtcgttcagaggggagctcaacgccgtctccttcctcgactccagcaggggacctttcggccaacacaaagtggattttacgtttcaaaggaagggcaaacgagctatttcactgagaaggacatgttgttccatgcaacaggctccaccaccggcatggcctgggcgagctgttgctgagcctggccggaggtcattggatggcccaaagcctatatcgattgttggatccactggttccataggaacacagacattggacattgttgcggagaatcctgataagttcagagttgttgctctttctgctggatccaatgtcacgcttctagctgatcaggtcaaaacattcaagcctaagttggttgctgtaagaaacgaaacattagttgatgaactaaaagaagctttagctgattgcgaagagaagccagaaattattcctggggagcaaggtgtcatagaagtcgctcgacacccggatgcaattacagttgtcacagggatagtagggtgtgcagggctgaagcctacagttgctgcaattgaagctggtaaagacatagcattggcaaacaaagaaacgcttattgcaggtggtcctttcgtgcttccccttgcacacaaacataaagtgaaaattcttcctgctgattctgagcactctgcaatatttcagtgcatccaaggcttgtccgaaggagcacttcgtcgcattattctaactgcatcaggtggtgctttcagggactggccagttgacaggctgaaagatgtaaaagtagctgacgctttaaagcatccaaactggaatatgggaaagaagatcacagtagattctgctactttattcaacaagggtttagaagttattgaggcacattatttatttggtgctgaatatgatgacattgagattgtgattcacccacaatctatcatacactctatggttgaaacccaggattcatctgtcctagctcaattgggatggccggatatgcggataccaatcttatacaccttatcgtggccagatagaatctattgctcggaggtcacgtggccccgtctaaatctttgcaagttgggttcgctgacgttcaaagctcctgacaatgtaaaatacccgtcaatggacctagcgtacgcagctgggcgggctgggggcaccatgacaggagttctaagcgctgccaacgagaaggccgtggagctgttcatcgatgaaaagattagctacctggacatattcaaggtggtggagctcacgtgtgacgcgcatcggaacgagctggtagcaagcccatcgctggaggagatcatccattatgatctgtgggcgaggagacacgcagccagcctacaaccagcttctggcctgagcccggtccctgcatag

SEQ ID NO: 145490 - DNA, 285 bp, Zea Mays
atggctcaacagatggaggaaacggagaagaacgtctcacgccttcgattggagttactagcaaaggagttggaaggcatcgcctcgccttacgccttatcgcttaaaagaggtctgaggacagaattgcagtctcaggtcatgactcacatgccaaagaccgtggacaaagccatgaaactggttaagatgtaccaggagatagctgagaagaacaggatgaagcatcaaaaaggaatagtagggaacaaaactcaggtggtggaagaggtgacaatagaatag

SEQ ID NO: 145491 - DNA, 591 bp, Zea Mays
atgatggtcctcgccttagttgccaccacctcgttcgtcattctacttcttttctctctcccctcatgcctccacctccgcgccaccccgttctcggcagaggacgtaggagcatgcgcctccttctcgtatccgttccataccagccacgacaccgactcacgcagtggctattgcacgtccacgaggacatttcacatcatgcgtgcaccatcgttttcgtcgtcgtcggacgtcccgtccgtctttccggccttcgccaggttcttcctccccaacctgctgcccccgcccacggtcgcaaacgcgagccgaccgacgctcgtcgacgtgggtacagggcgagttggtcatgctcctggcttttctctatgcatgccgtcgaggacatggtggcacctgccacgcttaggttatcttggcaatgatgaattcaggtctgagatattggacaagcaagagcccgtggcgtggcagcagtcggcatatgctacggagttgttggtggtgttgcgtcgcttcggcgggtccagggctgggaagacactcgcattctctcgcccttctcggattgacgcctggtgcgtgtga

SEQ ID NO: 145492 - DNA, 1913 bp, Zea Mays
cgcgacgtggcgtctggcgtggtcgagcctctagagaagcgagccgtgcccgtctctcccaatccactccgtactcggcgctcctcccccgtcgccgccggaaatcaggaagcccaagtgctctcttgggtgcgctcgtcgccggtggcagtgagccagtgatgcatcttcatctccggcttccttattaggatcagcccgtcgatcgatcatggcgtcgtcgagctcggctgctactactagtggtgacagtcagggtctcaaggctcgagatgcctgcatcgtcggcgtcgcccgcacgcccatcggcgcacttctcgggtcgctgtcgtccctccccgccaccaagctcggctccatcgccatccagggtgctctcaagagggcgaaggtcgacccggcgctcgtgcaggaggttttcatgggcaacgtcctcagcgccaaccttggccaggctccggcaaggcaggcagcccttggcgccggcttgcccaactccgtgccatgtaccaccgtcaacaaagtttgttcctcgggaatgaaggctgtcatgtttgcggctcaaagtattcagctggggatcaacgatgttgtggtcgccggtggcatggaaagcatgtcgaatgccccaaaatatgtggctgaagcaagacgaggatcacggttcggacatgatgtccttgttgatgggatgctcaaggatggcctgtgggatgtctataacgatttcccgatgggaatgtgtgctgaattgtgttcagaccagcactcaatctcaagggaggagcaggattcgtatgctatcctcagcaatgaacgtggcatagcagctcaggacagcggtgcattttcttgggagattgttcctgttgaaatttcttctggtagagggaaaccaccagttgttgttgacaaggatgagagtcttgcaaagtttgatccagtaaagctgaagaaacttgggccaacttttaagacgaatggttctgtaacggctggcaattcttctagtataagtgatggcgctgctgcaattgtccttgtcagtggagagaaagccaagaatcttggccttgaagttattgcaaggattacagggtatgctgatgctgcacaggcacctgagctgtttacgacagctccagcccttgccattccaaaggctatatcaaatgcagctcttcaaacttcacagatagattattatgaagtaaatgaggctttctctgttgttgctatagctaatcagaggcttcttggtatcccttccggaaagctaaacttaagtggtggtgctgtttccctgggccatcctatcggttgcagtggtgcacggataattgtcactttgcttgggattcttagacagaaaaatggaaaatttggtgttgctggagtttgcaatggcggcggcggcgcttcagccctcgttttggagctcatgcaaccctcttcgcatatccattcatcattgtgaagttggtgcgagcaaattagcaagacaaaatttgtaaaatgtgctgtatctgtcgtgctgctcagcacagggcattatcttgtactcccttatatgggaaaatatagacgtatatatacccatggaaataacagaggcccggaagaataatgtacagacactgatacagccactgaaagaagacatgggtagtgaacaatctgcgtggacgtgattttgccttgccattttatgttggggcaattgtgagtgcagttgtaagaatctttatgaggaagattcttcaataggcaacaccgaattgaattggtgtaacgtgtgccccaacatgaaatgtaatcatcaggtatggacgtattacagtacaacacactcctgtgcaacagcttctatgttaggtaacaaagctacttatccaatggtagattccgatgac

SEQ ID NO: 145493 - DNA, 2018 bp, Zea Mays
cgcgacgtggcgtctggcgtggtcgagcctctagagaagcgagccgtgcccgtctctcccaatccactccgtactcggcgctcctcccccgtcgccgccggaaatcaggaagcccaagtggtagcgaacacactccgacactcgccacccccctctcgcccccttcgcccgcagctgccgtcgcatgaaattgacgaactctgcttcctcttctcgatctcgcagctctcttgggtgcgctcgtcgccggtggcagtgagccagtgatgcatcttcatctccggcttccttattaggatcagcccgtcgatcgatcatggcgtcgtcgagctcggctgctactactagtggtgacagtcagggtctcaaggctcgagatgcctgcatcgtcggcgtcgcccgcacgcccatcggcgcacttctcgggtcgctgtcgtccctccccgccaccaagctcggctccatcgccatccagggtgctctcaagagggcgaaggtcgacccggcgctcgtgcaggaggttttcatgggcaacgtcctcagcgccaaccttggccaggctccggcaaggcaggcagcccttggcgccggcttgcccaactccgtgccatgtaccaccgtcaacaaagtttgttcctcgggaatgaaggctgtcatgtttgcggctcaaagtattcagctggggatcaacgatgttgtggtcgccggtggcatggaaagcatgtcgaatgccccaaaatatgtggctgaagcaagacgaggatcacggttcggacatgatgtccttgttgatgggatgctcaaggatggcctgtgggatgtctataacgatttcccgatgggaatgtgtgctgaattgtgttcagaccagcactcaatctcaagggaggagcaggattcgtatgctatcctcagcaatgaacgtggcatagcagctcaggacagcggtgcattttcttgggagattgttcctgttgaaatttcttctggtagagggaaaccaccagttgttgttgacaaggatgagagtcttgcaaagtttgatccagtaaagctgaagaaacttgggccaacttttaagacgaatggttctgtaacggctggcaattcttctagtataagtgatggcgctgctgcaattgtccttgtcagtggagagaaagccaagaatcttggccttgaagttattgcaaggattacagggtatgctgatgctgcacaggcacctgagctgtttacgacagctccagcccttgccattccaaaggctatatcaaatgcagctcttcaaacttcacagatagattattatgaagtaaatgaggctttctctgttgttgctatagctaatcagaggcttcttggtatcccttccggaaagctaaacttaagtggtggtgctgtttccctgggccatcctatcggttgcagtggtgcacggataattgtcactttgcttgggattcttagacagaaaaatggaaaatttggtgttgctggagtttgcaatggcggcggcggcgcttcagccctcgttttggagctcatgcaaccctcttcgcatatccattcatcattgtgaagttggtgcgagcaaattagcaagacaaaatttgtaaaatgtgctgtatctgtcgtgctgctcagcacagggcattatcttgtactcccttatatgggaaaatatagacgtatatatacccatggaaataacagaggcccggaagaataatgtacagacactgatacagccactgaaagaagacatgggtagtgaacaatctgcgtggacgtgattttgccttgccattttatgttggggcaattgtgagtgcagttgtaagaatctttatgaggaagattcttcaataggcaacaccgaattgaattggtgtaacgtgtgccccaacatgaaatgtaatcatcaggtatggacgtattacagtacaacacactcctgtgcaacagcttctatgttaggtaacaaagctacttatccaatggtagattccgatgac

SEQ ID NO: 145494 - DNA, 1191 bp, Zea Mays
atggcaacgactaccccaatgcctgcctttgcaccagaagacagtccaccactgtctactgaggagctgctgctctgcgaggctggactcgacgacttgttggaaccttggcccccggttgttaccgggctaactgagtcacctggcgttgctggggctggcaccgatggagtgccatcagagcctggtgtagacggtgtcgtccctggagacgaggggctagagggagtggggatcgaaggatctgcggacgtcggtgagggactggttggggaaggttcgacaggaattccagaaggtggtggtgccaggggtggaggtggctgtgctactgtcggcggcgttgggtccgccggcgggttgggcgctggcagattggatgggggtggcgacgcggccgcaggggggcgtataggcgacgcctttggcggggcagcaggtgtaggcggtgggggtactgcagcaggcgacgagggtggaggcactacggctgctggggcgggtggcggagtggcaacgacaaccggcggtggtggcacggcgtccggagggggcggaggcaaggagggcggtggagaagggagctgtggcggtggcgtggacgcgggaggcgggaggggaggaggcgcggccggcgatgagggagggtcggccggggtagcattgggctgcgtcaccggggccggggaatccggcttgggcgtggtggttgccggcgacggggttgcggtggaaggcggcgaggtggctctgatggtgatcggggaaggcgaaggtgaggacgccattggagcccaggccagcagcaggctgctagagagcactacactgcgggctgtcactttcacagctgagctgctgccttggtggtggaattggaggagagaaccatggcccacgccgcaattcaagggagactcgagcctgaatcccgcggattcacgcagcaaccaaccaatcgaaattccgcctcttcccttccttctcccccttgggtctttggcggtgaggaagaacgtggacgaggtgaaatctcacctcgagtaccgcacgagaagttcaaattggcacgcacagcacttgttccacgccgccgcacgcggatgctgctgcgaagcagaggcagcaaaggaagacgcaattccaaaagaacaagagaatcttggggaggccgggaccaagattagctga

SEQ ID NO: 145495 - DNA, 1134 bp, Zea Mays
acaactattaagacccaaatgtagactgcccccgcctgcgaacgaatcccacccgccgctctgcctcccccgcggcgaatcccgcccgcgcctcccccgccatagaacccgcctccaaccgcgaatcgcccgccgtgccttcacccgccgctcctccatctcctcctcctcgtcgtcgctgccgccgcgctgcggggggcgccgttggcggacgccggcgcggacacctgcaaggcgtggttggtgcagtccatccccacggacatgccgcacctgagccgcatccccggggtcctatccacgggagatgtgctccagtggctctcggggaatgcaacgaagagtctggacatccttgcgcagtactggcagttcttgccccagccgaacaatccgaaatcgggggactacgggttctccaagagtgacatgaggagattcggggccgacgagggccgccgggtttacaaggcactggaaaatgctgcagaccgtaagatcaaaatcaggattgtccagcactctggatttgctcctgattttgaccaagagagcgcagatctggctgcaggaagaccaaatgttgagaacgcaaccgttcttttcgaggactggtggggatctggtgttgtgcacgcaaaggtctggatatcagataagaaggatgtgtatataggttccgcaaacaacgactggaaatcccttactcaggtcaaggagcttgggatttattttgctggttgcccacatatagcaaaaactgtggaggtctattttcaaaacctgtggacgctttcaaccctcaactcaactttttacaccaaacaagcctgggatacgcagtggcaagtttctagaaaggttccatgctggtctcatttcctacagcccaaagaaagatgcaggtttgcatctccctctgcaggtcacagcgatctactacttagtgcacaaatttgaaggggaaaaatggctggtacatagatggcaataaattatgtacaatctaagcacacaaatttgaaggaaaaaatggctggtacatagatgggaaataaattatgtacaatctatccattaacctatattgtctgcatttatcttagtgctgaatctgatccatcttcgattctg

SEQ ID NO: 145496 - DNA, 2659 bp, Zea Mays
agagagcagcaaggagagcgagcgcaccaacggggatctgagcatccgaccggccgcttgctagggtttcgtccgtccgcctccctgccacagcaccactccgcatctccagccctagcctcgctcagcccgggatcccgcgggggccatggcggctgaagcgccaccgtcggcgtcggcgtcggcgtcctcctcctcggctccgcggccgcctaccgcggccgcctccgcccccggcggcggcggcggcggggcgcccgcgtccgcggagtcgtacctcgggagcctcatcagcctgacatcgaagagcgagatcaggtacgagggcgtcctctacgacatcaacaccgaggagtccagcatcggcctgcgcaatgtgcggtcctttggaaccgaaggtcggaagaaagacggagtgcagattcctgctagcgacaaagtttacgagtatatcctcttccggggaactgatatcaaggatttgcaagttaagtcatcaccaccacagccgccaccaccacaagcagcttccctgcacaatgatcctgccataatacagtcacattattctcaacctgcatcaacgtcatcaagtttgccttcagctgggggtgcagttttaccagactttagctcccaggcagttcaatatgggcttcagaggccaacctttcagagtaaccttcctctctaccaaccagggaatactccgtggggctcttcagtggcacctccagcaggaaatgctccatggggctcttcagtggcgcctccagcaggaaatgcttcaacactttcagttccctcaatgtactggcaagggtactatgcaccttcaagtgggctgccgcatcatttgcagccacctcctttgcttcatccaacaccaggattgtcggttccccagaatctccaatatccaggactaaatccttctttgcaatctgggccgcaaaagctgtcagaactccaaccctcattgatgccacctattactagtcaaggtccttcatcaggtatcctgcctgctacaacagctcctgcttctgctacattattagctccagaaagctcaaagcctctgttgccgaacatgggatcgttgtttgctccacgtgcaacatctcttggtgcaacttttcctttaccaagccagccaactgccgtcgctgaaactagtgcaacagtgtcacagaacttaacttcatttggtagcagcaaggttcctgctcttccaggctcaacactggcataccaaaccgtatctcagtctgtttcttctactattgccccatctagctcagcccaagcggagatgcctgtgcctttgctggcaccatcaggtcaactattgcagaacacatcatccatcctttcatcatcgcattccatgcaggcaccattacagctggctagcaaagaagtcaagccaattgagcctaaggctaaggttgcagaaccgttactacctgaccctttgctaccagatccaccatcacgggctatgcctgaaattaaggagcctatattaccattgccgaaacagacgcctcagaagtacaatggatctggttcacgcaaccaccacaactttaggggccgtggaaggggtagagggagtgcgttttcacagtctgtaacagcattcactgaagaatttgatttcacggccatgaatgagaagtttaacaaagatgaagtatggggccatcttggtaagaaatcccagtcaagggacaaggatggtgaggtgggagatgatgtgtttgatgaagaactggaggctgaggaaactgacaacccagagctagctgttaagcctgtttatgtcaaggacgacttctttgattccctctctagtggaacgtttggacgtggagggccaaatggaaggggaagaccttctgaacggcgcagagtagacacagagacgtttggcgaatttccgaggcacaggcagccctaccgtggtggcggccgaggctaccgtggcggtgggcgttcccgtggttcatattacggtggcagaggctatggaaacacggggaggggtggccctgggaattcttatcctcactggggcaatgggagagattgattatagcagcagcagccatacttgcgggtgttgtagtcttttgccacatgcatgaagcgcatccattactattaaacaaataaatggaaccttaccaccatgtcactcgtcggtgtgccttgtccagacaaggcctgtagcgtttggtcattgatgtggtgcacccctgccctgtaggagagttaccagtagatgagcagatgagatgatgcttgataggtataagcttgtggcccttgatgtgcataccttgcacttgagatttagttgtataggccggtctcaatgcaggcatgcaacgtcggctctagctcagtaaccttttcctttcacaaagtttagccgtgttgtctgttttgtattggtgatagtgtaactttgaaaaatttactgcttattgtacgttgtttgggttgaggatgagtgggatggaatggctctattctagtcttttaggatgggattcgagtctggtgtttggttggaggggaggacttgtcccagtttctgtatttgaatggagggacgatgagaaggaatttatgttgtttgtgactggtt

SEQ ID NO: 145497 - DNA, 777 bp, Zea Mays
gctcttttatcattgtttcatacatattggtggttttttctttgcaaggaaacttgacttgcctttgatcataatgcagcctgtttatgtcaaggacgacttctttgattccctctctagtggaacgtttggacgtggagggccaaatggaaggggaagaccttctgaacggcgcagagtagacacagagacgtttggcgaatttccgaggcacaggcagccctaccgtggtggcggccgaggctaccgtggcggtgggcgttcccgtggttcatattacggtggcagaggctatggaaacacggggaggggtggccctgggaattcttatcctcactggggcaatgggagagattgattatagcagcagcagccatacttgcgggtgttgtagtcttttgccacatgcatgaagcgcatccattactattaaacaaataaatggaaccttaccaccatgtcactcgtcggtgtgccttgtccagacaaggcctgtagcgtttggtcattgatgtggtgcacccctgccctgtaggagagttaccagtagatgagcagatgagatgatgcttgataggtataagcttgtggcccttgatgtgcataccttgcacttgagatttagttgtataggccggtctcaatgcaggcatgcaacgtcggctctagctcagtaaccttttcctttcacaaagtttagccgtgttgtctgttttgtattggtgatagtgtaactttgaaaaatttactgcttattgtacgttgtttgggttgagg

SEQ ID NO: 145498 - DNA, 2592 bp, Zea Mays
ccctagctcgctggctggatcggcgccgtcgccggctcgtccccacttcgtttccccttctcctcgtcggctccccgtcctgtcgtctcccatctagagcggcggctcggctcccgcgccgcatccccctcgccggcgcccctgccccctcccagtccgcgggatcggctcggtccccgcgcttcccgatcattctcctcagaagcggactccaccaggcatggggaactcgactctcaccgacatgacgctgctgccgggcgtcgagccgatcgtggctggcctggccgccggcccctcctccccgggccaggagggcaaggcaaagaagaagcccatgaagtccctctacctcaggttcttcgaaaccgcgctcgacggcaagtcccgcatctgcaggctttgcaggaagagctactgcatgaccaccgccacggggaatttgggaaagcatcttaataaccgccaccctggttatcaccaacttcctgagggcgtcagcttcactaaccagagtaccatagaggctaccatgcttaatagaagcaggaaacctcatgttcctgtgcgagctcgggcccaagctcagcctcaagttcaatctcaatctcaagttcaagatcaagctcaacctaaactacggtctcaacctaaaacgaaagcaactgttgatattgaccatgtcaactggttacttcttaggtggcttatcagtgcctcccttccaccttctactctcgaagataatatgcttattgatagctgcaagtacctgagctcgtctgtcaggctctggccaaaagaaaaggttcaagaagttatcattgaagtcttcagaagtatgaaggaggacgtcaaggaaactctgcaatgtatcacttcccggctctctgttactctggacttttggacttcgtacgagaaaatagtatacatgtccgtcaaatgccattggattgatgaaaactgggtctcacagaatgttctacttgatgtgtgtagaatcccatacccatccactggttctgaggtttttcaagttctaatggatgtcttggtgatgtataacatcgattcaagaatccttgcttgcacacacaataacagccaacactcaatacatgcttgtcatgagctcgcacggcagcttaagacccgtaacctcccattctgttacattccttgtgctgctagaacactgaagaccatcattgaagcaggactggaaaatgtgaaaccaattttgtccaagatccgcgagtttattcttcacatccattcaaaccaggagatgatggaggattttaagcactggactgaagtttatcaagaaggttcatggaaactcccctttgaccattcagcaaattggaacagtgattataatatgcttgatgtggtaaagaaggctcctaacgcaatagagaacaccatcaagaaggttgaagagatcttcgtaccaagggattgggttctgactactgcagagaagtcagtgatcgatgtgttgcactcataccttgaaccattcttcaaaactactacaaacctttgtaattgcaagctaccaactcttgggctcgtcttcttcttcatggaccatgtcttcgagttgatcaatctgtgtcatggcagcagccaccaagaatggctcaagaacattgccggtgacatgtccaagacaactcaaaagttcacatctgaagcttacaacatcttcaccttcacagccgcaattcttgatccaaggatcaagggagagctcatccctgaaactctgaactccacgagcaacttggacgatgtaagaaaccattttgtccgggactacagcagcaccttccaagctgttggaaatggtcatggcgctcaggacaccacagaggatgctggtgcgttcgcctttgctgaagagattattcgcaaaaggcgccgggtgagcatgaccactgctgatgatgagctctcgcagtatctcgcagagccccccgcaccgatttccactgatgcccttgagtggtggagggggcattcctcccgctatccacgtctctccctgatggcccgagactttttggcaattcaggggacctcattggatcctgaagaactgttcacaagtaaaggggacaacatccacaagcagcagtactgcctccctcttagtagcatgcaggctatagtatgcataaagtcatggatgcaaagtgggtaccagttcaattttcagtcgactatcatagattttgagagattggtcgaatcagctactgctcctgatgatatcgatagttctggccttcacagctaaatgcatattcagcaaatcaaggatcccagaatagttctttggtttctgttttttcttcttttttctaggtgctcatgtaaatagtccttagaacttgtgaatgcgacttctattgctgtcccctgcaaaatcccagggtcagaactgcagcgagcagcttgtccttgcataactatgacacttcagaatcatgtactcattgtggtagtgaccaatcttgtagccgcaacttatttctgcttcttgaagaggccatgccgtcataccaaaaggaaactttg

SEQ ID NO: 145499 - DNA, 1335 bp, Zea Mays
cccgtcctgtcgtctcccatctagagcggcggctcggctcccgcgccgcatccccctcgccggcgcccctgccccctcccagtccgcgggatcggctcggtccccgcgcttcccgatcattctcctcagaagcggactccaccaggcatggggaactcgactctcaccgacatgacgctgctgccgggcgtcgagccgatcgtggctggcctggccgccggcccctcctccccgggccaggagggcaaggcaaagaagaagcccatgaagtccctctacctcaggttcttcgaaaccgcgctcgacggcaagtcccgcatctgcaggctttgcaggaagagctactgcatgaccaccgccacggccaccaagaatggctcaagaacattgccggtgacatgtccaagacaactcaaaagttcacatctgaagcttacaacatcttcaccttcacagccgcaattcttgatccaaggatcaagggagagctcatccctgaaactctgaactccacgagcaacttggacgatgtaagaaaccattttgtccgggactacagcagcaccttccaagctgttggaaatggtcatggcgctcaggacaccacagaggatgctggtgcgttcgcctttgctgaagagattattcgcaaaaggcgccgggtgagcatgaccactgctgatgatgagctctcgcagtatctcgcagagccccccgcaccgatttccactgatgcccttgagtggtggagggggcattcctcccgctatccacgtctctccctgatggcccgagactttttggcaattcaggggacctcattggatcctgaagaactgttcacaagtaaaggggacaacatccacaagcagcagtactgcctccctcttagtagcatgcaggctatagtatgcataaagtcatggatgcaaagtgggtaccagttcaattttcagtcgactatcatagattttgagagattggtcgaatcagctactgctcctgatgatatcgatagttctggccttcacagctaaatgcatattcagcaaatcaaggatcccagaatagttctttggtttctgttttttcttcttttttctaggtgctcatgtaaatagtccttagaacttgtgaatgcgacttctattgctgtcccctgcaaaatcccagggtcagaactgcagcgagcagcttgtccttgcataactatgacacttcagaatcatgtactcattgtggtagtgaccaatcttgtagccgcaacttatttctgcttcttgaagaggccatgccgtcataccaaaaggaaactttgcttagtcttgacatttt

SEQ ID NO: 145500 - DNA, 870 bp, Zea Mays
tagctagcaaaataaacagaagcaagcaagctagctagagctaaggatcgagatcgagatcgaccgaccgacgacgatcagctagcatggcgcgcttcgtggatccgctggtggtggggcgggtgatcggcgaggtggtggacctgttcgtgccttccatctccatgaccgtcgcctatgatggccccaaggacatcagcaacggctgcctcctcaagccgtccgccaccgccgcgccgccgctcgtccgcatctccggccgccgcaacgacctctacacgctgatcatgacggaccccgatgcgcctagccccagcaacccgaccatgagggagtacctccactggatagtgattaacataccaggaggaacagatgctactaaaggtgaggaggtggtggagtacatgggcccgcggccgccggtgggtatccaccgctacgtgctggtgctgttcgagcagaagacgcgcgtgcacgcggaggcccccggcgaccgcgccaacttcaagacgcgcgcgttcgcggcggcgcacgagctcggcctccccactgccgtcgtctacttcaacgcgcagaaggagcccgccagccgccgccgctagctagcagctcctctctgaggcatgccagatgcatgcgtgtgcgtgcaggtgcaaccaccgcactgccggcggctacgtatgaccggtgaataaaaagttttactgcaccgtaagcatgctcgccctgttgctattggtatatgttagcagtgtggcagtctgtatgtagtagctattcgcttgcatctatgcactctatgttagtatgcgtacgtgtggttccggaacttttggagtcttatctaaatactaggtaggtgcccgt

SEQ ID NO: 145501 - DNA, 924 bp, Zea Mays
tagctagcaaaataaacagaagcaagcaagctagctagagctaaggatcgagatcgagatcgaccgaccgacgacgatcagctagcatggcgcgcttcgtggatccgctggtggtggggcgggtgatcggcgaggtggtggacctgttcgtgccttccatctccatgaccgtcgcctatgatggccccaaggacatcagcaacggctgcctcctcaagccgtccgccaccgccgcgccgccgctcgtccgcatctccggccgccgcaacgacctctacacgctgatcatgacggaccccgatgcgcctagccccagcaacccgaccatgagggagtacctccactggatagtgattaacataccaggaggaacagatgctactaaagcgcacgccaagcgtcgacacaggagcgcgctgacacgagctggtgtgggtgcaggtgaggaggtggtggagtacatgggcccgcggccgccggtgggtatccaccgctacgtgctggtgctgttcgagcagaagacgcgcgtgcacgcggaggcccccggcgaccgcgccaacttcaagacgcgcgcgttcgcggcggcgcacgagctcggcctccccactgccgtcgtctacttcaacgcgcagaaggagcccgccagccgccgccgctagctagcagctcctctctgaggcatgccagatgcatgcgtgtgcgtgcaggtgcaaccaccgcactgccggcggctacgtatgaccggtgaataaaaagttttactgcaccgtaagcatgctcgccctgttgctattggtatatgttagcagtgtggcagtctgtatgtagtagctattcgcttgcatctatgcactctatgttagtatgcgtacgtgtggttccggaacttttggagtcttatctaaatactaggtaggtgcccgt

SEQ ID NO: 145502 - DNA, 1251 bp, Zea Mays
aagcgatcagggggttgccatggaagtgaactcgtcagctttgtattgtacgtacgtacgtccattaaatggagattagagaggacggagacctgcttttgtttgcaggacattaaactctctaaaagacagtccaattgacatctggtaggctgtctcctactctccgctgtataggcatcagctcgctaacgtgaattcctgaccctgatcaggactcaggtccatggacgtcaaccgtggccgtcgctgtcagttaacattgtccaggctccagggaccccagccctttcgccggcaggaaggtgactgtaccgctgcaacgaggcgcggcaccgacactccgttccatcatcacaggcagcctcccaaactaacgagcctagcgtggcctgggacggctacggtcgagtgcccgtcggctcacagtcacagcgtctccaagctatttgagccattggtactgatacggccggagttaaggacacgtcatcttcacacccccaccccacacgctacgctgcggtacggacacggtacagcctcatcgccacgccaccgacgaaagaaagcttggacgagtgaagggagatgccgccagcagctccgcgccgaataatcctgctggccgcggcggcggcggcggcggcgctgctgctgatgtggccggccgcccgcgtcacggccgacgacggcagcacggcattcttgccgccgccaccggggcccgcgtcgccgttcccgttctgcccggcgcggccgcctggggtgtcgtcggggccgttcccctggtcgccgccgtcgtcgtcgccgccgccgccgccgtcggtggcgatgttccctcaggacccggggttcctgccgtcgggggcgtgccccgtcggcggcgcggcggtggcgtggctgctgctgctgccgctgctcgctgtgctctctgctttcttgccgctttcgcagtgactctcgcggttgctgcccctggatggatgtgatgtgtccgtagtcgctcagttggatcggagatcaagatttacttattttttcttttttttttaacgaagctaggaaagaggcattctttcttgtttgcctttctttctttctttcttttcgaaggcatagccacataggtctgtctgtttctttcttctcgagagaagggatatcttcgtgtacaaccgtgtggctccattcatgcaatccaggactcggcagatacagcttttgagtaaaacaaatctcgctggcgtt

SEQ ID NO: 145503 - DNA, 1215 bp, Zea Mays
gagcacggagcaggacgaggacgaggacgacctccacctcccgccccccgaaagctaaaagcggagaccgcccactataaccaccgccccgaattatattcatccattcattcatcccagccgaagagcaccaagaagagacgcagcagcatatacgcatccatccacccactcgaaacagaccaacccctaccctaccctgcaggctgcagcgcgcgcagagggggaaggagctccagcaaaaagtttgtccagctcctcctcctcctactacaccggctaggaggaatctgatcaccgagcaccatggcgcggcggccgcagcccatgccgaacctggtgcccacgctcctcctgctcctgctcgtcgtcgccgccgcggtcgtgagagccgacgacgacgagaagtgcagcaacccgtgcgggaacccctgcggcgagccgtgcgtgtacgccagcccgccgccgccgcccgtgtactcgcccccgccgccgccgccgacgccggagtactacccgccgacgaccccgaccccgaccacgccctactgcccgccgccgcctttgggcggcggcggcggctacgagccgtcgcccgggtacacgccgtcgacgccctacacgcccggctacaaccccacgccctccgggtccggctggtacgcgccgccctacacgccgccgtccgcagggacgctgtacccgcaggaccccgggttccggcccaacgccgcgccgcggcgcgccgcgaccctcttctccctcgccgcggcggtggcctgcgcctgcttcggcttgttgtgaccgaccgaccggacggatcggaggccgcgaatcgcgcacgtacggtacggtacggtaccgacgacctgcgcccgtcgtggtggtcgtcgtcaagtcgaccgcagactgcatgctgggtttagttccgcgcgctccgtgttggtgttaataataagattagaggaaggatttaagttgggtttcggtaagatttttttcttcttcttccactcacttcgtcgtgtcgttcttttttttttgtttagtataaattcatcgttcttgtgatgtacttgttaattgttactatacatgttcgttgctccatctgttttttttttcatcgtcaaaggaacacacgacgttcatccatctgtttcaggtgggatcaaacattcaaactcaaataacatgtatgcatgtcttatgccc

SEQ ID NO: 145504 - DNA, 447 bp, Zea Mays
atggccacggcgcacggcagcaggctcatcttcctcttcgaggccacgctcttctcggcgctgctgctcgtcccggcacgccctgcttccgccgcagacggcagcgcgtacccggccggcgactgcccctacccgtgcctgccgccgcccgccgtcaccgccaactgcccgccgcctccgccggctgcggcgtcgtactcgtacccgccaccgccgggggcttacattccctacttccagcctgcggcgggtggcggtggtggcggcggtagtggggggtacggcggctacccggcgccgccgccgcccaaccccatcctgccgtggtacccatggtactacaagacgccgccgtcgtccgcggccgccacgtcgggcagggggagtcgcgttcttcttgggtcggccgccatggtagctgctgctgccctgctgatcatggcttag

SEQ ID NO: 145505 - DNA, 237 bp, Zea Mays
atgacgtgggcttgtggaggtgaggaggccggcgaccaagtgtggaggcgcaaagccgctgcgccaaatccccgagagcagcagatccggagggagcatgggagcaggcgagtagccaacgacgagcgagcagcatactgcgcggggctggaggcagggcgagggcgcgatacggctagggttgagggcggaggcggtatggtggcgccgtcgggagaaggggagaagaggaggtag

SEQ ID NO: 145506 - DNA, 254 bp, Zea Mays
atgacgtgggcttgtggaggtgaggaggccggcgaccaagtgtggaggcgcaaagccgctgcgccaaatccccgagagcagcagatccggagggagcatgggagcaggcgagtagccaacgacgagcgagcagcatactgcgcggggctggaggcagggcgagggcgcgatacggctagggttgagggcggaggcggtatggtggcgccgtcgggagaaggggagaagaggaggtagggtttgctagtttttaa

SEQ ID NO: 145507 - DNA, 2361 bp, Zea Mays
gactatagtgcagcgctatacaagaaacatcccagaaagtccgcgtcaccaagccgcaaagctagaatccttccaccacagccatggtgccatcacgacacaataattgattgccactgattccagcaaggttctaataaatcttgtagatgcaacctcgctttgcctgccgccgccagtcttccgcctccgccacacacaaatgtccagtttctttgctgtagctgtagctttggtgctctcatctctcatccatggaaccacgatggccacagcgagcagcgaagagagcttcttccagaagtgcccagcgtccaggtgcagcgaaggagggccagagatccggttcccgttccgccttgcgaccagccctctgtcatgcggtgcgcccggcatggagctggtgtgctccaaagcagacaccgtcctggttcacccaaaccttggcttgtgtaaggtaactgccatctggtatggcggcagcactataaccatcgtcccactcgcagtcgcagcagaacccaagtgccctttccagaagatcatctccaccaatctatcaaccgatgtgtatagaccttatggggatagggcaaccttagtgagctgttcagcagagttcatagtaccaagccatccggccagccttgctggtcccatctcttgccttaccaacgctagccgccggttcgcttacttggtgccgtcttttcgaccaatggatttccttcccttggactgcacggttctttcgaatagcatctcggtaccttaccctgcttctgtcaacgcgggcttcaacggaactgcaagaggagccatcgcatttggcgagacaatgttagaatggagagttcctaacattaccgatgtctgccgagactgcgaagctgaaggaaggctctgtggatttagctccgagagtaggcaagcattctgtaagagtaagaatcacagttcacgtctcaaggtcattgcagtaacgacgccagtagccgcagtcctggttctttcagcaatggcaggtgctgcattattacacctggccctgaaatctaaatacgacgacgagatacacaggaaagtggagatgttcctcgagacctacaggacgctgaaaccgagaaggtacacattctctgaagtcaggaagatgacaagacggttcagcagcagacttgggcaaggcgggtttgggagcgtgtacaaaggcgagctgccgaacggaggagtgcctgtgcctgtggcagtcaaaatgctggaggactcgacgggggaagaggagttcatcagcgaagtcgcaaccattggaaccatccaccacgccaacgtcgtccggcttctagggttctgctccgagaggtcaaggcgtgctctggtatacgagttcatgcctaacgcgtcgctggagaagtatatacgctgctcctcccaagaacagtcgttaataccaacggccagtaagatgctggaaatagcgacagggatcgcccgaggaatcgagtacctgcaccagggctgcgaccagcgcatcctccatttcgacatcaagccttccaacatcttgctagactacaacctgaacccgaagatctcggatttcgggctggcgaagctgtgcgcgagggaccagagcgtcgtcgcgctgaccgcagcgagaggcaccatgggctacattgcgccggagctatactctcggaacttcgggacagtgtcatgcaagtcggacgtttacagcttcggcatggtggtgctggagatggtggtggtgagtgcaaagaggaggaagtacagcccagcagagaccgaggaccagaacgacgacgtttgcgttccagagtggatatacgaggaaatagtcaccggacaagagcccagggaaatggcacgaggagagagagacatggtgaggaagctggctatcgtggctctctggtgcattcagtggaacccaccgaaccgcccgtccatgactacagtggtgaacatgctgacggatagcttgcagagccttaagataccccctaaaccatttgtttcatcctttgttggccagtaaccatgaagaaaaagctctagagaccacatggtgaccattcagatagatattcgtgtctatcacttgtcggcatatgcatgtatcagcgatgatgccctgtgatctgtcgtagttttgtgtcatacccatataccttttttccttgtaaccactggattgtatacattgcaattttctggtggtttaaccatgttcacgaatttgtaatggcattattagcaggacgttacataaaaaaaattagtaactggaaaggtagaagttacagcttacattaaaatgcggacagaataacgttctta

SEQ ID NO: 145508 - DNA, 252 bp, Zea Mays
atgaggatgggaggcacgtcacgagtgagggagagcctgcctccaccatccaccacagaagctgaagaggtcagtagacaaaagaacaaagtggataaagcttatagctttgaccatgacaaagttttgaagtccaaaacctttaatcagaaaaggattcccgatgttaagatccatggtgttctcggtaagattaagataataactcagtacaatgtctcaattgaagatggtcatgagaattcctactga

SEQ ID NO: 145509 - DNA, 2151 bp, Zea Mays
agcggtcatgacattcacagaatctctcctcccgagaggttaaagcaaatagaaataggtgctcattctgaaacacttgcaaccttctcctcgcccaccttcatctccaaatacatcccatgaactcgcataaatttcttctggcagtgctgctgcttttgcttcacaactatgcatcctatgctgccacatcgaaggaagatgatgacttcctcaaaacttgcccatcgcatcgatgccacaagcatggaccagagatccggttcccctttcggcttccaagccaccctccatcatgtggcgcacctgggatgcaattatcatgctctgggcatgacaccatccttgatcatccagttcttggctcctgcagagtgacagcaatatattacaggcatcgtgtcatgaatgtcatcccgccagaggactcatcatcacactgccaacttcagaagcttgttaaaagaaatcaatcaactgatgtgtacacacctgtagcacatcctttctcagtacttgtaggatgctcaagagaagcaacaaatcaagatggtattgtcggcccaagctcttgtttaagcctcattaacaatgcaagccagctctggtacctggtggatccttctacagatatgtctactcttcccatgggctgcgaggttgttgcaaagggaatcccagtaccctacacttacgacaaaaatggtccaatagatgagacattctccggaaggtcactgttcaacgaaaatgcaaatagagcaatcaattttggtgaaacatcattcaattggaacctcaacaacatcaccggctcttgtcaaaggtgtgaacaggaagggaaacattgtggattcagttcaaacaggcgacaagcattctgcctgcatcacggttcacatgtcatcctcattgcagctacaacatcagtagccacattcgttgttctggtagtcactgcactctatctttcactgaagaaaagatataatgaagcaatacatctcaaagtagaaatgtttctcaaaacatatggcacatcaaaacccacaaggtacactttctccgaagttaagaagatagcaaggcggttcaaggaaaaagtaggccaaggtggattcggaactgtttacaaagggcagctaccaaatggtgttccagtggcggtcaaaatgctagagaactctacaggagagggagaagacttcatcaatgaagtagcaaccattggacaaatacatcatgcaaatatcgtccgcctcctaggtttttgctctgaaggaacaagacgtgcgcttatttatgaattcatgcctaacgagtcattggggagatatatattcttgccgcaagagctcctagtaccagaaaaaatgctagatatcgctacaggcattgctagaggaatggagtacctacatcaaggatgtaaccagcgcatcctccactttgacatcaagcctcacaacattctgctggactacagcttcaatccaaaaatttcagattttggtcttgctaagctgtgtgccagggaccaaaacattgttaccttgaccgcagcaagaggcacaatggggtacatcgcaccagaaatatattctccaaatttcggtggggtatcatacaagtcagatgtttacagttttggcatgctggtgttagagatggtgagtggaaggaggaattcagacccaggtatcgagaaccaaaatggggtgtatctaccagagtgggtctatgagagagtagtcactgggcaggacctcacacttagtaagaaaatagctgatcaggagaaagaaacagtgaggcagctggccattgttgcactctggtgcattcagtggaaccccaaaaacaggccatcaatgacaaaagtggttaacatgttgactggaaggttacagaatttaccaataccacctaagccatatgcctagcctgaaagacatcctatgccataaaacatggaggatatacaccatgttttaggaagcatgaaaagcagttatgcttactttcatttgcgagcttagtaatgcttagcaatagattacacagtatttggatcattccactgtatcagacacatgaactgtgactcttttaattttcgatgtgtggtaacttaattagagacgtatcaca

SEQ ID NO: 145510 - DNA, 944 bp, Zea Mays
agcggtcatgacattcacagaatctctcctcccgagaggttaaagcaaatagaaataggtgctcattctgaaacacttgcaaccttctcctcgcccaccttcatctccaaatacatcccatgaactcgcataaatttcttctggcggtgctgctgcttttgcttctcaactatgcatcctatgctgccacatcgaaggaggatgacgacttcctcaaaacttgcccatcgcatcgatgccataagcatggaccagagatccggttcccctttcggcttccaagcctccctccatcctgtggcgcacctgggatgcaattatcatgttctgggcatgacaccatccttgatcatccagttcttggctcctgcagagtgacagcaatatattacaggcatcgtgtcatgaatgtcatcccaccagaggactcatcatcacactgccaacttcagaagcttgttaaaagaaatcaatcaactgatgtgtacacacctgtagtgaatcctgtctcagtacttgtaggatgctcaagagaagcaacaaaccaagatggtattgttggcccaagctcttgccgaagcctcattaacaatgcaagccagctctggtacctggtggatccttatacagatatgtctactcttcccatgggctgcgaggttgttgcaaagggaatcccagtaccctacacttacgacaaaaatggtccaaaagatgagacattctccggaaggtcactgttcaacaaaaaggcaaatagagcaatcaattttggtgaaacatcattcaattggaacctcaacaacatcaccggctcttgtcaaaggtgtgaacaggaagggaaacattgtggattcagttcaaacaggcgacaagcattctgcctgcatcacggtattgttttccagcctagatcccataatgtttgtggtgttccgttctaa

SEQ ID NO: 145511 - DNA, 1101 bp, Zea Mays
atggcatctcggatctgctattttagtatagctatcaagagctacctctatggttcacatgtcatcctcattgcagctacaacatcagtagccacattcgttgttctggtagtcactgcactctatctttcactgaagaaaagatataatgaagcaatacatctcaaagtagaaatgtttctcaaaacatatggcacatcaaaacccacaaggtacactttctccgaagttaagaagataacaaggcggttcaaggaaaaagtaggccaaggtggattcggaactgtttacaaagggcagctaccaaatggtgttccagtggcggtcaaaatgctagagaactctacaggagagggagaagacttcatcaatgaagtagcaaccattggacaaatacatcatgcaaatatcgtccgcctcctaggattttgctctgaaggaacaagacgtgcgcttatttatgaattcatgcctaacgagtcattggggagatatatattcttgccgcaagagctcctagtaccagaaaaaatgctagatatcgctacaggcattgctagaggaatggagtacctacatcaaggatgtaaccagcgcatcctccactttgacatcaagcctcacaacattctgctggactacagcttcaatccaaaaatttcagattttggtcttgctaagctgtgtgccagggaccaaagcattgttaccttgaccgcagcaagaggcacaatggggtacatcgcaccagagatatattctccaaatttcggtggggtatcatacaagtcagatgtttacagtttcggcatgctggtgttagagatggtgagtggaaggaggaattcagacccaggtatcgagaaccaaaatggggtgtatctaccagagtgggtctatgagagagtagtcactgggcaggacctcacacttagtaagaaaatagctgatcaggagaaagaaacagtgaggcagctggccattgttgcactctggtgcattcagtggaaccccaaaaacaggccatcaatgacaaaagtggttaacatgttgacaggaaggttacagaatttaccaataccacctaagccatatgcctag

SEQ ID NO: 145512 - DNA, 1569 bp, Zea Mays
atggcagacgtcccgttcggcgtcctgctctccggtgggctggactcgtcgctggtggctgccgtcgccgttcgccacctcgctgagacagaggccgccaggcgcgggggcaccaagctccactccttctgcgtgggcctggaggggtcccctaacctcaaggcggccaggggtcagggtcgagcacgttctgcatccccaggacatcatcccaaatcaagggttgggtcaagcaagattgttatgactgctccccctcacgctttcgtcgtcgtcgtggaccgctcgctggcgctgacctctcccaagcgtgacacggtggtgcgggtgccgtacaaggtctccatcccgctgggcagggtcaagacagccacgccgggtgggaacaaggaccgaccggagcagaagtaccaggtgtccctgcacgaactggagaaggccatcgagcaggcgaaccttcggggctggatccaccgactctcgttcggtggcctcacgttgtgcttttgtgtggctattcgttcactggagaaggccattgaactattgaataagaggaaagttcaggggagaattcttttgtgtggctattcgttcaattacatttctgggacagcttcaataaagaaaaatatttacccaggaacaaaatttgaccctgtaccagtcagcatccctggaattctcatcacagatgtcagcaaaacggaggatcttatagactactacaattcttccaccataagagattgggctggaagggctacagccttcaaagcaacagcagattttagctttcaagacgctgatgtccttaaacttaaactagacatacttgctcctagcaatctcatatgggctgcatgggcgcctaatggaacggatgaatcaaactatgctgtgaactgccagaatttcttggtggcaaatgcaattgtattgaaggttgccaaagatctgacaaagagagtcctcaatgacgaggcaaactacgacagacaaattgtgaccatatccagcattgatggaaaaataatacgttatgctaggccagatcacccaactagaaaagggagtgatgcatctaccgagtctggatctgaagtggaagatgtaacatctcctactgcatcaaggaacctgattacacatcctattttgacccctgttcacgaggagttgggactcatgactcatccattgatgtgttgcactaaaaaagatggggatggcgttcaccggcccagagattaagatgacacaagcttggcacaaatgatgggtcgtgaaccaggagataatttccaagacttgataaaggagtatggcgtgtactgaagggtccattcaactacacgactcgtgatgaagctggtataccctgagaatggtaacttctgaccagcatggcataagtctgtaagcattcacatctttatgaggttaatttttatattatatcatgtacgacaagaagttcaaacaagaagcagcacaaaaactttcagatgtgagagactgtcatagttttttatgataatgttttgctatggagctaaactggcaata

SEQ ID NO: 145513 - DNA, 826 bp, Zea Mays
catgaactcgcataaatttcttctggcagtgctgctgcttttgcttctcaactatgcatcctatgctgccacatcgaaggaagatgatgacttccgcaaatcttgcccatcgcatcgatgccacaagcatggaccagagatccggttcccctttcggcttccaagccaccctccatcctgtggcacacctgggatgcaattatcatgctctgggcatgacaccatccttgatcatccagttcttggctcctgcagagtgacagcaatatattacaggcatcgtgtcatgaatgtcatcccgccagaggactcatcatcacactgccaacttcagaagcttgttaaaagaaatcaatcaactgatgtgtacacacctgtagtgaatcctgtctcagtagttgtaggatgctcaagagaagcaacaaatcaagatgatattgcaggcccaagctcttgccggagcctcattatcaatgcaagccagctctggtacctggtggatccttatacagatatgtctactcttcccatgggttgcgaggttgttgcaaagggaatcccagtaccctacacttacgacaaaaatggtccaaactataacacattctccggaaggtcactcttcaacgaaaaggcaaatagaacaatcaattttggtgaaacatcattcaattggaacctcaacaacatcaccggctcttgtcaaaggtgtgaacaggaagggaaacattgtggattcagttcaaacaggcaacaagcattctgcctgcatcacggtattgttttccagcctagatcccataatgtttgtggtgttccgttctaa

SEQ ID NO: 145514 - DNA, 2034 bp, Zea Mays
catgaactcgcataaatttcttctggcagtgctgctgcttttgcttctcaactatgcatcctatgctgccacatcgaaggaagatgatgacttccgcaaatcttgcccatcgcatcgatgccacaagcatggaccagagatccggttcccctttcggcttccaagccaccctccatcctgtggcacacctgggatgcaattatcatgctctgggcatgacaccatccttgatcatccagttcttggctcctgcagagtgacagcaatatattacaggcatcgtgtcatgaatgtcatcccgccagaggactcatcatcacactgccaacttcagaagcttgttaaaagaaatcaatcaactgatgtgtacacacctgtagtgaatcctgtctcagtagttgtaggatgctcaagagaagcaacaaatcaagatgatattgcaggcccaagctcttgccggagcctcattatcaatgcaagccagctctggtacctggtggatccttatacagatatgtctactcttcccatgggttgcgaggttgttgcaaagggaatcccagtaccctacacttacgacaaaaatggtccaaactataacacattctccggaaggtcactcttcaacgaaaaggcaaatagaacaatcaattttggtgaaacatcattcaattggaacctcaacaacatcaccggctcttgtcaaaggtgtgaacaggaagggaaacattgtggattcagttcaaacaggcaacaagcattctgcctgcatcacggttcacatgtcatcctcattgcagctacaacatcagtagccacattcgttgttctggtagtcactgcactctatctttcactgaagaaaagatataatgaagcaatacatctcaaagtagaaatgtttctcaaaacatatggcacatcaaaacccacaaggtacactttctccgaagttaagaagatagcaaggcggttcaaggaaaaagtaggccaaggtggattcggaactgtttacaaagggcagctaccaaatggtgttccagtggcggtcaaaatgctagagaactctacaggagagggagaagacttcatcaatgaagtagcaaccattggacaaatacatcatgcaaatatcgtccgcctcctaggtttttgctctgaaggaacaagacgtgcgcttatttatgaattcatgcctaacgagtcattggggagatatatattcttgccgcaagagctcctagtaccagaaaaaaatgctagatatcgctacaggcattgctagaggaatggagtacctacatcaaggatgtaaccagcgcatcctccactttgacatcaagcctcacaacattctgctggactacagcttcaacccaaaaatttcagattttggtcttgctaagttgtgtgccagggaccaaagcattgttaccttgaccgcagcaagaggcacaatggggtacatcgcaccagagatatattctccaaatttcggtggggtatcatacaagtcagatgtttacagtttcggcatgctggtgttagagatggtgagtggaaggaggaattcagacccaggtatcgagaaccaaaatggggtgtatctaccagagtgggtctatgagagagtagtcactgggcaggacctcacacttagtaagaaaatagctgatcaggagaaagaaacagtgaggcagctggccattgttgcactctggtgcattcagtggaaccccaaaaacaggccatcaatgacaaaagtggttaacatgttgacaggaaggttacagaatttaccaataccacctaagccatatgcctagcctgaaagacatcctatgccataaaacatggaggatatacaccatgctttaggaagcatgaaaagcagttatgcttactttcatgtgcgagcttagtaatgcttagcaatagattacacagtatttggatcattccactgtatcagacacatgaactgtgactcttttaattttcgatgtgtggtaacttaattagagacgtatcaca

SEQ ID NO: 145515 - DNA, 3166 bp, Zea Mays
ggcgcggccaccgtaccatatcccgcgatgaatttgcggtagtacccgatcaatccgaggaacccgcgtagagctcgaagtgattttggcgatggccatgcctccacagcctcaatcttggcggggtccatggccacgccgttcgacgagatgacgtgaccaaggtaggcgaccgtgtgagtgccgaagagacagttagaacacttgagcgccaacttgtgtgtccacagtaactggaacaccttcttaacgtgttggagatggtcggcccatgaacgattgtagatgaggatgcgtcaaagaagaccagcatgaacttgcggatgtacgacttcaacacctcattcatgagagcctggaaggtagaaggtgtgttcatcaacccgaacagcatcaccaggaactcatagtgccctcgatgagtgcggaaggttgtcttggcgatgtcgtcggggtgcatttgcacttggtaatggagttgtcgaggctagttggttacgccatctcttgttggaacttcgatgcccccttcacaggagtattcttgtctattgtgacaacatcagcgccgtctatttatccaccaatccagttcaacatatcgtacgaagcatgttgaaattgatctccacttttcgagaacgtgttgctattggtgatgttcacgcaggggcgaagctactgtgtagccagtgggtgcaagtgcaccccctaaaactccaaaaatcaattatactgttcaatttttcaccatataagcaccacccacatctcatccttatgaatccacaagggaggtgcaccccctttatatttgctctagcttcgccactgcgttcacgaaagggcttctgacatcagtgtttcttgagttcaagtccagtctcaacatttgcagtggctagatgtttcgactaggggtgttagattattactataatttgtaggctgctttccatctcccctcctgcatgagggctagtatggcaactctatcaggtatagcaactaggagcagtcctatatggcatctaggatctgctattttagtataggtatcaagagctacctctatggttcacatgtcatcctcattgcagctacaacatcagtagccacattcgttgttctggtagtcactgcactctatctttcactgaagaaaagatataatgaagcaatacatctcaaagtagaaatgtttctcaaaacatatggcacatcaaaacccacaaggtacactttctccgaagttaagaagatagcaaggcggttcaaggaaaaagtaggccaaggtggattcggaactgtttacaaagggcagctaccaaatggtgttccagtggcggtcaaaatgctagagaactctacaggagagggagaagacttcatcaatgaagtagcaaccattggacaaatacatcatgcaaatatcgtccgcctcctaggcattgctagaggaatggagtacctacatcaaggatgtaaccagcgcatcctccactttgacatcaagcctcacaacattctgctggactacagcttcaacccaaaaatttcagattttggtcttgctaagttgtgtgccagggaccaaagcattgttaccttgaccgcagcaagaggcacaatggggtacatcgcaccagagatatattctccaaatttcggtggggtatcatacaagtcagatgtttacagtttcggcatgctggtgttagagatggtgagtggaaggaggaattcagacccaggtatcgagaaccaaaatggggtgtatctaccagagtgggtctatgagagagtagtcactgggcaggacctcacacttagtaagaaaatagctgatcaggagaaagaaacagtgaggcagctggccattgttgcactctggtgcattcagtggaaccccaaaaacaggccatcaatgacaaaagtggttaacatgttgacaggaaggttacagaatttaccaataccacctaagccatatgcctagcctgaaagacatcctatgccataaaacatggaggatatacaccatgctttaggaagcatgaaaagcagttatgcttactttcatgtgcgagcttagtaatgcttagcaatagattacacagtatttggatcattccactgtatcagacacatgaactgtgactcttttaattttcgatgtgtggtaacttaattagagacgtatcacattggatttgatttccagtgttgttcaattattgtgattttccggaaaatatatctgttcggttggctttaatccgtaccggtttctactgtttctttttttctcgaaagcgtaggagaactacgccccattatatattaagcagaaaaaggggtggccaaaaaagaccaatacaaacggcctccttacggaggccagtaggaagcatacataaatgaatccatcagaccttcttaattctcagctaagggtgctgctaaatggcaaagccccttggcaccagcaatctcccattgtgccctttcctcatccgcagctctaagactcatggtaacactagggctgcagccatcaaagacgcatttgtttctatgcttccacaaggtccaggctcccagaatgataagggaatcaagtctttttttgtgagtccattaacaatattccccaccgattcccaccagcctagatatgagctaacatctggttgaggagccaaaagaatgcagaccgaatttccttaacaacagataccaattccctagagaaacaacaggtaacaaggagataatcgatagtttcatcctcttgatcacaaagggggcacttctcaggatgaatcagccctcttttagcaagcctatctgttgtccagactctattttgtgcaaccagccagatgaagaagcgacattttggcaaggcccaagttttccaaattttcttctgatgagggaaaaccacagatcccaaaaagaaaccttcgtaagcagtctttgctgaatagatgccagtaggagcaatactaaaaacatgtttatccttaacctcaggctgcagctgccaagctgaagtcatattccacaactggagataatctgttaagactcccactgtcagcggacccttaatatcagagatccattttctatctgtaattgcctcataaatagtcctgct

SEQ ID NO: 145516 - DNA, 2144 bp, Zea Mays
gataggtgctcattctgaagcacttgcaaccttctcctcgcccaccttcatctccgaacacatcccccatgaactcgcataaatttcttctggcagtgctgctgcttttgcttctcaactatgcatcctatgctgccacatcgaaggaagatgatgacttccgcaaatcttgcccatcgcatcgatgccacaagcatggaccagagatccggttcccctttcggcttccaagccaccctccatcctgtggcacacctgggatgcaattatcatgctctgggcatgacaccatccttgatcatccagttcttggctcctgcagagtgacagcaatatattacaggcatcgtgtcatgaatgtcatcccgccagaggactcatcatcacactgccaacttcagaagcttgttaaaagaaatcaatcaactgatgtgtacacacctgtagtgaatcctgtctcagtacttgtaggatgctcaagagaagcaacaaaccaagatgatattgcaggcccaagctcttgccgaagcctcattaacaatgcaagccagctctggtacctggtggatccttatacagatatgtctactcttcccatgggctgcgaggttgttgcaaagggaatcccagtaccctacacttacgacaaaaatggtccaaaagttgagacattctccggaaggtcactgttcaacgaaaaggcaaatagagcaatcaattttggtgaaacatcattcaattggaacctcaacaacatcactggctcttgtcaaacttgtgaacaggaagggaaacattgtggattcagttcaaacaggcgacaagcattctgcctgcatcacggttcacatgtcatcctcattgcagctacaacatcagtagccacattcgttgttctggtagtcactgcactctatctttcactgaagaaaagatataatgaagcaatacatctcaaagtagaaatgtttctcaaaacatatggcacatcaaaacccacaaggtacactttctccgaagttaagaagatagcaaggcggttcaaggaaaaagtaggccaaggtggattcggaactgtttacaaagggcagctaccaaatggtgttccagtggcggtcaaaatgctagagaactctacaggagagggagaagacttcatcaatgaagtagcaaccattggacaaatacatcatgcaaatatcgtccgcctcctaggattttgctctgaaggaacaagacgtgcgcttatttatgaattcatgcctaacgagtcattggggagatatatattcttgccgcaagagctcctagtaccagaaaaaatgctagatatcgctacaggcattgctagaggaatggagtacctacatcaaggatgtaaccagcgcatcctccactttgacatcaagcctcacaacattctgctggactacagcttcaatccaaaaatttcagattttggtcttgctaagctgtgtgccagggaccaaagcattgttaccttgaccgcagcaagaggcacaatggggtacatcgcaccagagatatattctccaaattttggtggggtatcatacaagtcagatgtttacagtttcggcatgctggtgttagagatggtgagtggaaggaggaattcagacccaggtattgagaaccaaaatggggtgtatctaccagagtgggtctatgagagagtagtcactgggcaggacctcacacttagtaagaaaatagctgatcaggagaaagaaacagtgaggcagctggccattgttgcactctggtgcattcagtggaaccccaaaaacaggccatcaatgacaaaagtggttaacatgttgacaggaaggttacagaatttaccaataccacctaagccatatgcctagcctgaaagacatcctatgccataaaacatggaggatatacaccatgttttaggaagcatgacaagcagttatgcttactttcatgtgtgagcttagtaatgcttagcaatagattacacagtatttggatcattccactgtatcagacacatgaactgtgactcttttaattttcgatgtgtggtaacttaattagagacgtatcacattggatttgatttccagtgttgttcaattattgtgattttccgg

SEQ ID NO: 145517 - DNA, 4060 bp, Zea Mays
gataggtgctcattctgaagcacttgcaaccttctcctcgcccaccttcatctccgaacacatcccccatgaactcgcataaatttcttctggcagtgctgctgcttttgcttctcaactatgcatcctatgctgccacatcgaaggaagatgatgacttccgcaaatcttgcccatcgcatcgatgccacaagcatggaccagagatccggttcccctttcggcttccaagccaccctccatcctgtggcacacctgggatgcaattatcatgctctgggcatgacaccatccttgatcatccagttcttggctcctgcagagtgacagcaatatattacaggcatcgtgtcatgaatgtcatcccgccagaggactcatcatcacactgccaacttcagaagcttgttaaaagaaatcaatcaactgatgtgtacacacctgtagtgaatcctgtctcagtacttgtaggatgctcaagagaagcaacaaaccaagatgatattgcaggcccaagctcttgccgaagcctcattaacaatgcaagccagctctggtacctggtggatccttatacagatatgtctactcttcccatgggctgcgaggttgttgcaaagggaatcccagtaccctacacttacgacaaaaatggtccaaaagttgagacattctccggaaggtcactgttcaacgaaaaggcaaatagagcaatcaattttggtgaaacatcattcaattggaacctcaacaacatcactggctcttgtcaaacttgtgaacaggaagggaaacattgtggattcagttcaaacaggcgacaagcattctgcctgcatcacggttcacatgtcatcctcattgcagctacaacatcagtagccacattcgttgttctggtagtcactgcactctatctttcactgaagaaaagatataatgaagcaatacatctcaaagtagaaatgtttctcaaaacatatggcacatcaaaacccacaaggtacactttctccgaagttaagaagatagcaaggcggttcaaggaaaaagtaggccaaggtggattcggaactgtttacaaagggcagctaccaaatggtgttccagtggcggtcaaaatgctagagaactctacaggagagggagaagacttcatcaatgaagtagcaaccattggacaaatacatcatgcaaatatcgtccgcctcctaggattttgctctgaaggaacaagacgtgcgcttatttatgaattcatgcctaacgagtcattggggagatatatattcttgccgcaagagctcctagtaccagaaaaaatgctagatatcgctacaggcattgctagaggaatggagtacctacatcaaggatgtaaccagcgcatcctccactttgacatcaagcctcacaacattctgctggactacagcttcaatccaaaaatttcagattttggtcttgctaagctgtgtgccagggaccaaagcattgttaccttgaccgcagcaagaggcacaatggggtacatcgcaccagagatatattctccaaattttggtggggtatcatacaagtcagatgtttacagtttcggcatgctggtgttagagatggtgagtggaaggaggaattcagacccaggtattgagaaccaaaatggggtgtatctaccagagtgggtctatgagagagtagtcactgggcaggacctcacacttagtaagaaaatagctgatcaggagaaagaaacagtgaggcagctggccattgttgcactctggtgcattcagtggaaccccaaaaacaggccatcaatgacaaaagtggttaacatgttgacaggaaggttacagaatttaccaataccacctaagccatatgcctagcctgaaagacatcctatgccataaaacatggaggatatacaccatgttttaggaagcatgacaagcagttatgcttactttcatgtgtgagcttagtaatgcttagcaatagattacacagtatttggatcattccactgtatcagacacatgaactgtgactcttttaattttcgatgtgtggtaacttaattagagacgtatcacattggatttgatttccagtgttgttcaattattgtgattttccggaaaatatacctgttcggttggctttaatccgtaccggtttctactgtttctttttttctcgaaagcgcagtagaactgtgctccattatatattaagcagaaaaaggggtggccaaaaaagaccaatacaaacggcctccttacggaggccagtaggaagcatacataaatgaatccatcagaccttcttaattctcagctaagggtgctgctaaatggcaaagccccttggcaccagcaatctcccattgtgccctttcctcatctgtagctctaagactcatggtaacactagggctgcagccatcaaagacgcatttgtttctatgcttccacaaggtccaggctcccagaatgataagggaatcaagtcctttttttgtgagtccattagcaatattccccaccgattcctaccagcctagatatgagctaacatctggttgaggagccaaagaatgcagaccagatttccttaacaacagataccagaattccctggagaaagaataggtaacaaggagatgatcgatagtttcatcctcttgatcacaaagagggcacttctcaggatgaatcagccctcttttaccaagcctatctgctgtcaagactctattttgtgcaaccagccagatgaagaagcgacattttggcaaggcccaagttttccaaattttcttgtgatgagggaaaaccacaaaccccaaaaagaaaccttcgtaagcagtctttgctgaatagatgccagtaggaacaatactgaaaacatgttatcgtcaacctcaggctgcagctgccaagctgaagtcatattccacaactggagataatctgttaagacttccactgtcagcggacccttaatatcatagatccattttctatctgtaattgcctcataaacagtcatgttattgacaatcctcttgggtataacattatacaaacttggagcaaggtctttaattctcttaccatttaaccacttatccttccaaaactttgtatttctactgtttctacaatgtttttgtctctatgaattgcagctgcagcagtccaaacagtcggctttaatccaaagcgaacaaatatgttcctttgatttatctgtgctcatcaatgttgtgtactacaacaagtccctgcataactcagaaaggtgttctactcttttatctcatttttttgtgtttgtgtgtgtgtggaacaaggtgttctacttttcctatttgtggtgcataagagttattataaattcatcatgctgggtaattgataaacaactaaacctcagcaatgtgttctatatgtccttccgatgggccataattggtcaagatgcaaagacactataacctaaattgtgccagggacgaagccagccaagtaagtcgccaggtcatccactttgctagctagagtttgcactgcagtaatacagtgcgtacagtgattttcaacttcaaaccatcagggtcagacctagctctgcacttgaactatgcatagtttcttattccccacacagccacaccccaagtaacaatgtcaccccgcatatatcccaggtttgtgagcgcaactgtcctaaaatctagcaacgtggtatgcaaaagcaaggtgttattacctctgtcagtaacgagtaggaagcgcatccggaaagcggtagcgaccctcaccggagcggaggacggcggcgagaagaggaatacccgttccagcattcggaggcggtgcgcacatcggcacatgagggaattcgtgagacttccttcctggcattgggattggcgacttccttcgtggtggctacgaggtactagtgaaatgaaatccgtagccgtgtagccgtagcgtagtttagcgggcggcgcacacaaaaaaaagtgcgacgaacaatggcgttg

SEQ ID NO: 145518 - DNA, 95 bp, Zea Mays
gtgattttcaacttcaaaccatcagggtcagacctagctctgcacttgaactatgcatagtttcttattccccacacagccacaccccaagtaac

SEQ ID NO: 145519 - DNA, 1769 bp, Zea Mays
ctcactatatatcccccgcaccctcgtggtctcccctctctctccatctcctgtctctttctctttctacaaagtcgcttgcgaacagccggtgctgcctgctgccgctgtgttggagagaaagaaagcgagcgagcgaggagggaggagggagagggaccgcaaatccctcggtcgctttcgacggcctggatctcccgcacgcgggatcgtacgaccggcacgctgctgtcgctttccaccgcatagtaaattgccaaggctgttgtaatgggggcaaatggtcatcatgaacctcgcagaggatgtaatggcaccgtctgcaatggtagtataagaccactcgattactttggtgatgtagatccatggacggcttgggcatacaagcctcgaacgatctcgctcttgctgacgggaacatgccttttaatttgggcaagtggtgctctcgatccagaaaggagctcatctgctgatcgtgtttggtcagtcaagaggggtgtatttgcgatgattgctgtttttttggcttactcttttcttcaggcaccttcaactggactcattagaccacatcctgccatttggaggcttgttcatgggatgacagttgtttaccttgtcgccctcactttcttgctttttcagactcgtgatgatgctaggcaattcatgaagtatcttcatcctgatcttggtgtcgaattgcctgaaagatcttatggaactgattgtcgcatatatgtccctgatcatccaaaaagcaggtttaacaatgtttatgagatcatttttgatgaatttgttatagctcatatccttggatggtggggtaaggctataatgatacgaaaccaaccacttttgtgggtcttgtcaattggttttgagttaatggagctcacttttcgtcatatgttgccaaatttcaatgagtgctggtgggatagcattgtcctagacatattgatatgcaattggtttggtatttgggctggaatgaaaaccgtgcagtacttcgatgggaggacatacgaatgggttggtttgagccgccaacccaacattatcagtaaggtaaaaaggatgctgggacagttcacaccagcacagtgggacaaggacgagtggcaacctacgctgggtccttggagattcatccaggtgctgagcctttgtgttgttttcatggctgtcgaactgaacacgttcttcctcaagttctgcctgtggattcctccgcggaaccctttggtcgtgtatcggttggtcctttggtggttaatcgcgataccgaccatccgggagtacaatacctacttgcaagacagcaaaccatttaaaaaggtgggatccttctgctggctttccctggctatatgcattgtagagctcctgatctgcatcaagtttgggcatggtctgtttccgaggtcaatgccttcgtggttggttacgttctggtcagcagtcgccttgcttcttgcgctctttgtgtggacatggaaataccgaacagtgaaaaggaaaagggtataattgttacaaaggaatgtttattttgcctccattctttacccaattcggtgttaccgtgtacataaaaaatctattcaaattgtgtacatgtagcagtagtagtcagttttggtgatctgaagaggattatccatggtaatttttttttgccttgtttgtcttcctattttccgtcagcaaagtattttgaccggctcttagatgtggattttaattttttcagttct

SEQ ID NO: 145520 - DNA, 2830 bp, Zea Mays
ccctttcctatgccgcgcgcgctccggtttccatcggccattgccatccccgcacaagttccgcggattagcttttcggctcggggggagatattactgccctaatcctgctttagcagcgcgccccgttcctgcggttatgcccgggctcgttctctcgtggctcgtgggacaccgtacgcagcgccacggtctctgccgctggcggccggcggctacccggctcttatggagcggcagttactgttccggtttatcgttgcggcctggattctgaattaattcgtcctggccgttggggttgggcggcggaccaccgcggttgtttctcgcgtccatgcggggacgggacgggtctcaacgggaccccgccttttccggtgcttattctgttgctgttaatcataatgcccagtgccatgtaaggcgtcccccctccccctgcatcgctctgctgcgtttgactctccagcaggcagcagcctttgcttttgccccgtgctgaccatttctctggtgtgcacttcacctgagggcgctctcggattcccaccggatttgatgcgcgcaccttcagcttcaaattctcggcctttttgccgcctggcaaaagctgctgtgtcatagcttttgtttcttcttaatgtggacgagatcactgttcgccctaattatttccgcacttgtttaacccacgggctgttttatgtgttgcttttgaattgctcgatcccttttgctgctcctcgtcttcttcatgggaatgtatgtttcctttgctcggccttgctctctgctgtgctctgctgtaacggacgcagcctctggttgtagcacaccacaccccttctgttattttggagaaactggaagcgtttcgggtttggaatttggcacctagcttgaatgccaccgaaaccattttggagctgagtagggctcattaagtgatctctggcaaatgattgagcaagcagtgcagaacttgtacttagcaaagtaggttttatgcttcaaggttacgactacagctacagcctgatgtttttatgcataatttgttcttctgttctaagcacgtgattgttcccagatatgctggaccattcatgactttttatccacttgtacatacttttttttctgtggcctcacagtggcatgcttttcatttgctagtttttagcaagtattggagatacagatacatgctgctttttttcgtggaagagtggtgaatttttgtcatccgaaggtcagtaggattattatgcattctcaagtgctgctattgatatttttgcagatagtaaattgccaaggctgttgtaatgggggcaaatggtcatcatgaacctcgcagaggatgtaatggcaccgtctgcaatggtagtataagaccactcgattactttggtgatgtagatccatggacggcttgggcatacaagcctcgaacgatctcgctcttgctgacgggaacatgccttttaatttgggcaagtggtgctctcgatccagaaaggagctcatctgctgatcgtgtttggtcagtcaagaggggtgtatttgcgatgattgctgtttttttggcttactcttttcttcaggcaccttcaactggactcattagaccacatcctgccatttggaggcttgttcatgggatgacagttgtttaccttgtcgccctcactttcttgctttttcagactcgtgatgatgctaggcaattcatgaagtatcttcatcctgatcttggtgtcgaattgcctgaaagatcttatggaactgattgtcgcatatatgtccctgatcatccaaaaagcaggtttaacaatgtttatgagatcatttttgatgaatttgttatagctcatatccttggatggtggggtaaggctataatgatacgaaaccaaccacttttgtgggtcttgtcaattggttttgagttaatggagctcacttttcgtcatatgttgccaaatttcaatgagtgctggtgggatagcattgtcctagacatattgatatgcaattggtttggtatttgggctggaatgaaaaccgtgcagtacttcgatgggaggacatacgaatgggttggtttgagccgccaacccaacattatcagtaaggtaaaaaggatgctgggacagttcacaccagcacagtgggacaaggacgagtggcaacctacgctgggtccttggagattcatccaggtgctgagcctttgtgttgttttcatggctgtcgaactgaacacgttcttcctcaagttctgcctgtggattcctccgcggaaccctttggtcgtgtatcggttggtcctttggtggttaatcgcgataccgaccatccgggagtacaatacctacttgcaagacagcaaaccatttaaaaaggtgggatccttctgctggctttccctggctatatgcattgtagagctcctgatctgcatcaagtttgggcatggtctgtttccgaggtcaatgccttcgtggttggttacgttctggtcagcagtcgccttgcttcttgcgctctttgtgtggacatggaaataccgaacagtgaaaaggaaaagggtataattgttacaaaggaatgtttattttgcctccattctttacccaattcggtgttaccgtgtacataaaaaatctattcaaattgtgtacatgtagcagtagtagtcagttttggtgatctgaagaggattatccatggtaatttttttttgccttgtttgtcttcctattttccgtcagcaaagtattttgaccggctcttagatgtggattttaattttttcagttct

SEQ ID NO: 145521 - DNA, 102 bp, Zea Mays
cgcgcgctcgcatttgcttgcgcgcagtgcgtcgacgggactccgtctacgttcgcctacccttcgtctacccctagacgactctcgtctacccccgtctaa

SEQ ID NO: 145522 - DNA, 754 bp, Zea Mays
agtcggtgtgcgtgcgtgtccatggggaacacgccgtcgtgcataccgctggcgcccgcggggggcggcggcgcctcatcatcctcgtcggcggcggccaccaccaccaaggtgatccacgcagacggcgccgtcacgcggctggcgcgcccggtgcgcgcgtcggagctcatgctcgagcacccgggccagttcgtctgcgacccccgccgcctcgcggtcggctgccgcgtccccggcgtggccgccgccgagctcctccagccgcgccgcgcctacttcctcctgcccatggacatgctctactccgtgctcactgacgaggagatggccgcgctctccgagtcccactcccacgccgcgtcctcctggaagaggatcgctgccgccgcccgccgccaccacggacgcctgcggaggtccgggaaggacgaggcctgcggcggtggcgccagggtgtgcccgatgctcggcctgctcgagaccggcggtctcggcgcagataatagcaagcgtgatgaattacgcgccagccctgcaggcaagtcgggcggcggcggcgccgggttgaggcggcaccggtcgtggcagccggtgctggacaccatcgaggaggttccgtgacgcggcgggcggttgaccggcggcgcgccggaggagtgagcagcttcggtttcgctggtgttaggcgggccgcgggcggctggcagctggcagctagcttgagctggcttccgagtgtacagtagctagc

SEQ ID NO: 145523 - DNA, 1315 bp, Zea Mays
cttgctcccagtaccccccgtgccaccccaacgaagcgagacaccaacacgtaggccaacccctccgctgagtcgctgaccgcctcgcacccgtcgttcccctccttccggcacaaccagcacgcgagcggcacgagaagactagggttccggcgaggcgacggcgagaaccatggcagggattcgatggccgccagaggacccggagatcttcccttccaggatggtcagcggcggggcttgggtccccgtcgcgcccccaggagagatggcgtcggacgacgaccggtcggtggccgcggactcgtggtcgatcaagagcgactacggcagcaccctcgacgacgatcagcgttactccgacaccgccgaggtcctcctagcctcctcctccgcctcctctgcggccgcgccctccgcaacggttgccgtccacccctcctccgacttcagcttcgacaaggatgtccatgactccagctacgttgaacctcccttgctgggcttgcagaattttcaggatggtgcttacgctgaggatcttgcaaatttccatgaacgcagccacgctgatgactggtttggcactgatatcatggatatccgcgtaggttggaccaaaaatttgtgctcaagtagagatttacccagctgcagcgtacttgacattgggactgggagtggcagactcttgcagcagcttgcgaagcaggggttttctgatctgactgggattgactatagtgaaagtgcaattgagcttgctcgtagccttgcaatcggtgatgggtttgagcacattaatttcttggttgatgatgttttggagtcgaagttggagagaagatttgaacttgtcatggatgaagggactcttgatgcgattgggctccatcctgatggacctgtgaagagaatgatgtattggcagtccgttgatagcttggtttcccgtggtggtatattggtcatcacatcatgcagcagaaccaaggatgagttggtgcaggaggtagagaacttcaaccaaaggaagcttggtgctgtgggctcaggctcagaaggattgccggctagtgaagctgcggtgttcagctacctggaccacgtccaaagttaccctagtgtggatagttcttgcataacgaccgttgctttacttcataagtgaaaaacataattgtattgtatgcttggtttattggccctagaaagttaccgtatacctgctacgatattaactatgtacccagtcacttgtgtatctggacaatattctactagtattttaccttgtcgggttggtattgctgga

SEQ ID NO: 145524 - DNA, 180 bp, Zea Mays
ttttttgtttttgtatacggggtttggggtgcaagttattactggattatgcatattgtatatttctagttgaaaacttttatctgcaggttttttatttgttttcagaaaacaatttgttgtggtgaggtaacgatactataatttttgtttattcgcaatataattttgtcagcaaac

SEQ ID NO: 145525 - DNA, 1718 bp, Zea Mays
ccatgaacagcaaagcaagggccgaatagtatattagtataggccagttccctcactccccagattccccttttcatagcacctctatacctcttcttctcgtcgtcactctatcccgcatctgctgttctttatttctatacatacatatatactatcatcggttatttgcttctctattctgtccgagtactttacggtgttccgcacatagatctcgtggccggctgttttgcgctttcgcttgcgtttcttggccctgctggtgttgaccggtccgaacgggggcagatcgatgctttgggtttgaagcggagctcctatcattccaatgaagggtcgttccgaagggctggttccgctgctcgttcatggttcccactatcctatctcatcatgtgtatatatgtaatccatgggggagggtttctctcgtctttgagataggcttgtggtttgcatgaccgaggagctgcaccgcccccttgctggccgctctttggattgaagggagctctgcatcctgatccacccctccatttttttttgcttgttgcgtccttcctgggacctgagatccgaggctcgtggtggctcactgtagcctcgctacactgttttcttctcctctcctgtgctatttgctgtttctcctaagattctttaggccgtgcttatccgtgctggagtttaacgaagcagcacgttgctgctgctggtgctgccctcatgccctggtggtcgactggtatcggtacccgtacttgcgtcgctttattataccctatcttcgccggtgaggtttccggccgttcggtacaggtagtctatgtcaaacactcgttttatttcttgtcatactatattcttctgcttcctgttcgtaccggcggcgtgtgcctttgcggtggcgctcctggatctgggtgcagcgagcgcccgtcagcttctccctccccatgccacctcgtcaacgccccccggcacctggcagattcgccgtcatgctggctcagcgctcgacccctcgcgctcggcggcgtcgcctgcaggccaggtccggtttcatcgcatgtcgccgcccgctggtgcttccgtgtcatgggagggagcttcgtttatctttctgaccgacatgtaatgtgcagtgctaggactgctgctgcaacgcttcgcgatgcaaggacgtcgttccagcaggacgattctgtttggactccggaactgcggtttggagttctgaaggcgaataggcgataataatgcggtgtaaattgtgatgaaagctgagattctttgtatgaaatacggaatgtatcgcttggacactgtatcgcgaattggtggatgagcatgttgtattccgttgcccttttggttcgaaacaatgcccacgtacatcgcatgcgtatggtcagatgttaggatcggcatctggttgtcagaatctgatcgttaatagcttcgtttttagttcattttttgtcaaaaatctctcaaatgttcgatgttgtcgcgccggtagtcatccttttatcttcctgtgtaccaggacacgtccttagtgctgattgagtgactagaaaccctcttgctatttaaaataaagtggttctattcaaataggatgacattatttcttatcagtacaaaatatgaggactgaggtgataatagattagctaattccattctacaaaacaaaataaaaataaaaa

SEQ ID NO: 145526 - DNA, 1599 bp, Zea Mays
gtatattagtataggccagttccctcactccccagattccccttttcatagcacctctatacctcttcttctcgtcgtcactctatcccgcatctgctgttctttatttctatacatacatatatactatcatcggttatttgcttctctattctgtccgagtactttacggtgttccgcacatagatctcgtggccggctgttttgcgctttcgcttgcgtttcttggccctgctggtgttgaccggtccgaacgggggcagatcgatgctttgggtttgaagcggagctcctatcattccaatgaagggtcgttccgaagggctggttccgctgctcgttcatggttcccactatcctatctcatcatgtgtatatatgtaatccatgggggagggtttctctcgtctttgagataggcttgtggtttgcatgaccgaggagctgcaccgcccccttgctggccgctctttggattgaagggagctctgcatcctgatccacccctccatttttttttgcttgttgcgtccttcctgggacctgagatccgaggctcgtggtggctcactgtagcctcgctacactgttttcttctcctctcctgtgctatttgctgtttctcctaagattctttaggccgtgcttatccgtgctggagtttaacgaagcagcacgttgctgctgctggtgctgccctcatgccctggtggtcgactggtatcggtacccgtacttgcgtcgctttattataccctatcttcgccggtgaggtttccggccgttcggtacaggtagtctatgtcaaacactcgttttatttcttgtcatactatattcttctgcttcctgttcgtaccggcggcgtgtgcctttgcggtggcgctcctggatctgggtgcagcgagcgcccgtcagcttctccctccccatgccacctcgtcaacgccccccggcacctggcagattcgccgtcatgctggctcagcgctcgacccctcgcgctcggcggcgtcgcctgcaggccagtgctaggactgctgctgcaacgcttcgcgatgcaaggacgtcgttccagcaggacgattctgtttggactccggaactgcggtttggagttctgaaggcgaataggcgataataatgcggtgtaaattgtgatgaaagctgagattctttgtatgaaatacggaatgtatcgcttggacactgtatcgcgaattggtggatgagcatgttgtattccgttgcccttttggttcgaaacaatgcccacgtacatcgcatgcgtatggtcagatgttaggatcggcatctggttgtcagaatctgatcgttaatagcttcgtttttagttcattttttgtcaaaaatctctcaaatgttcgatgttgtcgcgccggtagtcatccttttatcttcctgtgtaccaggacacgtccttagtgctgattgagtgactagaaaccctcttgctatttaaaataaagtggttctattcaaataggatgacattatttcttatcagtacaaaatatgaggactgaggtgataatagattagctaattccattctacaaaacaaaataaaaataaaaa

SEQ ID NO: 145527 - DNA, 125 bp, Zea Mays
cgtttacatcgtggccggaatagtcacgaaaattacacaacgagattcggacagaaccgtctaagctgttattcctttgatttccgtttcgtgattcgaaaaatagagtgtgtagctgtttgccg

SEQ ID NO: 145528 - DNA, 824 bp, Zea Mays
cgtatctcccgtcatctgatcacccacaacggtgatgtggacgacgtggtgcgtcttggaggcagttccatttctggcgttacggtgagggaatgccacaacgtggtggacgccactgccgtggcgctcccgttgcaggccggagtctggacgcctaagcttcttgttttgctgggtttggtgcaagtggcccatatgttgcgcagaggagcactggtgaagcctaagaaccctttatgtcgatgggggcggtctcgagggaggtgtcgtcagcatgtgagaggctctgcttcatttgcccatcactgcggacgaggtcccgccatccagtcaagcgctacaagaagttgcttgcagaaatcttccctcggacacaggatgaaggaccaaatgatcgcaagatagggaaactgtgcgaatatatttcaaggaatcctatgcgtgttccaaagattacagtttacttagagcaaaaatgctacaaggaatttagggctgagcgctatggttcagtgaaagttgttatggcaatctatcgaaaggtgatatgttcttgtcaggagcagttgccactttttgccaacagcttgctaacaattgtagagacattattggagcaaaatagacaggatgacttgcggaaattagcatgtcaaacactttttgactttataaatagtcaggttgacagtacttacatgttcaatttagaaaaccagattcctaaactatgtcatctggcccaagagatgggtgaaaaggagaagatatgcattcttcatgcagctgggctacaagctctttcatctatggtatttgtttct

SEQ ID NO: 145529 - DNA, 1014 bp, Zea Mays
atgaataatgatgatatgagtttgggtatgaataagcatgaattgtccatatcctccctagttgcaggctttcttccaccttcacgcaggcgttctctttttactttggcaacttcaatgctcgtgtttttttcgaaagcttttaacgttcttgcgctcattccagttgtgaagcaagtgttgacagaaagtacagttgatccatttctttgtttaatagaagactgtagattgcaggctcttgatagtgctaatgagtcctgcacgaaactctatggttcaaaagaagatgatgagctagctctgaaatcactgtcgaacattgacatgaatgaaaatcagtcaaaagaaacatcagtgcctcttatacttgacagcttggaagatatgtcggagtcagaattgtctgctattaggaaacagttgcttgaggaattttcagcagatgacagctgtctgggatctcattttactgaaacaccttcacagtatccagcacaaaatgggaaactgcaccataagtctatggaggttattccattgggatttgtttttgaagatgatactctcgctgaagcatctgacagctcagtagaacctcacttgcaacatccgccatgtaacaacattcttgatgtcaatcggcttcttgattcagttttggaaacatctcagcatgttggaaggtcgtcagtgtcaacaaaccaggatctgcctttcaaggacgtagccaaccaatgtgaagcacttctgattgggaagcagcaaaagctatctgcgtgcatgagtgtctgtgaaaaagaggctggtgaatcttccgtcgagcagtcatctcggcaggatcctcaagcagatacgtttctctgcacagctgatgaacaatggcaccccaattcctggcctgcctgcaggtgcgttttcaatcctaaacccggtgtaatgaaggtttcatggaccgaactgaaaaatagtctttacaagcctgaagacctcgttatgtctcaccagggatga

SEQ ID NO: 145530 - DNA, 962 bp, Zea Mays
gttgcggtggtacaaagcgacaggcgcctcacgctcgcgtccctcctccccttccccacctcttcccattgccaagcaagagagaaacgcacgcgagccgcgagcagaacagagcagcgcggcgccatcccgatctcgctatttcccttctcccccgatgcgatctcgccgaaccctaatccccacgcccgacgcccggccgtcgccggagccctagccccgaatgcggcggtgacgcgcggcgtgccaccaccaccacctcagcgcccgcgcccgcgcccgcgcccgccaccgaccgtcctgcccggccgacaccagctgccatgggcgccgccgacaagtggctgctcccgctcgtctccgtctccttcgtctcgctcctgctcttcctctccgcgctctcgggcttctccgcctcctccgcactcttcgcgcgcctcccgccaccctcctacgtgcgccgaggcgccgccgcaccgccctccttcgcctacctgctcgcgggcggccggggggacggcaggaagctcctgcggctgctcctcgccgtctaccaccccaggaaccgctacctgctccacctctccgccgacgcgccggcctccgagcgcgccgagctcgccgcggccgtcgcgcgcgccgctcccgccgtgcgcgccttctcgaacgtcgatgtcgtgggcaggcccaccgcgggcaccccaatgggatcctccggcctcgccgccacgctccgtgcggccgccgcgatgctccggctggatgcggagtgggactggttcatcacgctcaacgccgccgactacccccttctcacccaggacgacttgatccatgttttctcctctgttccaaggcacctcaactttattgatcacaccagtgacattggatggaaagagtatgttctgtctaaacatagcaatagtgaatggtacacagtgcactgctgttagtttcag

SEQ ID NO: 145531 - DNA, 1860 bp, Zea Mays
aagcaagagagaaacgcacgcgagccgcgagcagaacagagcagcgcggcgccatcccgatctcgctatttcccttctcccccgatgcgatctcgccgaaccctaatccccacgcccgacgcccggccgtcgccggagccctagccccgaatgcggcggtgacgcgcggcgtgccaccaccaccacctcagcgcccgcgcccgcgcccgcgcccgccaccgaccgtcctgcccggccgacaccagctgccatgggcgccgccgacaagtggctgctcccgctcgtctccgtctccttcgtctcgctcctgctcttcctctccgcgctctcgggcttctccgcctcctccgcactcttcgcgcgcctcccgccaccctcctacgtgcgccgaggcgccgccgcaccgccctccttcgcctacctgctcgcgggcggccggggggacggcaggaagctcctgcggctgctcctcgccgtctaccaccccaggaaccgctacctgctccacctctccgccgacgcgccggcctccgagcgcgccgagctcgccgcggccgtcgcgcgcgccgctcccgccgtgcgcgccttctcgaacgtcgatgtcgtgggcaggcccaccgcgggcaccccaatgggatcctccggcctcgccgccacgctccgtgcggccgccgcgatgctccggctggatgcggagtgggactggttcatcacgctcaacgccgccgactacccccttctcacccaggacgacttgatccatgttttctcctctgttccaaggcacctcaactttattgatcacaccagtgacattggatggaaagagtctcagagagtgcagccgattatagtagatgctggagtgtatttggcagggaggaatcagttcttccaagccacagagaaacgggacactcctgatagtttcaaatttttcacaggttctccatgggtcattttaaacagacgctttgttgagtattgtatttttggctgggagaatctccctagaacactcctcatgtacttgacaaacgtgatgctacctctcgaggggtatttccattcggttgcatgcaactcggacttccgcaatttcacagtgaacaacgacttgcggtatatgatttgggacaatccacctcagatggagccccatttcctaaatgttacacattacgatgagctagtagggactggggttccttttgcccggaagtttaaggagaatgaacccttgttggacaagattgatgatcaagtgcttcgacgatggcatcagagacctgttcctggtgcgtggtgcacaggcaggaggaggtggttcagtgatccttgctcccagtggagcaacgtcaacattgtaagacctggtcctcaagctgagaagttccgaacatatataaaccagattatggaagaatcaaagtcaggcaacaactcttgcaagcaatagcggttgaagcattgagattgtctcattttgcacagaggagaggagcgaactccccatgtctcgagaacttcctggcatctggttcgggagcaagcatttttgcacctgttatatgaacacacggccaagtgacgcagtgccccttaactgcaggagtttagtgagctaatgagctgtggatgtgaacaatggcaaattggcagtacagcatccctacacttcgtaggatctgtttgcatgaattgtgtggccttcaatggtatccctgctccagtgtagtccagtgtggaaggctactgtatccatgtcgaaacatgctaggttacaatggattaaaatgtgcagtaccagtagcgtttgatgcagcaatctatatatgaattgcaatggattctgcaaaa

SEQ ID NO: 145532 - DNA, 1482 bp, Zea Mays
ataacattgcctttttatgtgatacacggtaattattgtaacttcatctgtgttatgtgctgcttccactatgtcgcacttagttcacaccctttcttatgaagtctaattttgttttttaatagatactagcatgttctagttttgcttttggcttgtgtattccgactgacacctcttaggggttcttgagtttcgtgttcatgattctctgttttctttttgtcttttgtcccttgctgcagacttgatccatgttttctcctctgttccaaggcacctcaactttattgatcacaccagtgacattggatggaaagagtatgttctgtctaaacatagcaatagtgaatggtacacagtgcactgctgttagtttcagcagcatacttattttgcaggtctcagagagtgcagccgattatagtagatgctggagtgtatttggcagggaggaatcagttcttccaagccacagagaaacgggacactcctgatagtttcaaatttttcacaggttctccatgggtcattttaaacagacgctttgttgagtattgtatttttggctgggagaatctccctagaacactcctcatgtacttgacaaacgtgatgctacctctcgaggggtatttccattcggttgcatgcaactcggacttccgcaatttcacagtgaacaacgacttgcggtatatgatttgggacaatccacctcagatggagccccatttcctaaatgttacacattacgatgagctagtagggactggggttccttttgcccggaagtttaaggagaatgaacccttgttggacaagattgatgatcaagtgcttcgacgatggcatcagagacctgttcctggtgcgtggtgcacaggcaggaggaggtggttcagtgatccttgctcccagtggagcaacgtcaacattgtaagacctggtcctcaagctgagaagttccgaacatatataaaccagattatggaagaatcaaagtcaggcaacaactcttgcaagcaatagcggttgaagcattgagattgtctcattttgcacagaggagaggagcgaactccccatgtctcgagaacttcctggcatctggttcgggagcaagcatttttgcacctgttatatgaacacacggccaaggtgagagatgggtctattctttccggaatttttttggtgtcatggcttcaagggcttagtgcacactagcattactggaagccaagagagcttactgtgggaatacggaagctaataggcattgtaattagtagcggtgagttgaatgaccggtgcctttgtttatagaactggtggaattgttggcgcttccatacagaattgagaaaatgaagaactggggatgttattgattggttggtcatggctgtggctgttgtggacacgtgtggttaatacaatgctttactgattttcccaccttgacatgaagtttattct

SEQ ID NO: 145533 - DNA, 1411 bp, Zea Mays
gatggagtgaagtctttttcggaacttctctcttcattcacgcgacatgacttgtttgctcgttcaagccatccatagaccgtagcccgtgttgggttggggccagaaggggcttctgtagttctgttcttgtgcttgtggttaccaccgaccgagctcacgttctgatcgtttcccagttccccaaaccgaacaagatgatttggtacactgcagctggcactactacactcgagtaaggggaggagatggctggacagagcaaaaggggcacgcagtcgcagctggacaacggcgagcaggtccacaacggcaagaaggcgagggcgcaggccatgcccgacggcgtggtcaagcgggagcagcaagagacaggcgaggcagcggatgagggacaagagcaggaggaaggggaggttagccaaggcggcggcgcgggggccatggaggaggcgcagatcagtttgaggttcgggctcaccttgttccactgccgatcttgcctcctccccctcaagcctccaacgttcaagtgcgaacacgggcacgtgatatgcggcgtctgccgcaatagccacgcgcaggtgtgccgcggcgccgtctactcgccgtgcgtggaggtggacgccttcgtgcgcgacgccaagcagccgtgcccgtacgaggagttcgggtgcaagagcgccgtggtgtacttcgaggcggcggagcaccagcgcgcgtgcccctgggcgccctgctcgtgcccggccccgggatgcggcttcttcagctcgccagcgaggctggccggccacttcacgggcgcccacgcctggcccgtcacggaggtaagctacgggaagccgttcagggtcgcgctgccgccgccgcagggctggcacgtccttgtgggcgcggaggaccggtgcgtgttcctggtgtccgcgtgcgcgctcggcgtgggcgcggccgccgcggtgtcgctcgtgtgcgtgcgggccaacggcgacgcggcggacggggcgccccagttcaggtgcaggctctgggcggaggccgccaacagcaaggagagcgtggtggtgatgatgtccatggtgaagagcagccgcttgtgcgggggtgctggcgcgttctcggccgccgaccagggcatgttcttcgtgatgccaccggagatcatggacgacgcgttgggcgagacgcccgccgtcatggttcgcatcgacagagcaggcgctgctgccagaagctctagctctaggagagtagctgagtaggaggcattgcatgtaattaggcgctgctgccatgagtgccttgaacacgagaatgcattgcaagtgcaagggatctgggccatgacatgatgcaccactggtacagaaatacctatggtacgtaacttgtgactgtttgttgggggaga

SEQ ID NO: 145534 - DNA, 2204 bp, Zea Mays
atgcgttgtagtgtagcggagcggagcagagcagagcaggtgagagagaggaggagcgtcgccgagccattcttaaatgtgagcgggcgggggtaagtgaggtgagtagagtagtagtggcttggcttcacctgctactgcaacggaacaagaacagaaccaccatcactcctccgctcttcaccatcagctgccgcttcctctcttttctccccccagtagccagcagtctccgtcactctctcacacacacaaaagcagcgacttgctcacagtagtgctccacggacagaatgaccaaagacgacgagttcaagctggtcaagatccagaaccatgtgctcaaggtgaacatacactgcgacgggtgcaagcacaaggtcaagaagctccttcagaagatcgaaggcgacgtggactcggagaccttgatcaggaagctcaccaggggcggcaagcacgcggagctgtggtcgcagcacaagggcggcagtgcccagcagaagcagcaggcccagcagcaacagcagcagaagcaaggtggcaatccgagcaaggatgggcacagcaagagcagcaacaacaacggcggccagaaaaaggaccaggggaagcaaggaggaggaggaggggttggtgggggcctcgtgcagggcctcaaggcgttcaagaaccagcacggcggcaacaagcagcaccaccagctccctgagctcctcagctcggaggacgatgacggcatgttcgacgacgatgacggcgagttcgacgacgactacgaggaggagctccggttcctcggggacaagatgagccagctcgggctccacggcaacggcaacggcaacaaccagcaccaccatcagaacaagaacgggaacaacgtcgtcgctgtcaacagtaaccacagcaatggcaagaagggtaacggcggcgctgcagccaatcgccaccagagccagaaccagaagaacgtgaatgtggtcaacgtggcagcagcgaatggcaagatgggcggcggtggaggagtccagaaccacaagaacgctaacgcgatcaacatggcggcggcggcgaacgccaagatgggtaatggcgcccagaggaacgctggcgccatgggtggcattggcatgctgggcctaagccatggcctgggagcgggcggcgctgctgctgctgctcctcctcctggcttccagcaaggctacgcaggcttcaaccacccgccctatgccgctgctgccggctatggaggaggtctacagcagcagcagcagcatctccagcaccaccagcagcagcagagtaacagcctcatggcgagcatgcaggggtaccatcatcaccagtaccctgccgcgacggccgccgtggtgaacaacttgaggggcctgaacggcaacatggtgatgatgcatcagcaccagccgcagccgcagccgcaggcccagatgatgtaccactcgtctccccagatcagcagcccttacaccggctactacaacccttacaattactactaccaccaccacccccatcccggcagcgctgggtaccctgccaccgccagcaacggggatgtggagagcatgttcagcgacgagaacaccaagggctgtgttgtcatgtagggcgggacgagaacaccattcctgctacctttctttctctctttcgtttctttttcattattttactgctcttatggttttcgcctgtatcaagagtgaatcatggtgttgacttagatgtgttgttgaaagtaggggcaacttgagaggggtgaccaaacagtggaatgtacaataggagtgccttttaggcttttttactgcctagcgatttgccctggctggcttgttatgatctgtgtactatatcgtaagatctgggtgttttgggttttggacttgtgtgctgtgccaatgcccaccatctgagtggtgatcgactgttagcagtcaacattggaggaagcttgcaaacctgtaaacctggagatgaagagaacccctaagcattttcctcgaaagagagttacgagcctgctgaaaaaccaaagatccaagccatgatcaagtcccatgcatgatgaaaagtgtgtggctggtaaaggtggttgaaaatgaatgcctatcattatggctgtggctcccttcatgaagggacgcattggtccctaaaccaaaaaaaaaaaaaaa

SEQ ID NO: 145535 - DNA, 385 bp, Zea Mays
attcttaaatgtgagcgggcgggggtaagtgaggtgagtagagtagtagtggcttggcttcacctgctactgcaacggaacaagaacagaaccaccatcactcctccgctcttcaccatcagctgccgcttcctctcttttctccccccagtagccagcagtctccgtcactctctcacacacacaaaagcagcgacttgctcacagtagtgctccacggacagaatgaccaaagacgacgagttcaagctggtcaagatccagaaccatgtgctcaaggtgaacatacactgcgacgggtgcaagcacaaggtcaagaagctccttcagaagatcgaaggcgacgtggactcggagaccttgatcaggaagctcaccaggggcg

SEQ ID NO: 145536 - DNA, 2187 bp, Zea Mays
attcttaaatgtgagcgggcgggggtaagtgaggtgagtagagtagtagtggcttggcttcacctgctactgcaacggaacaagaacagaaccaccatcactcctccgctcttcaccatcagctgccgcttcctctcttttctccccccagtagccagcagtctccgtcactctctcacacacacaaaagcagcgacttgctcacagtagtgctccacggacagaatgaccaaagacgacgagttcaagctggtcaagatccagaaccatgtgctcaaggtgaacatacactgcgacgggtgcaagcacaaggtcaagaagctccttcagaagatcgaaggcgtgtactcggtggccattgatgtggacaaccacaaggtgtcggtgacaggcgacgtggactcggagaccttgatcaggaagctcaccaggggcggcaagcacgcggagctgtggtcgcagcacaagggcggcagtgcccagcagaagcagcaggcccagcagcaacagcagcagaagcaaggtggcaatccgagcaaggatgggcacagcaagagcagcaacaacaacggcggccagaaaaaggaccaggggaagcaaggaggaggaggaggggttggtgggggcctcgtgcagggcctcaaggcgttcaagaaccagcacggcggcaacaagcagcaccaccagctccctgagctcctcagctcggaggacgatgacggcatgttcgacgacgatgacggcgagttcgacgacgactacgaggaggagctccggttcctcggggacaagatgagccagctcgggctccacggcaacggcaacggcaacaaccagcaccaccatcagaacaagaacgggaacaacgtcgtcgctgtcaacagtaaccacagcaatggcaagaagggtaacggcggcgctgcagccaatcgccaccagagccagaaccagaagaacgtgaatgtggtcaacgtggcagcagcgaatggcaagatgggcggcggtggaggagtccagaaccacaagaacgctaacgcgatcaacatggcggcggcggcgaacgccaagatgggtaatggcgcccagaggaacgctggcgccatgggtggcattggcatgctgggcctaagccatggcctgggagcgggcggcgctgctgctgctgctcctcctcctggcttccagcaaggctacgcaggcttcaaccacccgccctatgccgctgctgccggctatggaggaggtctacagcagcagcagcagcatctccagcaccaccagcagcagcagagtaacagcctcatggcgagcatgcaggggtaccatcatcaccagtaccctgccgcgacggccgccgtggtgaacaacttgaggggcctgaacggcaacatggtgatgatgcatcagcaccagccgcagccgcagccgcaggcccagatgatgtaccactcgtctccccagatcagcagcccttacaccggctactacaacccttacaattactactaccaccaccacccccatcccggcagcgctgggtaccctgccaccgccagcaacggggatgtggagagcatgttcagcgacgagaacaccaagggctgtgttgtcatgtagggcgggacgagaacaccattcctgctacctttctttctctctttcgtttctttttcattattttactgctcttatggttttcgcctgtatcaagagtgaatcatggtgttgacttagatgtgttgttgaaagtaggggcaacttgagaggggtgaccaaacagtggaatgtacaataggagtgccttttaggcttttttactgcctagcgatttgccctggctggcttgttatgatctgtgtactatatcgtaagatctgggtgttttgggttttggacttgtgtgctgtgccaatgcccaccatctgagtggtgatcgactgttagcagtcaacattggaggaagcttgcaaacctgtaaacctggagatgaagagaacccctaagcattttcctcgaaagagagttacgagcctgctgaaaaaccaaagatccaagccatgatcaagtcccatgcatgatgaaaagtgtgtggctggtaaaggtggttgaaaatgaatgcctatcattatggctgtggctcccttcatgaagggacgcattggtccctaaaccaaaaaaaaaaaaaaa

SEQ ID NO: 145537 - DNA, 2335 bp, Zea Mays
aaaaaagaatataaataaaaaataatatcatacatatacatttaaatagcctccaccactcccttctcgcgacctcagaatctcacggcatcacgcgaagcaaggagaaagaaaatggcgcagctggtggagacgtacgcgtgctcgccggcgacggaacgcggccgtggaatcctcctggccggggaccccaagacggacacgatcgcctactgcaccggccgcagcgtcatcattcgccgcctcgatgcgcccctcgacacttgggtctaccccgaccacgcctaccccaccaccgtcgcccgcttctcccccaacggcgagtgggtcgcctccgccgacgcctccggctgcgtccgcgtctggggccgctacggcgaccgcgcgctcaaggccgagtttcgccccctctcgggacgcgtcgacgacctccgctggtccccggacggcttacgcatcgttgtctccggggacggcaagggcaagtccttcgtccgcgcattcgtatgggactctggcagcacagttggtgagtttgatgggcactcaaagagggttctgagctgtgacttcaagccaacacgtccatttcgcattgtgacatgcggtgaagattttctggctaacttttatgaaggaccgccattcaaattcaagcattccataagggatcactcgaattttgttaactgtatccggtatgctcctgatggtagtaagtttatcactgtgagttctgataagaagggtttgatatatgatggtaaaactggagaaaaaataggagagctttccactgaaggcggtcacacagggagcatatatgctgttagctggaatcctgacagtaaacaggttctaacagtttctgctgataaatctgcgaaagtatgggatatctttgaagatgcaagtgggaaattgaatcgaactttggtttgccctggtataggaggtgtggatgatatgcttgttggttgtctctggcagaatgatcatctcgtgacagtctctcttggtgggacatttaatgtgttctctgcaagcaacccagaccaagaaccagttacatttgcaggacatttgaagactgttagttctttggtcttctttcctcaaagtagcccaagaactatactatctactagctatgatggtgtcatcatgaggtggatattgggtgttgggtttggtgggagactgatgcgcaaaaacaacactcaaataaaatgctttgctgcagtagaagaagagcttgttacctcaggttatgataataagatcttcaggattcctcttaatggaaaccagtgtggagatgctgagtcagttgatgtaggtggtcagccaaatgctttgaaccttgcacttcaaaaacctgaatttgcactggtcactactgattctgggattgtattgctgcacaactcaaaagtcatttctacaaccaaagttaactataccatcacttcatcttcggtgtctcctgatgggacagaagctgttgtgggtgctcaagatgggaaactgagaatctattccatcagtggtgatacacttacagaagaagctctgcttgagaagcaccggggtgctatcacttccatacattattcaccagatgtttctatgtttgcttctgctgatgccaacagggaagctgttgtgtgggatcgggccagtagagagatcaaactgaagaacatgttgtaccacacagctaggataaactccctggcttggtcaccggacagtcgattggttgccactggctcactggacacctgtgcaattgtctacgagatagacaagccagtagccagtcgcgtcactatcaagggagctcatctgggtggagttcatggtttaaccttcctggagaatgatactctggtgactgccggcgaggatgcttgcattcgtgtttggaaggtggtggagtaataggttactcattattctggtgtgcattgagaatgtctttgctattcattggaataaacttctttctttttctgtgcttgttggtacggttgttgttacctgacaggtcatagcatcgttgttgccttctcagcgatttgtgctctaaatttcctttacaattcttttttgagttgtattatttttgcctttttccccgaaagaaagactcctttgtaagtgtatctccgcatctgattttgtcaggaactgtgagaatatagggatactactgttgcttttctcccctatgtcttgaaatagtcggtaataactggcttcgctgtggtgctagttttcatgaatgttgactgtgctttcatatacttattatatataacctacctctatc

SEQ ID NO: 145538 - DNA, 1655 bp, Zea Mays
actgtagcagcattttacttctggcacctaggatgcgtatttcacatttttcaattcactttgcatttcagggatcactcgaattttgttaactgtatccggtatgctcctgatggtagtaagtttatcactgtgagttctgataagaagggtttgatatatgatggtaaaactggagaaaaaataggagagctttccactgaaggcggtcacacagggagcatatatgctgttagctggaatcctgacagtaaacaggttctaacagtttctgctgataaatctgcgaaagtatgggatatctttgaagatgcaagtgggaaattgaatcgaactttggtttgccctggtataggaggtgtggatgatatgcttgttggttgtctctggcagaatgatcatctcgtgacagtctctcttggtgggacatttaatgtgttctctgcaagcaacccagaccaagaaccagttacatttgcaggacatttgaagactgttagttctttggtcttctttcctcaaagtagcccaagaactatactatctactagctatgatggtgtcatcatgaggtggatattgggtgttgggtttggtgggagactgatgcgcaaaaacaacactcaaataaaatgctttgctgcagtagaagaagagcttgttacctcaggttatgataataagatcttcaggattcctcttaatggaaaccagtgtggagatgctgagtcagttgatgtaggtggtcagccaaatgctttgaaccttgcacttcaaaaacctgaatttgcactggtcactactgattctgggattgtattgctgcacaactcaaaagtcatttctacaaccaaagttaactataccatcacttcatcttcggtgtctcctgatgggacagaagctgttgtgggtgctcaagatgggaaactgagaatctattccatcagtggtgatacacttacagaagaagctctgcttgagaagcaccggggtgctatcacttccatacattattcaccagatgtttctatgtttgcttctgctgatgccaacagggaagctgttgtgtgggatcgggccagtagagagatcaaactgaagaacatgttgtaccacacagctaggataaactccctggcttggtcaccggacagtcgattggttgccactggctcactggacacctgtgcaattgtctacgagatagacaagccagtagccagtcgcgtcactatcaagggagctcatctgggtggagttcatggtttaaccttcctggagaatgatactctggtgactgccggcgaggatgcttgcattcgtgtttggaaggtggtggagtaataggttactcattattctggtgtgcattgagaatgtctttgctattcattggaataaacttctttctttttctgtgcttgttggtacggttgttgttacctgacaggtcatagcatcgttgttgccttctcagcgatttgtgctctaaatttcctttacaattcttttttgagttgtattatttttgcctttttccccgaaagaaagactcctttgtaagtgtatctccgcatctgattttgtcaggaactgtgagaatatagggatactactgttgcttttctcccctatgtcttgaaatagtcggt

SEQ ID NO: 145539 - DNA, 786 bp, Zea Mays
atggctccccgacctggacgcacggtgactgtggttccacgatccggagtagtagtggtggttcccaggtcggatctcgcaattggaatagaggtgctgtttggttcagacgttgttaagggaaatgataatgagatctcttaccggtgcgaaccaaacgccaccatagtattactagaaagagctcaaccaaacaaaagtatcgatatccattacctagatgtggacgatttctgcagcttgtgcgacccagataaggagaatttgtgcctctacggccttcccaacgggagctgggaggtgtcgccgccggcggaggaggttcctccggagttgcccgagccggcgctcggcatcaactttgcgcgcgacggcatgctgcgccgcgactggctcacactcgtcgccgtccactctgactcgtggctcatctctgtcgtattcttctgtgactcgtgggtcattttcatgcatgtggttcttgccaatgcagctgctctcagatttgaaatgcacaaacttacggaggtggttaaagctaacgaaaaaatgttgattgcagcaggaaactttgttatacccttctataaacacaacaccttccatgaatcacaaacaaacatgaagaatcaattgatcagtgcgtggatcaaaattttggctagaatagtaggtgggacagacactgatgggacacctattattgcagtgattgcaaagttcatggatatattaactactggacttgttacaaccccattatcttgcaacactaaattacattga

SEQ ID NO: 145540 - DNA, 330 bp, Zea Mays
tatttttagcttaaagagctagagaaaatgggtcctaaaaagggagtgattagtcagtctgtgaaagatgtggtgcaaggcctggtggatgatgatcttgtctagaaggacaaaatatttttttgacattgtgttaatttattagtgattcaaaaataatttcttgtattacccaacagcttgctcttgcatataaccgaacctttatatatattgtctgtgctacaaacaaatatattttgttcataaccttttcgtctctaactcctagcctataatagttttcttgcaggtgtacttttggagtcttccaagttgtgctggaaccag

SEQ ID NO: 145541 - DNA, 5060 bp, Zea Mays
gtccccacgtttgcctcttctcgacttctcctgtagggctgttcgtgttttttctgctttcgcctttttcccagcatttttttcctctcctgcgcctcgccaccgcttcctcttgtcgcccgcctctctcatcgaccctaggcgcgccgcctcgccgccgccgatcccgcagccgtcgatcctggccgctccgatagccggtcagtccgtccccatcatcccctcgctatcgatcgcctccgacttgcgtggttttccggcgcttgcacggccgcgacgcgactactcttggagtcatagttcgtggattgtcaatcgaaaggtatctgctggccgattaggcttttacccgtgtctcgattcggttccggagagtgctgcagttgctggggctggatggcggatgcccgcatagggcgcagattaattatgccttactaggccgactgttagtttagcttggttggattggggtttcgtggaattttagatgtgtgattgcttacagactcttgagtccggcatattgggctgctagtacatagaataaggtgtttgtttgatttgggttggcaagaacaatagccatgttagattagcaattgaactttaagctgaaagagtatgtgcaccatgctcacttcagcctgttaggttgcttgttgcagctcttgctttcaatgcctataaggctataattgcctattcttcaattataaccagcatgtgtggtttttcccctcaaattttataaaagtcttcaactcatatccgttttttgctgaaatatgtaattgttttcttgtctattttcatgagtggttgaaacaatgcccatgtaatgtttatgatcatacaaggttatttacatggttaatatattgaaattcaattgtttccatgactgttactgctattttatcttcatgaattaagttattcctatgtttacagtttcagcattatttcctgatgaaactatcactaagtacacatcgatgttctatagttcttgagctccttgtaattttaatgcatataaaagtttgtgcaaactacatgctcacaaaataaaatgccatatatatgcaaataaatgcattatagatttctgtggcttcttgatgatttatgaatttaggattataatacataagtaaaacaacatataggtctatttttcagtaaatatttactattttactgcactcccacgatacttcaatggaactgcattgctggagctaggaccctgcattgcatgtacgttccacttgttccttgtgttaaggaaaagtattgtttgttaggaaactaggtacaactcattggcttacttttaaaattctagcagtaaagcaattggtgatctgcgtacttttgtggaaatgtttgcatatgccatatgttaagactttcgaatttgtttttctcccaagtttcatgcttagcctcatgtttcttatcttaaacatgttctacgtgtttcacttgaatagagggctacttgattgtttggaatctacttttatagttgattccaagcatggaaagtctaccaaatggttcagtaaacaatgcggagcataaccaggaaaacaagaagtccatggatgctagtgtgcctgaagaagtacaagatgtttttatttacagagaagatgttgtgagcttgaagtccaaggaggatgtccgtggattagttttagaggtagctggggaatatgattctgaaggtagcatcactgatgatgatattgatactgaggaacatgaagataaaactgttcgtggagcagaaaatggtgctgctgatggtgataatgctagtaatggagctgaagttgaaagccagagttctttgccggataacaaagttcgagtgttatggcttgatgatagtgaaaaaacagaagacattgatgaggtagttgttgttgatagaagtttccttcatggtgatttagttgcctctgcctcagatccaactggtcagatggggcttgttttggatgtcaatcttgtggttgatttgcaaggtgtgaatggcgatatgataaagggtgtttcttccaaggatttgagacgaatcagggaattcaatgtgggtgattatgttgtctctgggctatggcttggtcgagttgatgaagtgctcgatagtgttaatgtgctttttgacgatggctctgtctgtaaagtcaatagagcagatcctatgtgcttaaagccagtatttggcccaatgcatccagatacagattgtcctttttatccaggacagcgtgtgaaggcagtgtcatcatctgttttcaaaacatcaaggtggcttaatggattgtggagagcaagtcgtcttgaaggtactgtcacaaaagtggaaagtgtttctgttatagtctattggattgcatctgcacactttgcttcagatcagcaacctgttcctccagagaagcagaacccaaaggaccttactcttctgtcttgtttctcttatgcaaactggcaattaactgactggtgtcttcctcaccgatacactttatgtactaatgataccgtgattaattctgataagcatacaggtcagatctgtacatgcccagaaagctcagttccactgtctgatattccagaatctcaagctgatgttcagactgaacaagatcaaatgactgatacagatgcaggtcataggcaaatagatgttgattctactgcagatggattgagtatgtcggacggagataattcatgcatagccaaagaatcagaaactagtgtatcaagcattctaaaggagccacaggacaatgcaacatctaggaaaaagcttaggaaagtgtccctaaaaaaacataaaagaacgaaaaaaagagacgacagctttgagcgagctctactcattgcaaatacttgtaccaaagttgatgtaatctggcaggacgggacaaaggaatgtggggtagccgcaacatcgttgattcctatccacaatccaaatgaccatgagttcttccctgagcagtatgttgtggacaaggtcacaaatgatgttgatgattcttctgaaccaaggcgtgtgggtcttgttagaagtgttagtgctaaggaccgaacagtaactgtatcatggtttaagccttcgctacatccagaggagacaaagaatatcgtgtgtaatgaaattgtgagtgcatatgaactggatggccatccggattatgattattgctatggagatattgtcgttcgcttgccgcctgtctcacctgtaattgaatcaaccaataacaaggatcaaatggaactagataggacggtcgatgcctcggaaggatttgctgcctcaaatgatgcaccctctaatactagtgcaagtgaacaacttttgcagaaggaatcctgctcgcagtttacaagcctctcatgggctggaaatatagttggctttcaagacggtgagattgaagtcatttggggtgatgggtcgatttcaaaggttgggcctcatgaaatatatgttgttggccgtgaagatgatgatgcctcactagatgacggaacagcctctgatggtgctagctgggagactgttgatgacaatgaaatggatgtacttgatgattctgcaaaggatgattcacaaagcatacctgagaatagcattgaaagggaagatggttcattcagctcccagaatggaagttctgttgcaactggtcccctttcagttgcttttgggtttgtgacccgactagcgagtgatctcttcgctcgaggtagaaggcatttagatagatcgtcaaactcggatgctatggatgaagttgagtctcaccagtctaatgaagtttcagaaactagtgatgacattgataagattaatgagaataatgtggaatcgccagaggatgctgcagtaatagaaaacgattcttctgtcgagaagtctgtagatgtggtcatggctgataatcttgtagatttggaatgtttcaaacactttgatattctgcaatgtcctccagaccaccattaccttgaaaacatagcccagggcacgggtggaagaaagtgggtaaaaaaagtacagcaggaatggagcatacttgagaagaacctaccagactatatttatgtcagagtctttgaggatcgcatggatctcttgagagccgtgattgttggagcaagtggaacaccctaccaagatggcctgttcttctttgatttctaccttccacctgagtatccgcaagttcctccgtcagcatactaccattctggtggtttgcgtgtaaatccaaacctgtatgtggatggaaaggtttgcttaagtctcttaaatacttggaccggcagagggaacgaagtgtgggacccatcatcatcaagtattctacaagtactggtttcacttcagggattggttctcaatgaaaaaccctattttaatgaggctgggtacgagaagcaagttggtactgttgaaggggagaagaatgcagtgccgtataatgagaatacgtacctgctgagcgtgaaatccatgctgtatatattgagacggcctcctttgcattttgaggattttgtgaagagccatttccgcaagcgtggccactacatccttaaagcctgtgaggcatatttgcaaggaaatgttgttggcactctcactgacgacgcatgcaccaccaacagaagcacggagcactcgagctctgtcggcttcaagcttgcactagcaaagattttaccaaggttgattacagccctgaaggagcatggagctgattgcgaccaatacgagcaccttggcaaaacagaccccgttagagagagctgatcattgagtgacttgtacttggatcttttgccttttatatctgttcttttttcgggtttcagaaaagatggtgacttaataccaccaggctgttttcgtataaatgtacattcaaagtttgttgtttccgtcaaacatttggaaaatatggccccaaatgatttattcgatacatggaaccgagctaccctgtgcagttgatgtt

SEQ ID NO: 145542 - DNA, 3809 bp, Zea Mays
gcgcctcgccaccgcttcctcttgtcgcccgcctctctcatcgaccctaggcgcgccgcctcgccgccgccgatcccgcagccgtcgatcctggccgctccgatagccggtcagtccgtccccatcatcccctcgctatcgatcgcctccgacttgcgtggttttccggcgcttgcacggccgcgacgcgactactcttggagtcatagttcgtggattgtcaatcgaaagagggctacttgattgtttggaatctacttttatagttgattccaagcatggaaagtctaccaaatggttcagtaaacaatgcggagcataaccaggaaaacaagaagtccatggatgctagtgtgcctgaagaagtacaagatgtttttatttacagagaagatgttgtgagcttgaagtccaaggaggatgtccgtggattagttttagaggtagctggggaatatgattctgaaggtagcatcactgatgatgatattgatactgaggaacatgaagataaaactgttcgtggagcagaaaatggtgctgctgatggtgataatgctagtaatggagctgaagttgaaagccagagttctttgccggataacaaagttcgagtgttatggcttgatgatagtgaaaaaacagaagacattgatgaggtagttgttgttgatagaagtttccttcatggtgatttagttgcctctgcctcagatccaactggtcagatggggcttgttttggatgtcaatcttgtggttgatttgcaaggtgtgaatggcgatatgataaagggtgtttcttccaaggatttgagacgaatcagggaattcaatgtgggtgattatgttgtctctgggctatggcttggtcgagttgatgaagtgctcgatagtgttaatgtgctttttgacgatggctctgtctgtaaagtcaatagagcagatcctatgtgcttaaagccagtatttggcccaatgcatccagatacagattgtcctttttatccaggacagcgtgtgaaggcagtgtcatcatctgttttcaaaacatcaaggtggcttaatggattgtggagagcaagtcgtcttgaaggtactgtcacaaaagtggaaagtgtttctgttatagtctattggattgcatctgcacactttgcttcagatcagcaacctgttcctccagagaagcagaacccaaaggaccttactcttctgtcttgtttctcttatgcaaactggcaattaactgactggtgtcttcctcaccgatacactttatgtactaatgataccgtgattaattctgataagcatacaggtcagatctgtacatgcccagaaagctcagttccactgtctgatattccagaatctcaagctgatgttcagactgaacaagatcaaatgactgatacagatgcaggtcataggcaaatagatgttgattctactgcagatggattgagtatgtcggacggagataattcatgcatagccaaagaatcagaaactagtgtatcaagcattctaaaggagccacaggacaatgcaacatctaggaaaaagcttaggaaagtgtccctaaaaaaacataaaagaacgaaaaaaagagacgacagctttgagcgagctctactcattgcaaatacttgtaccaaagttgatgtaatctggcaggacgggacaaaggaatgtggggtagccgcaacatcgttgattcctatccacaatccaaatgaccatgagttcttccctgagcagtatgttgtggacaaggtcacaaatgatgttgatgattcttctgaaccaaggcgtgtgggtcttgttagaagtgttagtgctaaggaccgaacagtaactgtatcatggtttaagccttcgctacatccagaggagacaaagaatatcgtgtgtaatgaaattgtgagtgcatatgaactggatggccatccggattatgattattgctatggagatattgtcgttcgcttgccgcctgtctcacctgtaattgaatcaaccaataacaaggatcaaatggaactagataggacggtcgatgcctcggaaggatttgctgcctcaaatgatgcaccctctaatactagtgcaagtgaacaacttttgcagaaggaatcctgctcgcagtttacaagcctctcatgggctggaaatatagttggctttcaagacggtgagattgaagtcatttggggtgatgggtcgatttcaaaggttgggcctcatgaaatatatgttgttggccgtgaagatgatgatgcctcactagatgacggaacagcctctgatggtgctagctgggagactgttgatgacaatgaaatggatgtacttgatgattctgcaaaggatgattcacaaagcatacctgagaatagcattgaaagggaagatggttcattcagctcccagaatggaagttctgttgcaactggtcccctttcagttgcttttgggtttgtgacccgactagcgagtgatctcttcgctcgaggtagaaggcatttagatagatcgtcaaactcggatgctatggatgaagttgagtctcaccagtctaatgaagtttcagaaactagtgatgacattgataagattaatgagaataatgtggaatcgccagaggatgctgcagtaatagaaaacgattcttctgtcgagaagtctgtagatgtggtcatggctgataatcttgtagatttggaatgtttcaaacactttgatattctgcaatgtcctccagaccaccattaccttgaaaacatagcccagggcacgggtggaagaaagtgggtaaaaaaagtacagcaggaatggagcatacttgagaagaacctaccagactatatttatgtcagagtctttgaggatcgcatggatctcttgagagccgtgattgttggagcaagtggaacaccctaccaagatggcctgttcttctttgatttctaccttccacctgagtatccgcaagttcctccgtcagcatactaccattctggtggtttgcgtgtaaatccaaacctgtatgtggatggaaaggtttgcttaagtctcttaaatacttggaccggcagagggaacgaagtgtgggacccatcatcatcaagtattctacaagtactggtttcacttcagggattggttctcaatgaaaaaccctattttaatgaggctgggtacgagaagcaagttggtactgttgaaggggagaagaatgcagtgccgtataatgagaatacgtacctgctgagcgtgaaatccatgctgtatatattgagacggcctcctttgcattttgaggattttgtgaagagccatttccgcaagcgtggccactacatccttaaagcctgtgaggcatatttgcaaggaaatgttgttggcactctcactgacgacgcatgcaccaccaacagaagcacggagcactcgagctctgtcggcttcaagcttgcactagcaaagattttaccaaggttgattacagccctgaaggagcatggagctgattgcgaccaatacgagcaccttggcaaaacagaccccgttagagagagctgatcattgagtgacttgtacttggatcttttgccttttatatctgttcttttttcgggtttcagaaaagatggtgacttaataccaccaggctgttttcgtataaatgtacattcaaagtttgttgtttccgtcaaacatttggaaaatatggccccaaatgatttattcgatacatggaaccgagctaccctgtgcagttgatgtttccgttgaacttgcagg

SEQ ID NO: 145543 - DNA, 115 bp, Zea Mays
gggaccacccaaacgtcttagtggtccagaaattctcgcaagacttaatgatttgaaactaaacgaacatggaaatcgctttgaacgttatggaaccgagcataattggactcac

SEQ ID NO: 145544 - DNA, 795 bp, Zea Mays
gcatcgatcgggtaaggctcagctcagctagcatatttgagtttctctcgtgctctagctactagcaacctcgacatcaatggcttctggtgccgccgccccggttaagatgtccactgcagtgactgcctgcatcctgctggcggtcctgctgcccatggcgcccaagctagtaatgggtgattgttccggcagttgtgttaccctttgcgacacctttgctgatgggttctgcacgggcaacgccgaccccgccttttgtccaccggaagtgcaggagcaatgcaagcccacggttttcacagggtgtatcactgaatgcaacacactctgcgctacaagcggattcgctccttgcgctgcttgatgagaaagtatggtttgcggcagaataaaggtgagtgcaagagcagccagcaggcctcttccccatgcatacgcacactgcagcgcgagctgagggaggaagcatgcaataagcttccacggtgatctactacctactatatcccacatttccttactacattttcctttgtttaattcagtcaagattgtgtcgttcagaggccagcatgcatggggtgcgtacgtattattactagtattattgtatgcatatggaaaagtgcactgtgctagcttgtgtacgtgtgccaattctgtgcatgcatgtgtggtctttcagtgtctactctagctagtaggcatatgtcattgtcatgtaatctctcgatgagggaatttgtattgaaataaatcatattaaaaacaatatatttcgttcctttatgc

SEQ ID NO: 145545 - DNA, 227 bp, Zea Mays
cttaaatcggccgtaacttgtgctaaataacatggataccatttttgcattcacgattttacatttttcgagtgacttacagtttaaatctgaattatccgagaaaattcaattaaacgaacaaaatctaatagttatagaaaatactttttataattgtggtaaaatggaacttgtatgtctacatagtgtaggaacataccacaaaaaatttggttgaaaaaata

SEQ ID NO: 145546 - DNA, 516 bp, Zea Mays
tcagctcagctagcatatttgagtttctctcgtgctctagctactagcaacgtcgacatcaatggcttctggtgccgccgccccggttaagatgtccactgcagtgactgcctgcatcctgctggcggtcctgctgcccatggcgcccaagctagtaatggatgacgtttgttccgaccgttgtggtaccctttgcgacacctttgctgatgggttctgcacgggcaacgccaacgaccccgggctttgtccaacggcattggaggagccatgcaagcccacgcttgtcacagggtgtaccgctgaatgcaattcattctgcactacaggcggattcgttccttgcgctgcttagcttgatgagattgcatgcatgcgcattcataataagtattattgtttgcacactgcagcgtgaactgagggaggaagcatgcaataagcttccacgatgatctacgtactatcccacatttccttactatatcttcctttgtttaattcacagtcaagatt

SEQ ID NO: 145547 - DNA, 1054 bp, Zea Mays
cccgtccttagagcctcaaatccgatgccccctccctaagccattccctcggccgcgacatcaacgaaaacgagcatggcccccctctacctcctccaccttgccgtttatggcctccgcactgccccaacgtcgacaccttcgtcctccccctctactcccagtgcaccgccgccgcgtatgcgctatcccacccgatggacgtgttgccgcctctgcagcacgccctgtcgctgtcgaccccacccagccatgcatttggagtttacaatgtggagacatgatttatccaccggacgacgaggttggtgcgcggatggcgagggaggacctccactgggcctactccacacctcttcctgtctaccgaggtcgagcacatggaggacctgctccgctgtcgggcactcctgagccagcgactacaaaatccactctggctctctacttcaccctccatattacaatatgtactttgtatatgtgagatgagacacccaagcagtcaaactaaacactattgtccaatcccctcttccaaattcattacaatcctattagcatgcaaagatttaatttgatgcaatgttttgatttgtactacgtttttactagctttgcagatgcttcagaaggttatggtcagtgacttttttcttttcagatttgttagaatagacacagaaatttagatttctctcctgtaatgttgttagcattggtcttaattttatttgttgttgttaggagaggatttgattatcatgatcagtacaagatatcaatcattaaatagcgaattcactctaatttctagccaccatttttctaagtaccatgttgctgctctctttccgctggatgaacatttgaacagtggcaccgaatagtgatcttatagtgctggcccgcaacacatggggtgcttctgttcttttacccattgaaatgttatggatcttttttctaatctaagattagaagtatggtcgtgatactattttgctataatctatgaatgtttttctgtaaaaaccaatctgtttttgcttta

SEQ ID NO: 145548 - DNA, 1899 bp, Zea Mays
ttacaatatgtactttgtatatgtgagatgagacacccaagcagtcaaactaaacactattgtccaatcccctcttccaaattcattacaatcctattagcatgcaaagatttaatttgatgcaatgttttgatttgtactacgtttttactagctttgcagatgcttcagaaggttatgccgtgatggcatgggaggctggcaagtcgattctttgtatatagttagtagtacaaaactatatgctatgagggtccagagaaattgatgatgaggagcagctagaggtcgtggtggagaagggctagagaaagggatgacgagggacagttgcaagttgtggtggagaagggcgacgaccccatgacaacatggggtgaatttctatatcagttgccaatcataagaaacaaatcttattattgcactccagggccagatgctattattgttggctatatcagacagtttgtcatcaagcctttgtctggattcctttttggcactcttatggagtactaagccacactgaagaatttgggcttaagagtgaggttttgaaggtgactcttgcaactgacgtcgtgaactgagtgtgaatatctactggatgggcaagcaagtttccaaccccatgccctcccatcgattctgctgcctgatccggctagagtttattaggactcgcaactacctcggagttcactgctgtaaatatgggtaacaccctaccagtgcatgatatgtcggaatccacaggtaaaatcgaatctatgttgcttcaaaagttactcccttttgtctgttcttggctagaacaaggtctggtcaaaataagaatgttttttgttccattttagttggagtttgggttttcaaatctgggccagattagttggatttaataatttggtttctaaggtgcagcagccataggatctcccaacaaggaggatcttgcaacaatgacattgatcaagaattggatgttggaaattatggtttggcattgttacttctcttactcctgtttcatgtcccaatctgaggtgactcgtgttggtaatcatgtaatttttccttcgtgcttctattcttcctatacgctttaggcatggcatgttgtgcactaacattttgattaacaatacaacacatggtcatacatatggtattgttgcactatttttttgttgcaacgcacgggtattcaaccagggcatctcagattgggagtgggaggaggatgaggagatgatttggtgctaccagggacaggccccatctcctagaaatggatcttcctcctttgcatgggcaacttgtgcatcgggctactcttcaccaacagaaaaccatcactgagaaagagcagttagcaactggtgttgtcgtgttgcgactcaaaagggcttgcctatgggcatccacataggagccatccccaaatgctgactgaccaaatgttcggtatgggagccacaaatagcagcacgatgggaatgcagcagcagcagcagcaaggggtatacgggaacatgcaggcaggtgcacagaacgtgcaaagtatggtgggccttcagaaccagacccagaatcccaacttcactcagcagattcaacaaaaccaacaatgattcaacactaacggtcatggaggttgaaagatgagcaatatagccatcgttttgctatttgtctgttggtctttactcagcttatctgtgagactgatagtagccccaggttgatagccttcgtttttctgtaaatcaatgtagatgcatcgccattagcgagatgcaggtcaattatatacgttgtaactgtgttttggatatgtgaatagtgttacgtgtgttccttttatttataattaagcctcgcagcaaggccgac

SEQ ID NO: 145549 - DNA, 1786 bp, Zea Mays
ttacaatatgtactttgtatatgtgagatgagacacccaagcagtcaaactaaacactattgtccaatcccctcttccaaattcattacaatcctattagcatgcaaagatttaatttgatgcaatgttttgatttgtactacgtttttactagctttgcagatgcttcagaaggttatgccgtgatggcatgggaggctggcaagtcgattctttgtatatagttagtagtacaaaactatatgctatgagggtccagagaaattgatgatgaggagcagctagaggtcgtggtggagaagggctagagaaagggatgacgagggacagttgcaagttgtggtggagaagggcgacgaccccatgacaacatggggtgaatttctatatcagttgccaatcataagaaacaaatcttattattgcactccagggccagatgctattattgttggctatatcagacagtttgtcatcaagcctttgtctggattcctttttggcactcttatggagtactaagccacactgaagaatttgggcttaagagtgaggttttgaaggtgactcttgcaactgacgtcgtgaactgagtgtgaatatctactggatgggcaagcaagtttccaaccccatgccctcccatcgattctgctgcctgatccggctagagtttattaggactcgcaactacctcggagttcactgctgtaaatatgggtaacaccctaccagtgcatgatatgtcggaatccacaggtaaaatcgaatctatgttgcttcaaaagttactcccttttgtctgttcttggctagaacaaggtctggtcaaaataagaatgttttttgttccattttagttggagtttgggttttcaaatctgggccagattagttggatttaataatttggtttctaaggtgcagcagccataggatctcccaacaaggaggatcttgcaacaatgacattgatcaagaattggatgttggaaattatggtttggcattgttacttctcttactcctgtttcatgtcccaatctgaggtgactcgtgttggtaatcatgtaatttttccttcgtgcttctattcttcctatacgctttaggcatggcatgttgtgcactaacattttgattaacaatacaacacatggtcatacatatggtattgttgcactatttttttgttgcaacgcacgggtattcaaccagggcatctcagattgggagtgggaggaggatgaggagatgatttggtgctaccagggacaggccccatctcctagaaatggatcttcctcctttgcatgggcaacttgtgcatcgggctactcttcaccaacagtgttcggtatgggagccacaaatagcagcacgatgggaatgcagcagcagcagcagcaaggggtatacgggaacatgcaggcaggtgcacagaacgtgcaaagtatggtgggccttcagaaccagacccagaatcccaacttcactcagcagattcaacaaaaccaacaatgattcaacactaacggtcatggaggttgaaagatgagcaatatagccatcgttttgctatttgtctgttggtctttactcagcttatctgtgagactgatagtagccccaggttgatagccttcgtttttctgtaaatcaatgtagatgcatcgccattagcgagatgcaggtcaattatatacgttgtaactgtgttttggatatgtgaatagtgttacgtgtgttccttttatttataattaagcctcgcagcaaggccgac

SEQ ID NO: 145550 - DNA, 1384 bp, Zea Mays
gcttgtgttccctccgcccagaactcccgaaaccagcccaacaccaaagctcattccacgaggcgacaaccttccttccataagaacagagcggccacgctgaggagtgaggaggaaggtaggaggagaaccgtgagcagagagacatggcgcgccaccaccagcagcgggcgctgctcctgttcccactcgtcttcctcctcctcctccttgccccgcccctcgccggcgcgtggggaaaggagggccacatcatggtctgcaagatcgccgaggtcgcgcccgattccgccctatgaaagttgggtcgaattgtagacagcagagctgggcgagcgctccttcctggaattctgatggatgcctctttgcgcggcgtgcagaagtacctgtcggagaaggcggcggcggcggtgcaggcgctgctgccggagtcggcgggcggggagctgtcgacggtgtgcccgtgggcggaccaggtgcgctggcactaccactgggccagcccgctccactacgccaacaccccccaagtctgcaacttcaagtattctcgggactgccacaattctcgtggccagcaagggatgtgcgtcgtcggggctatcaacaactacacggaccagctctacagctacggccagaagacttcgtataacctgacggagagcctgatgttcctggcacacttcgtcggcgacgtccaccagccgctgcacgtaggcttccaagatgacgagggcggtaacaccatcaccgtccactggtaccggaggaaagcaaacctccatcacgtgtgggatgtcagcattattgatacggcgatcaaggacttctacaacaagagcatggataccatggtagaggctctcaagatgaatcttacagatggatggtctgacgacatcgtccactgggaaaattgcaagaacaaacacgcgacctgcgcgaacgactatgcgattgagagcatccattattcctgcaactacgcctacaaagatgtggagcaagacatcactctaggagatgattattttttcagtaggtacccgattgtggagaagaggttagcgcaggctggaatcagattggcgttggtacttaatcggatatttggtggaggtgaagcggatgatataccactacaagtacagtaacagctctaataaaaggaagcatagctattacaaggatttgtccattacgtcgtctatacatcaataaattggcatgaatttgtaactccattgctatacatcaataaattggcatgaatttgtaacaactgaaaggatcaagatgccacccttgaattgcacttctcaaaatttcttgaacaaaataaaatttataatcaagttcaactttatctcttctgact

SEQ ID NO: 145551 - DNA, 1232 bp, Zea Mays
caaagctcattccacgaggcgacaaccttccttccataagaacagagcggccacgctgaggagtgaggaggaaggtaggaggagaaccgtgagcagagagacatggcgcgccaccaccagcagcgggcgctgctcctgttcccactcgtcttcctcctcctcctccttgccccgcccctcgccggcgcgtggggaaaggagggccacatcatggtctgcaagatcgccgagaagtacctgtcggagaaggcggcggcggcggtgcaggcgctgctgccggagtcggcgggcggggagctgtcgacggtgtgcccgtgggcggaccaggtgcgctggcactaccactgggccagcccgctccactacgccaacaccccccaagtctgcaacttcaagtattctcgggactgccacaattctcgtggccagcaagggatgtgcgtcgtcggggctatcaacaactacacggaccagctctacagctacggccagaagacttcgtataacctgacggagagcctgatgttcctggcacacttcgtcggcgacgtccaccagccgctgcacgtaggcttccaagatgacgagggcggtaacaccatcaccgtccactggtaccggaggaaagcaaacctccatcacgtgtgggatgtcagcattattgatacggcgatcaaggacttctacaacaagagcatggataccatggtagaggctctcaagatgaatcttacagatggatggtctgacgacatcgtccactgggaaaattgcaagaacaaacacgcgacctgcgcgaacgactatgcgattgagagcatccattattcctgcaactacgcctacaaagatgtggagcaagacatcactctaggagatgattattttttcagtaggtacccgattgtggagaagaggttagcgcaggctggaatcagattggcgttggtacttaatcggatatttggtggaggtgaagcggatgatataccactacaagtacagtaacagctctaataaaaggaagcatagctattacaaggatttgtccattacgtcgtctatacatcaataaattggcatgaatttgtaactccattgctatacatcaataaattggcatgaatttgtaacaactgaaaggatcaagatgccacccttgaattgcacttctcaaaatttcttgaacaaaataaaatttataatcaagttcaactttatctcttctgact

SEQ ID NO: 145552 - DNA, 1414 bp, Zea Mays
accatccgatatataccccgtcctccacttctgttttccctcgatctccttcaaaataaaccgccattgcatcatagtgttcatctgtcactccaccatgaggcaagacgggagcccattggacctcaacaacttgccggaggagtacggcaagcaagcggcagagagctccacgaccaccgccacatcaagcgttcatgcagttattagtaaggaactacagcactaatattctcttgtttgttttgaagtcgaagcagttgtagttctagttgcgtcatgaaaggaagtcctgcaattttgagcagcaatgcagttttagctttcttaaagttctgcgcttttaacattctcggctacatatacctagctatatatagtttgcacaactaatatgctaggtgagttgatgccaaggattcctcgtgaatgatctacagtgtcatgaacaaaatattctactcactttctacactttgtagtgcagattgcagaaggccgggactgatcgatgtatgtgtgtgcagggccaaagaagacgaagagcggtagagggaaggatgctgctgcgaaggtgtatgagtgccggttttgctccctcaagttcggcaagtctcaagcgcttggtggccatatgaaccgccatcgacaagagagggagactgaaacccttaaccgtgcccggcaactcgtcttcggcaacgagagcctcgccgtcgccgccgtcggcgcgcagatgagtttcagggatgtaaatatggcaggtgctgccccaccgaccgtactcggagtcggagggaacttccggggaggcgccgccggtggcggcagcatcggcgacctgtgcgtcccgttccggccggtgctgtcgccgcagccttcgtaccattacctctacacggcgccatcaacattgcacccgatgagctacccggcgacgtaccctggcccactgcgccagcctgctgtcgacgactacatcatcggccacgcagtctccgccggcggggacacactaatgcaatcgacacaccgcggcagcttctcctgcttcggagctccactcaccgctccgccggtggcggcaacgaacgtgcaggccgacaaagttatctgcaactgcagcttcacttgaatgcctccggccggctccacttgagcagatgcatgtagttaagttagtgtaaagagccaagaatttaaattagatgttgcgtgttttggacattaaatacagaatgaagtcttccgggttctacttcgaagtatatgatgtctgcactggatttctggatccaaactatatctttagctttgcatgaattgttagttatttcggtactcagtacaaaacgtatttcacagcggatgtttggaaaagtgtttagtcaatctcttatttcaggaaaaaaaa

SEQ ID NO: 145553 - DNA, 2104 bp, Zea Mays
gccactttctctcgaacgaacaaagcaggcggcgcggctggtctggtcgccgtgtctgtctgggggtgcaccatcatcggcggttcgatcgaccggtccgtctcttcgtccagccacaagaaccagggagcttcctctctgacagggcgcctctcctcgagagtcgagaagaaccacactctctcggtctcggtgctcggtagatgcgcatgcgcaatgcgagcggcagcagctggtgttcccgcgtggcggtgctgcagcaagtgcttggcgcgcaggcttctcctcatggcttcggcgtcggcgccggcgccctgcacctgcagcggctcggtgccgctaccgccccggccggcgtggagtctgcagatgacgcagtgatgccgccggcgccgccgccgctcctcttccgcgccctcgcgtcgctcaacctcctcctgctcgtcggctacctcctgctcgtcctcctcgccaagctcttcgcccgcctgcaccaccgcagggccgccgccgaggaccgggcaagtagtggttggtatgatggccgccgctgcgaccaccgccgccgccgcgcggaagccacggccaccgatgacgaagagtacgccgccgcggataccgtcgaagggcagcaaccggacgcgctgttctggttcgacgaggccgtgttcgaggacagcgctgccctgctgatgcttggcgacgaaggaaaggatcaccacctgtacgctgccgcttctacacgttgcttgcagcaggtggagagcacgagcacctttcccgcggaggaatctgcccgcatctcgccgcgcaccgagagccccagccccagcagcatcgatgcggagcgtatgcagcgagcgcaggaagaggaagaggccaagggcatcgtcgccgtccagcatgccccgacgacgacggtcgtcctggaaccggaacagcggagtgcccctgctgctccggtcgtcgtcgccgtaccaccggagcatgtctccatcgaattagggaacaagcagcaggaaagcgacggaggagaagacggccgtcgcgacgccgacgccgaccgtgccgagcacgaagaggaggctgcgcccccgccgcagggggggaggtttcctcaaggctgccatgacgtcaggctgttcgtcaacagccgcgcgctcgccgacaccaggaagctcctgctggaaggcgtggtggccggaggaggagcgcacgggcggctgcaggacgagagcggcaaggacaggaacggcggggacagcagccgcttcggcgcgtcgtcgacgctgacgagcgagtccacgtccaagagctcggtggagtggcagagctcgacgctgaccaaggactcggagacggagtaccccttctcgtcctcgtcgcgccggagctcggcgcgctgggagtcgtacacgctgttccgcaagtacgacgaggacatggtctacttccaccgcgtcggcgcccagaagctcaccgaaacagagtcgttccggtccatcaagtaccagccgcggtcgatgtcggagcggatcgtgcacaggctgacgacgcccaagccgccgacgccgagcgccgctatcgggctgcgggacccgtacccggagctggagcgcgcgtacgtggcgcaggtgtgcctgacgtgggaggccctgaactggagctacaccagcttccggcggcgcaacggcggcgacggcaacctggcggcgcggtgctgcccggcgcgcgtggcgcaggagttccagcagttccaggtgctgctgcaccgcttcgtcgagagcgagccgtacgagtgcggccggcggccggaggtgtacgcgcggatgaagaactccacgcccaagctgctcctcgtgccggagttcagagacgaggatgacgagaaggacgatctgatatcggcggtccagttcctgctcatactggaggagtccatcaggacgttcatggcgttcctccgcgccgacaagaggagccggtacgagatgttcagggagatggtgaagaagaggagggcgagcgccgccgtggaccagacgctggtcgtcacgctcaagaaggccaacaagaaaaagaagaggcggctcaaggacctgac

SEQ ID NO: 145554 - DNA, 2162 bp, Zea Mays
gccactttctctcgaacgaacaaagcaggcggcgcggctggtctggtcgccgtgtctgtctgggggtgcaccatcatcggcggttcgatcgaccggtccgtctcttcgtccagccacaagaaccagggagcttcctctctgacagggcgcctctcctcgagagtcgagaagaaccacactctctcggtctcggtgctcggtagatgcgcatgcgcaatgcgagcggcagcagctggtgttcccgcgtggcggtgctgcagcaagtgcttggcgcgcaggcttctcctcatggcttcggcgtcggcgccggcgccctgcacctgcagcggctcggtgccgctaccgccccggccggcgtggagtctgcagatgacgcagtgatgccgccggcgccgccgccgctcctcttccgcgccctcgcgtcgctcaacctcctcctgctcgtcggctacctcctgctcgtcctcctcgccaagctcttcgcccgcctgcaccaccgcagggccgccgccgaggaccgggcaagtagtggttggtatgatggccgccgctgcgaccaccgccgccgccgcgcggaagccacggccaccgatgacgaagagtacgccgccgcggataccgtcgaagggcagcaaccggacgcgctgttctggttcgacgaggccgtgttcgaggacagcgctgccctgctgatgcttggcgacgaaggaaaggatcaccacctgtacgctgccgcttctacacgttgcttgcagcaggtggagagcacgagcacctttcccgcggaggaatctgcccgcatctcgccgcgcaccgagagccccagccccagcagcatcgatgcggagcgtatgcagcgagcgcaggaagaggaagaggccaagggcatcgtcgccgtccagcatgccccgacgacgacggtcgtcctggaaccggaacagcggagtgcccctgctgctccggtcgtcgtcgccgtaccaccggagcatgtctccatcgaattagggaacaagcagcaggaaagcgacggaggagaagacggccgtcgcgacgccgacgccgaccgtgccgagcacgaagaggaggctgcgcccccgccgcagggggggaggtttcctcaaggctgccatgacgtcaggctgttcgtcaacagccgcgcgctcgccgacaccaggaagctcctgctggaaggcgtggtggccggaggaggagcgcacgggcggctgcaggacgagagcggcaaggacaggaacggcggggacagcagccgcttcggcgcgtcgtcgacgctgacgagcgagtccacgtccaagagctcggtggagtggcagagctcgacgctgaccaaggactcggagacggagtaccccttctcgtcctcgtcgcgccggagctcggcgcgctgggagtcgtacacgctgttccgcaagtacgacgaggacatggtctacttccaccgcgtcggcgcccagaagctcaccgaaacagagtcgttccggtccatcaagtaccagccgcggtcgatgtcggagcggatcgtgcacaggctgacgacgcccaagccgccgacgccgagcgccgctatcgggctgcgggacccgtacccggagctggagcgcgcgtacgtggcgcaggtgtgcctgacgtgggaggccctgaactggagctacaccagcttccggcggcgcaacggcggcgacggcaacctggcggcgcggtgctgcccggcgcgcgtggcgcaggagttccagcagttccaggtgctgctgcaccgcttcgtcgagagcgagccgtacgagtgcggccggcggccggaggtgtacgcgcggatgaagaactccacgcccaagctgctcctcgtgccggagttcagagacgaggatgacgagaaggacgatctgatatcggcggtccagttcctgctcatactggaggagtccatcaggacgttcatggcgttcctccgcgccgacaagaggagccggtacgagatgttcagggagatggtgaagaagaggagggcgagcgccgccgtggaccagacgctggtcgtcacgctcaagaaggccaacaagaaaaaactatgcgttccgtgtatgatggatgggatgtggtggccggccggcgactgttcagaagaagaggcggctcaaggacctgac

SEQ ID NO: 145555 - DNA, 2242 bp, Zea Mays
gccactttctctcgaacgaacaaagcaggcggcgcggctggtctggtcgccgtgtctgtctgggggtgcaccatcatcggcggttcgatcgaccggtccgtctcttcgtccagccacaagaaccagggagcttcctctctgacagggcgcctctcctcgagagtcgagaagaaccacactctctcggtctcggtgctcggtagatgcgcatgcgcaatgcgagcggcagcagctggtgttcccgcgtggcggtgctgcagcaagtgcttggcgcgcaggcttctcctcatggcttcggcgtcggcgccggcgccctgcacctgcagcggctcggtgccgctaccgccccggccggcgtggagtctgcagatgacgcagtgatgccgccggcgccgccgccgctcctcttccgcgccctcgcgtcgctcaacctcctcctgctcgtcggctacctcctgctcgtcctcctcgccaagctcttcgcccgcctgcaccaccgcagggccgccgccgaggaccgggcaagtagtggttggtatgatggccgccgctgcgaccaccgccgccgccgcgcggaagccacggccaccgatgacgaagagtacgccgccgcggataccgtcgaagggcagcaaccggacgcgctgttctggttcgacgaggccgtgttcgaggacagcgctgccctgctgatgcttggcgacgaaggaaaggatcaccacctgtacgctgccgcttctacacgttgcttgcagcaggtggagagcacgagcacctttcccgcggaggaatctgcccgcatctcgccgcgcaccgagagccccagccccagcagcatcgatgcggagcgtatgcagcgagcgcaggaagaggaagaggccaagggcatcgtcgccgtccagcatgccccgacgacgacggtcgtcctggaaccggaacagcggagtgcccctgctgctccggtcgtcgtcgccgtaccaccggagcatgtctccatcgaattagggaacaagcagcaggaaagcgacggaggagaagacggccgtcgcgacgccgacgccgaccgtgccgagcacgaagaggaggctgcgcccccgccgcagggggggaggtttcctcaaggctgccatgacgtcaggctgttcgtcaacagccgcgcgctcgccgacaccaggaagctcctgctggaaggcgtggtggccggaggaggagcgcacgggcggctgcaggacgagagcggcaaggacaggaacggcggggacagcagccgcttcggcgcgtcgtcgacgctgacgagcgagtccacgtccaagagctcggtggagtggcagagctcgacgctgaccaaggactcggagacggagtaccccttctcgtcctcgtcgcgccggagctcggcgcgctgggagtcgtacacgctgttccgcaagtacgacgaggacatggtctacttccaccgcgtcggcgcccagaagctcaccgaaacagagtcgttccggtccatcaagtaccagccgcggtcgatgtcggagcggatcgtgcacaggctgacgacgcccaagccgccgacgccgagcgccgctatcgggctgcgggacccgtacccggagctggagcgcgcgtacgtggcgcaggtgtgcctgacgtgggaggccctgaactggagctacaccagcttccggcggcgcaacggcggcgacggcaacctggcggcgcggtgctgcccggcgcgcgtggcgcaggagttccagcagttccaggtgctgctgcaccgcttcgtcgagagcgagccgtacgagtgcggccggcggccggaggtgtacgcgcggatgaagaactccacgcccaagctgctcctcgtgccggagttcagagacgaggatgacgagaaggacgatctgatatcggcggtccagttcctgctcatactggaggagtccatcaggacgttcatggcgttcctccgcgccgacaagaggagccggtacgagatgttcagggagatggtgaagaagaggagggcgagcgccgccgtggaccagacgctggtcgtcacgctcaagaaggccaacaagaaagtgagtcgactcgaccacgcattgcgttgcgttgcgttgtgtggtaaattaaatcagtttaagtattctaattaaaaaagaaactatgcgttccgtgtatgatggatgggatgtggtggccggccggcgactgttcagaagaagaggcggctcaaggacctgac

SEQ ID NO: 145556 - DNA, 636 bp, Zea Mays
gtttcgattcctggcctagactgatatgtctttgactatctaattgtaactctgtcccctttttagccctaccaaagatgcttagtcacagaggggcacaggtcttttgggctcacagttgcagctgttcgctcttttggatgatcgttgtgtactgcttttgtatccaagctgctatgtacatatgctttcggaaggatatatgatacacgttcatgtccacacgctcgatacaggttggcccagagcagacttaacaaggttactactagatcggtgttcgccatcgatgctatgcataggccacgctggatttctatgcctgttgacgtgaacgtgcttcgctcccttcatgtttaagcctaagcagcttgatgtgcttgtgccaaagactttttaagaactacgcaataaaccaacgcttacaacacgcttttgtatacaatgatcatctgcttgttgcaccgtacatgtatagtctatggagctgcagactgttagagttatgtaatgttgtactgatcaccgtttcgtaactgcatgtacactgtcttttagagacagttgtagaacctgcgtccgcgccatatgtattatattatcgtattgtatccttcaatatgtttgtgttcctac

SEQ ID NO: 145557 - DNA, 888 bp, Zea Mays
atcacaccgcacgaggccacgacacactctcatcacacgcacggaccctaccccgtccccgcccgcctcggaggccggggcaaaacaccgccaggcagcccagccccagccagccatgaagcgaaccagagcgcagcagtccaaggcggaggagccgcaggacccctccgccgccgccgcggccaacccaaacccaaaccccaagccgcagcagcgccgggccaagcagccgaggcagcccaaggcaggcgccagggcgaggcccgccgcggcaaatgccgcgccttcttcgcccgggccggagacggcgccggccgtgccggacgcgcgcgccgtggactgctgggacctcgacgccgggctgagcgcggcggcggcctggtggacgtggggcgtcgacgaggacaagctgctcggctggttccccttcgtggaggaggacttccggtgcgccggcgccggcgcccgctcctgcgaggccgaggccgaggcggctgcgttcgaccacgacatttggagcatctggtgaaccgagccggtggcggtgcttttctgttgcgctgttcttgctctctgccgacggtagtgtcttggtacaagagcgcgcgggaggatgtgtagtaggcgaggtagctagtcgactggtagatgcgatggtgtgtgcatgtcggcgttggtccaactccattgatcgcgcacactgtctctgtctcccgggccgggcagacgtgcttggttctgtgcctgaacaacggcggcaatttccatccgagcacgtcagcaccaaaactcgtgtgttgatttgacattttaggcaggcattgtgtgctacgggattgcaattcgcagttcacccaagctgggcatgtgatcaacacgttggaggtc

SEQ ID NO: 145558 - DNA, 1106 bp, Zea Mays
gaccaaaccaaaccgcgcgagcgatttttgcggcaaaccccctgcgagaaacgtcgtccgcagagccacccaccacgggcagggctatataagccggcccccccaactcggcgtcgctgcgcaaaacacctcgccttttgtactcttgcgtctctgccctcgcgttatcgccttcgtcacgctcgctcgcctggctggcttgtgccttgccttgctcggcgtacgcgaacgcagcgagagggaggagcaaggaaatagagagagacagagagagagagagaaaaaatcaagtcatccccctttcctctgagctcgttccatggagaactcttctcacaagcgggcgcgggaggcgggcgacctcgtcgccggcggctgcggagaggagggctcgccgcaggccgacgccaagaggctgcggccgcaggacctgctcgacatgctggaggacgacaccgacgcggccgcggccggcgacctagcgtcggtcatgcggagcctggaggaggagatagccagcttcgacgaggccgcggaggcgccggcgccggcgccggagctgggcttcctgctcgaggcctcggacgacgagctggggctgccgcccgcctcctcttcggaggaggaggaggccgggcgcgcgggggcgccgttcccgcccgcgctcgacggccagatctggggcttcgaggacgagatcgtggacggaggcggcttcggcggctactcgccggaggccgcggccgcggccgctgcctccgccgccgccgccgcgtgggacgacgacggcttcggcgccggcctcttcgcgttcggcggcgacgacgcgtgtggcccgtcggatctcgcggccctgcgccacgagaccatgcccgccgtctgatggccatccccagggcccaggcagccgcagccagtcgattagccttccttttttttatttttacctttgttggctaaccttagcgagcgggcacccatttttttgacctggatgtaaagtttttagaagggtgaaaaaacagggggcgtggaaaaaacttgggaggaaggttcagagcaaggggagaagaagatcaaaaaaaaaatctggagatggattcttc

SEQ ID NO: 145559 - DNA, 785 bp, Zea Mays
ccagttaagcaggagtggtacctggtggttttttgtttttcaaaaagaagacagaaatgtcttcctcgaggcctgcccactcttcaagttcatccagcaggactcgccagagctcccgggcaaggatattagcacaaacaacccttgatgctgaactcaatgcagagtacgaagaatccggtgattcctttgattactccaagttggttgaagcacagcggagcactccacctgagcagcaagggcgatcgggaaaggtcatagcatacttgcagcatattcaaagagggaagcttatccaaccatttggttgcctgttggcccttgacgagaagagcttcagggtcattgcattcagtgagaatacacctgaaatgcttacaacggtcagccatgctgtgccaaacgttgatgatcccccgaagctaggaattggtaccaatgtgcgctcccttttcactgaccctggtgctacaacactgcagaaggcacttggatttgctgatgtttctttgctgaatcctatcctggttcaatgcaagacctcaggcaagccattctatgccattgttcatagggtaactggttgtctggtggtagtttttgagcctgtgaagcctacagaatttcctgccactgttgctggggctttgcagtcctacaagcttgctgccaaggcaatcttcaagatgcagtcctactcagtttttatctatatcttaaacacatacctgcttttcttccgagaatccactaggatatgcccattttgcattgtcaaatag

SEQ ID NO: 145560 - DNA, 133 bp, Zea Mays
cgaaagctccatttgtagttttggtaatagactaaactatgttatatgtgttgtgaatgagatagagaactgttatccactaggttccaatggtctgctaccatgagtcctatttaattggcccatggatgtc

SEQ ID NO: 145561 - DNA, 1953 bp, Zea Mays
agtcgtcaccaatagtaacagctcaatgacttgttcataatgtcttgacaagcattaccaaataacagaaaaaacacaaccactataacttaacataatgtaacctatcaaaattacctctccggaagctaatgtgctgtttgggaagaagagaaatcttgggcccgagcagactgaaatgcccgagggaaaaacccaagacaatccccccttccaagcacgcttatcaaaccatcaaccctaacatattaaggcactgacttaattcacacgcagaaatcaacggtttgcaggaaatcgtccatgccgcggccgaggtcgcagccaggcatctccgggaagacgtcgttgatatcgtcgaggtcgaggtcgatctccagttcctcgtccccgaagtccccaagcagcaggtcctgctcatcgtccaggccgaagggcgcatcggagacgtccagagcgtcaagcccggcacggaagtccatcgggctgatgtctggcagctgcaggccgcggagaaggtcctggtagaactccgggtcgtccggcagctccgcggactcatcggacggcaggacgagcgttggtgtcgcgaccagctccggggactgcgggttcagcggcgcctccttggtggcgggtccaagaacagacgacggcgacgggtgcgcgaacggagcagtcgaggtggacgacgaagaggaggccgtcggggtggcgcttgccgaaggaactggtgaggaagagggcacaggctgcccgcggcggcggcgcttctcgtcggcgaagctccgggaagcggataggtaggctgcggaggccgcgccggccgtgtcgaaggtgccaagccactgcctcttgcccgtgaacgggttgcggatctccgccgcccacttgccccacttgcggagcctcactccgcggtagctctccggggccccgccactggcgcacgcggcgacagcggccgccggaaggaccggcctggctgggaccttgccgacgaacgtctcgaaggagaagcgcttggccttcgccgggcacgtagaggcgccggcctcctcgtcgtcggagtccgagtccgtggcgtcaggatcctcgaagagaacccggacgcggcgcctcggctgggccggggcaggcgccggctgctgcggccgggacttcaggagggctgcagcggagggtttaaggccaaacctggacatcctcttagctttgggtttcttcgccagggccttcttgaggagaacatgctgctggtggttcaacggggccatgtctcttgtatctcctctgccggggagaactccagccaaaactacggggaaaagcttctgaagaaaaaaaacaaaaaaactctggcgcaaaaatataacggagacgagcgcaaatcggtcgaatccgtcagtctcctctacagaaacggcacggccttgaggacgaatccgtcagtctcctctacagaaaccgcacggccgtatgtggaggaatccggaatacttgaccccgaacccgtccctgcaaccacaagagcagatttttttttgtcaaaacccatggaaggagcagccacgaactccccagatctggacgaacagggccacaaaacccggtcaaaaacctcccagatcggcgaaaacacggaggaaaaagagagcggggggcacggacctgagcatcgacgaggatttgttccatccgttgagccccttgcgcatagatcggctggagcaggcgagggagcggaggaggaggaggaggaggccggcgacgacgggggcgatgagcgctacgacgaccagatcggagatggggcaagaaggcatatacgagagctggctacttgttctttcttctcctccgacgccggcaccgtccgtcgtcgtcgcctccgtcccggcctccctgaacactcgcttaaaccccgacccaaagcggcgacaggagcaaaag

SEQ ID NO: 145562 - DNA, 1200 bp, Zea Mays
gccagacccagtgaataaaagtgccaagaaacaggcgttcgtcgccgaagaaaactactgctcatattctttgcatctgtgagtgagcgaggtagggagagtgtccttgggtaggggtcggttccaacatttggtaccagagctaggatggagacgccgctggcaaaggatggcctcaacatgttcgacggcatgggctcgacgagtgccgcgatggagcgcgtcatcaacagcagctcctttgagctcccattgctgaccaaggcgaattaccacgagtgggcgttggttatgaaggtctcgctagaggcgatggaactgtgggacgcgatggagaccgtgtgcaaggagcgtcccaaggatcggcgggcaatggccgccatcctgcgcgcagtgccgccgaagatgaaggcggggctcgccatgaagaagaagacgaaagaagcgtgggaggcggtgaggtcgatgaggatcggcgatgaccgggtgaaggtcgtgagcgtgcaacgcttgtggaaagagtacgagaacgtcggctttcgcgatggtgagagcgtcggtgacttcgcgttgcggatcaacggcctcgtcgcaagccttcgagagatgggcgagacgctggaggaccaccgcgtcgtccccaagcgtctcaagcaagtggccgtggcgattgagatgctcaccgacctcaacacgacgacgattgaagagcttgtcggtcgactccgcgtggcggaggacgcagacaacgacgacgcaaagcaggctattgtggagggcgttgaacaactgctgctcacggaggagcagtgggaggcacgtcgtcgacaacgcgggaaggagcatgcacgcggcggaaatgggcgtcgcgggaatggcggcggtaatgaccatgacaatagtgacgacgacaccagcagcacactctcgagcatgagcaggcgcggcaaaagacactatcgcgggcgctgcttcgagtgcggcgagcgggggcacatggcgcgtgactgtcgcgcgaagaagaaagagaaggcactccttgtcaatgtggaggacgagccgacgttgctgtaatggcggaacacgacttgtcgtgtttagggggagtttgttggaaaataaacacatcatgtgtgtgatgtacgtgagtgcgtaacgcgtagagtgtttaggtgcagctcgtgtatgtacgtgtgtgtc

SEQ ID NO: 145563 - DNA, 1803 bp, Zea Mays
tccgcagtccgcaccgcagccactgggcagacgaggagaagcttcgcggacgccatgtcctcgccgtcgccgctgtgcgccgcctcctgctccaccgctctccgcgcgccgccgccgcctctccttcgcttccgccgctcttatgctccggtagccgcctccgtgccgcgcacggcgcctgccgtctccgatgacctcgtcctacgcatcgccgaacagctggaggactcggtgacctccacctccccgctcctggaccccctccgctccgcctctgcgctctccctcctctccacacgctggcccactcgccgttccagcgaggccttccgcttcactgacatctcctacctccgctccctccccatctccctcccgtccagggagcccgacctcaagctgccgtcctcccctttctcttcccacgtgctcttttcggatggaatcctcgtctcttcctctggtgcccatgtcagcgccctcgccgatcttccccctggccgcgcccgggaccgcgccgccgccgcgctcgcggccgccgctgaattcgcccacaaggacctcttctatgacttcaacgccgttggggcgagggacgttgttgtcgtgcacgtgcctgagggggtcaaggtggccgacgacccaatacacatcatgttcgcctataccaatagcttcgctgagagtatgctgatgtcaaatccaagggttctagttgtggccgagaagtcagcagaggtggctatagtggaggagcattttggggctggagaagaaggtggttgctattgggccaatccagtggcagagattataattgacgagggcgcaagagtggttcattcatacgtgcaacatcaatcatttgctgcagcacatactaaatggacagtcgtccagcaggatacaactagtaagtatgagtttgttgaggtcagcactggagcaaaattgaacagacacaatctccatatcgagcaattaggtcctgagacagagacagaactatcaacacttcacttaacgtctcagaataagcagatacatgatctgcatagcagactgatacttgatcaccctagaggtttctcgcgacagctccataaatgcattgcttgtggcacaggaaatagcatatttgatggcaatattaaagtcaacaggtatgcacagcaaactgatgcggggcaagaaaccaagtgccttatcctatcaccaaaggcacttgttaatgtcaagccgaaccttcagattattgctgatgatgtgaagtgtactcatggtgccgccatcagtggtgagcttgatccaaacgagctcttctacttccaggctagaggcatcaacacggaaactgcaacagatgccctgttatacttctttggagcccatgtgataaagcgcataccgtttaagcaaataacagagaaggcattagcacagttcaaagagttgcttgcttcatccagacaaacaacggacgaggcccttcgttcgtgatatttgtttcagttagtttgacacattttggtgagatgagaaacatagcaaaggttagaagtatttctgccaaacaaggggaggatctgtaatcatattttgaaatgctgtaagcaatactactatatcttgcaaatgcagtttgtttgcaaaggcctgttcgtctctaccaagggaagatgatgtgattctgtgaacattctgaattatcgatgttgcattatacctgagtcgaatctgtcctcgaaaaaaattctataaagaaatagcacgaagtgatgcagctcggcagaacaaagaaaa

SEQ ID NO: 145564 - DNA, 919 bp, Zea Mays
cctcaacgcacaagccctctcaatatttattcatcagcaacgcccactattccatctatttttcctttccccccacggcccacacttgcatcgccgagagccgaggacgcacctccctctcgtctcgtcgcctcgcctcctcccttcccttcagcacgtcccacgcgctcctccctacgccgccgccaagggttgctcccgcaccacatccgagcgcgtcgcagccacgtcgcccacggccatggtgatctcggccgagccgcccccgccgcctcccccagatcccgtcgccgacgccgcggcggcggcggccacgtcgaacgcccgccaggcggcggccgcgttctcctcgttcccgtcgctcaagacgtgggggagccaccgggccctgcgctgcgcccacgtcaaccgcgccggcgacgccaccgccaccgccaccgccaggcgctcccccgggaagctcgccgccgttgccggagagaaggcgctggggaacctccacgaggtggaagcagggagcagcgacgcggaccacgtggcggccgcccccgccttgccaccgtggaagctgcgcacccgacgacggcgccccacgcccacggtggcggcgccgtccgcgagcacgtcgcgaacgcccgagcggaggccgtcgcgggcctgcgcggaggccctgggccgggcgcgcttctccgtggcgctcacgcgagaggagatcgaggaggacgtcttcgccgtgaccggcgcgcggccgcgccgtcgccctaggcggcggcctcgccccgtgcagaagcagctcgatatcctattccccggctcgtggctgtcggagatcaccgccgagacctaccgcgtgccggacggccggtgagagaccgcgtcgccggcccatcaaggagcaccgtggagccgtcgtcgtccc

SEQ ID NO: 145565 - DNA, 466 bp, Zea Mays
gacgttgtcgaagacccatttgctgcgggagaggtcacaggtgagcgggggcagcgcgaggggcggcaggccggagacgttgtagaggtcggcgtccgggtagaggtagtcgtcgatggagagctcggcgatggtgcgggcgtcctcgccgtacatgacgagcgcgaggaggaagaaggcggtggctagcgtggtgaccggggagcggcgcgccgaggcgaggagggagcgcgcggaggctgcaagcggatcgaggaggccccgggggcgaggggaggggcgagacgacgacttggggaccgacgaggtggttgtagcagtggtggggagcgcggggtcggaggtggaggtgggcggcggtggcttggccatggctgcggctggagactgctgctggggaagggaaggggatggctggctgcgggcagggagcgggggtttcgcggcggctgcgatgcgcgggcat

SEQ ID NO: 145566 - DNA, 1947 bp, Zea Mays
cccctggccactggcccctgcgtttcctatcgtttcggttcggcgcaggcgccgctaccgcctcctctcgaccgctcgccttcccgttcgccatgtcgttgctcgccgcggccattcccagcacttcctcccacttctccgcacccttcctcccctcattccacatgccccgcaagaacctcaccgccccactccaccggatccgccgtccgcggccgttcaccgtcgtctcctccgtcccagaccccgcggcggggccggtggaatacacgccctggctcatcgccggcctcggcaacccaggcaacaagtactacggcacgcggcacaatgtggggtttgagatggtggatcgcatcgcggcggaggaggggattacgatgaacacaatccagtccaagtcgcttctgggaattggttcaattggcgaggtgccagtcttggtggtaaaaccgcaatcatacatgaactacagtggagaggcagtgagttattcttagtccttctatgtggcattattagcttgtgaaatgtaagggacagtgatgttctttttttgataagggggcaatgatattttagttacttaaataaatgtttctatgagagcttggttacttgtggggatagttgcattccttacttaaacttgcaatatatttacatgcatttcattcttgtttggtatttgtaacctttgagaaagtagtggatacaacatgagcacaattttgaacttgtttatttttttggtttaaggagtggacatttgatgcctgttgatgcaaaatactgcctgttaggagtattaatatgaagtgcacaacaggcgaattggctatttatatcttcgatcaaagttgaggtttagtttattccattgtacggatatattattcattaatgagaaaccatttgtaacaaatgagtatagttagtttggttgaatgtgcagtacagcaaaagcatgtcaattatgttggtaatcttatgctttcattctgacttgcctacacttacaatttctcgtttccctcattcttgcaatattattgctaaagtgtcacacatcatgtcttgcaatgtgctactaagaaatgtcaagactaattgagatctgttatcatttataatgagttcactatcctaacctcacccgttgtcatgtgaagattggacctcttgcagcctattatcaagtaccattacggcacatcctcttgatttatgatgatacaagtctgcccaatggtgtactgcggcttcaaaagaaaggtggtcatggtcgccacaacgggctacagaatgtgattgagcatttggatggtcgcagagaatttcctcgtttatctataggcattggtagcccacctggaaaaatggaccctcgggctttccttctgcagaagttcagttcagaggaacgagtccagatcgacactgctctggagcaaggggtggacgctgtgagaacccttgtgcttaagggttttagtgggagtactgaaagattcaaccttgtgcagaagtacaagttccacagggtttgaatgtttgaggatctgtgaaatacttgggcttacttctgcaaacaacctgatacacatcaatatcatttgaagtgttggatgtggtgatttgctgttctgaactatgcatgagcttacaagttcgatgaatctgtttgttaatcagtatagctgacaattggcaaccttctattgttccttcggtttttgcataacactctaggatctggagaaacggcaaccagtacttagctccacttgactataatctgtagaagccagagataacttgtgatgtgatatatccaaataacaataagggggcttgtctaatacatcgaacaagatgtgatgttcgtcaaaggagtagttctgacttcagtttcaagacataaaaacatctaataatcgcacttcc

SEQ ID NO: 145567 - DNA, 1542 bp, Zea Mays
ccactggcccctgcgtttcctatcgtttcggttcggcgcaggcgccgctaccgcctcctctcgaccgctcgccttcccgttcgccatgtcgttgctcgccgcggccattcccagcacttcctcccacttctccgcacccttcctcccctcattccacatgccccgcaagaacctcaccgccccactccaccggatccgccgtccgcggccgttcaccgtcgtctcctccgtcccagaccccgcggcggggccggtggaatacacgccctggctcatcgccggcctcggcaacccaggcaacaagtactacggcacgcggcacaatgtggggtttgagatggtggatcgcatcgcggcggaggaggggattacgatgaacacaatccagtccaagtcgcttctgggaattggttcaattggcgaggtgccagtcttggtggtaaaaccgcaatcatacatgaactacagtggagaggcaattggacctcttgcagcctattatcaagtaccattacggcacatcctcttgatttatgatgatacaagtctgcccaatggtgtactgcggcttcaaaagaaaggtggtcatggtcgccacaacgggctacagaatgtgattgagcatttggatggtcgcagagaatttcctcgtttatctataggcattggtagcccacctggaaaaatggaccctcgggctttccttctgcagaagttcagttcagaggaacgagtccagatcgacactgctctggagcaaggggtggacgctgtgagaacccttgtgcttaagggttttagtgggagtactgaaagattcaaccttgtgcagaagtacaagttccacagggtttgaatgtttgaggatctgtgaaatacttgggcttacttctgcaaacaacctgatacacatcaatatcatttgaagtgttggatgtggtgatttgctgttctgaactatgcatgagcttacaagttcgatgaatctgtttgttaatcagtatagctgacaattggcaaccttctattgttccttcggtttttgcataacactctaggatctggagaaacggcaaccagtacttagctccacttgactataatctgtagaagccagagataacttgtgatgtgatatatccaaataacaataagggggcttgtctaatacatcgaacaagatgtgatgttcgtcaaaggagtagttctgacttcagtttcaagacataaaaacatctaataatcgcacttccactgccttttgctgttaaagaacatgtgcctagttcttttcaaattgagaagtgggctctaaagttttacatgttacatttataaagccctttcttccaccatcatgttatctaagcactttgctaatccctttcttaaaggcataacacagctagggcgttaagtaattatatatctccatctgttgatcactcgcatgcagattgtaatagttttttttttccaagtgtcgcaatcgtagctgtattagcttattcaatgctttatactggatccctgtgctctaaa

SEQ ID NO: 145568 - DNA, 1851 bp, Zea Mays
tttatagaatttagggcaccaacaaaacacctcgctccaacagtaaagccccaaatctagattatagggcagcccactacggtgtagtatatttgagtcacttgagagggtgtcctatagttttttgacaaaaatttatgaaataaggcactgttggagtagtttttcctgtgtagagccccatatttcaatttgaggcactagtttgaggcattgttggagatgctcttaagtactcattagtgtgtacatacggtagtattctctatatttttcccaataaaatatattattgactgaaggtggaatatagagtagtttaattgtgaccaaggctctgtaaaaatattcattttttatgtaagttgatgataaggcatttgattttgatgtaaaacatggaatatagaccattttgactcttccatttgcctaactctggttttatctttggaaatacataccatctgtccttggtgtggatagtttccctgcaaagagatcacgcacgcatgtgcgtgtgtgtaattgtgtatatcagtccgtacaacaagtccttttcatcaacttgacgtggtaaagttgttaaaagagtgtgccatgttatggttaagatgttgaaacctctacgttttctcgtcctttagaaaattattttaggagatccccagaacttctttgataaggacatgaaagtgaaatataattatcattttcttattctggtatgccaatctaaacttttctggcaaaggattgaaaacgtgttttgttactatttaaaaggtggtataacttcttgcatctgttaacctgtactaccatctagaagaaccagagtgaagtgcagcggtgattagcttgaacaggttttgtcatggttaaacgccacatacaacaatcttgcaaccaatgtatagattaactttttagactaggttttgaattgtttgctacatgataatccaaggtggcgaaatctgttaagacttttatgtcctctgtcagaattgttggacttcctagctgatagatcgaatggtggatgtaataattggatcacctttacatctcatccctggtttacctatacctaaacctatgtatatggctatgcgctgatcttctattaaatgctaacagattgtactggaaattagttgagtagctcttgacctgggagcacatatttttactgtcatgagtcatgaataggaacatgcttaggtgtgaattagcacatgataagtagcgtggagcatacataatactaggttgtttttgtagagcatctgttaattaggtttgtatgttagaatgcgggatctgattttcctagtggtatgttacccatttgaatatctttatgcgctcttgtaattgtcactttatttcttattgttatttgaagttatatattgttgccatattatgttaatgcatcttttttgaaccttgtgaaatgaaatacatgatttgtcatttctgtgcaggagcttacaagttcgatgaatctgtttgttaatcagtatagctgacaattggcaaccttctattgttccttcggtttttgcataacactctaggatctggagaaacggcaaccagtacttagctccacttgactataatctgtagaagccagagataacttgtgatgtgatatatccaaataacaataagggggcttgtctaatacatcgaacaagatgtgatgttcgtcaaaggagtagttctgacttcagtttcaagacataaaaacatctaataatcgcacttccactgccttttgctgttaaagaacatgtgcctagttcttttcaaattgagaagtgggctctaaagttttac

SEQ ID NO: 145569 - DNA, 108 bp, Zea Mays
cttccacttaacgaagttcaatttcaaaacaaaatttctgacagaaaacaatagaacaataaccagagtttgctattacagacatgcaacacctgtcatgtataaaca

SEQ ID NO: 145570 - DNA, 975 bp, Zea Mays
atggaccctgtccaggggaacgaggggcagagggaggatgcaaggaaggcactcactctctgtctgcgagaagacgacgatgtagagcgcctagatgtcgaagaagtcaaaccagacagagcgaggcctagcgcggaggacggcaactcccgagcggacggaggtagtggaggtggacgtgcgcggatggattggcgcgacggagtcggcatgcgatggaggagcgcctccacgatctccgccgtcttcgtcaacgggaaggagaatcgacgcgccttcgtcgcgagcaccacaggtgaatcgaatcgacgcgggatctcggcgagagcagtgcgttcatctcggccgccgcaacgtgttggggagaaagggcgccgttggtgggggagaaagccgcgcgtagaaggaggcatctcggcagccggggaaggaagccgcatgtgttcagtgcgggatctgggcgagagcagcgcgtcgagggttttgggaagggcgtcgttggtggggaagaagccgcagttcatgccgcgcgtggggagaggcatctccgagctgagggtcctcgcgggtcgctggcgtggggcggcgcgggagtgtgtggaccgggggccggggcggcggggcctggcgcacgggcaggcgctggtgacgaggacaggaatggccctcctcgcggccgcgcgagcaagcaggataggcggcaaccgacggaccggcggcgcgttagcagagcaagggaaagaaagaggtgggaaagatgcgctgcaaggacacggcgctggcgggggcgggattgcagggagggatggcgcgggcgggggcgggatgcagggaagggacggcgcgggcgcgggcgggattgccgggaggaagacgttgcgggcggaggctggagcgggaagggacggcgcgggcgcgggcgggattgccgggaggaagacgttgcgggtggaggctggagcgggggcacggtga

SEQ ID NO: 145571 - DNA, 1293 bp, Zea Mays
gccacttccactacttacctctctctatccctcctcctgcagctgcaacaagtactgccagggagtactaagcagttatgaacatgactagccccaggctaaagctcttcggcttccacgtctccgaggaggagcacgagctgggccgggcccgggagacggaagcggaagccgagccggacgaggcgccggcgtgcggcaacgtcggtggcggcggcggaggctccgactcgtcgtcctcgtctaccaccaccaccaccacgaccacggccacggcggccggcgacgcgcggaggttcgagtgccagtactgctgccgcgagttcgccaactcgcaggcgctgggcggccaccagaacgcgcacaagaaggagcggcagcagctcaagcgcgcgcagctgcaggccgcggcggcggccgccggccgggtcgccgcgggcggggcgctctacccgcgcgccaacccgatggtgtccgccttcgtgccgccgccgcacctcttcggcggcggcggagacgcggcgcccacgagctgggtctacttctccccgcgcgccgccgcggccgggggccagcagttccacgtctcccacaactgcgtgttcccgtcgcgcgccgccacgccagccaccgtgacggccgcctcgcccgccgtgttctcgtacgcctcggcgtcctccgccggcggcggcgcctcggcggcctacgtgaccgacgaccagtacagcgggcggagggtccacgtgagcccggcggccgccctgaggagataccccggcatggcagctgggcctgggatggcggtggtggcggagccggtcgtggccgggccggaggacgccctggggctggacctgcagctcagccttgcgccggccggcttgtgacttggacggtccggtctcgatctcgtcgtcgatggagatggagatcgcgcgcgcgagctgccacgcaccatgcagttgccttgccttggtgtagtaaaagatagttgatcgccaactagaactactgctgctacagctaaaaaagtctgtactaagatcgatcgatcgatcgtccgatccctggctaggtaattagcaccagtaattacgtttagttgccgggatttaatttggagagctgcatgcatgtaagccatcttctgtatgtaagattccggttgtagctaattgatcatgttgtgcatgacgatttcaaggatggccgccatgcattgcgcagaccctgcgaatttttggttgatccgtccatccatcaatcaatcaatctctgccattttcttcggta

SEQ ID NO: 145572 - DNA, 966 bp, Zea Mays
atggacgatcaggataggccagcccaccagcagccagccagcaacaggggccagagcccagctgccaatgggcagcggcggcccaaggggactaggttcagcggcggcccaagccgatggcgtgggggtgcggcccaggcgacgcaggctcccagcagcggcgactctttggcacggatgctggatgctgccaatgcccaatgccatgctggttggcgactctttggcgcagcggcagccaggtcgaagcggcacccacccgcaatgagcaaagcaggcggcggccccggctcggccccgggcccgacggccgcggccgcggcggccgcggtgcagaagcagaagtcgctgctgcagaaggcggacgccgacgtctccagcctcgtcgacaatttctcctccctcatcaacatcgcccgagtcaacgatccgccagtgcgcaactcgcaggaggccttccagatggagatgcgcgccgcccgcatggtacattcagcagactctctgttgaaattagtgtcggaacttaagaggacagccatcttttctgggcttgcttcattgaatgagaatgtggataggaggatcgaagtgctgggtcagcaagctgagggaactgagagaatgctggagaggattgggcaggaggcagcagcaagcctcaaggagctagaggcacactactactcatctgttgtgcggtcaccatcctatgattgagggttatcccaggttatctgttaggcggtttgctcttcagggttatctcagggttttttatttcaccttgaatattgcctactgacattaccattacctttttgttgggactaaagtttagtagattcgtcttattgtttagtccttatctgtataattagtttataattagattatatgtaatacttctaaatatcattcaaatatttgatgttctaaatatcattcaaatatttgatgtgaagg

SEQ ID NO: 145573 - DNA, 3141 bp, Zea Mays
gaccgggtcgccaccgacacgcccacgctcgactctgttgctttgcttccctgccctggaccttcgtcctcgcggcgcgtgccgaggtggaggaggagccagccgccgtcgcgtgccatctacaccaccacttttcagctcccggatcgaagcacgggtcggttaaaggacggagccccgagcgagcttgcgcggcctgggcctggcacggagacgggaggccgacttggcacggagacggagacggtatgagcagcagcagcagcctcgccatagtggagaagaagccgccgccgttccccggcggcggcggcggcggcgtgctcttccacctcctcgactggcaccgccgcctcgcccgcaagcgcaggctcttctccccgcgccgcctgctcccctcgtccctccgctcctcctcctccccacgcaggcccccgtgcccgccacctcccgcttccccgccgccgccgccgccaccgccgcgcccgtccgatgccgccgccccgggcctcgtcgcgcgcctcatgggcctggagtcctggcccgcgccgccgaggccgcagaagcagaggaaggtggaggcgtcgcgcgcggacggcgccgactcggcggtcgtgctggtgctgcctaagacccgcagccgtcgccctcccgcgcccgcgcccgcgccggcggcgaggagccaccacggggccgacctgccggcgcggagcccgaggcggacccggctcgtgcacgcggccgcggcgaagctgctggacccgggcgcgcgcgccggctcacgggcaagcgccaggctggccctcgcctacgcttgctcttccccgcagcaccgcagggatggccacgccagcgccttgcttcaaggctcgagaatggccgacgacttcctatctcgctccgacagcttgctcttggaggagcgttccgcacgggtacatgtacaggtacagcctcctggtcttcctgcggagacagacaccgctgctgtcccgcgtaggcacggccatttttccggtaacagcaacgccgatgcagcgaccagtaccagtacgatagtgttgccaagaatggattttggggatgggaacaggagcaaacggggctctgatatggatgccaagcacaatgagagtggagtaagagatgaggtagtgcgcacttgtgccagggttagatcgagcggtgctgccgttcaaactggagacgagaggtcgttgcgcaaacgagcaacacctactcggccggaggtttctggttctgggattacagagcctgggggcttggctggatcgacgcgcctggttggacgcgctcgtgaatcggtatctgctactaggaaggtcgcacacggtggttctggtccgataagagagctcgcgggacggatcgttgggcaagggagaatgacacgcagagatttgaacagccaaaatggattatcatccacaagtaggattttaagcaatggatctgcacataaaaggggaccagggaggaaggtggggcatgatgcagcaatcagtagcagagatgacagaaatgcagttgcagttgcttctagatcatctacaaagcccgtggccagagcttcgtctccgcgaagcaatctatcaaagggcggatccccaagtaggctagcacatgagacaactcgcacacgagtgccggctcctgaaaaaggatgtgtcgaagcttcaccttgtgttatgtctacttctgagaaagatgaatttagcaggctgttgaaagcaaaaatcaatgagcttggcatgtcggacaggatcgagtgtacaccaaatgattcaccttcaggaaaattgactgtgcctgtgctgcaagagctcatttctgcccttgcaactgacatgagcacttcaatctcccaatgtagcaactactctggtgcatcagcacccttacgctgcaatggaaatgttgactgcatcaatccagcgcattgtatattctccaatgagcaatcacctgattttcagaaatgctatcagggtgaacaagatgttgattcttctgctacatcgctaaacaatgagcccaatcagccaagtccaacatcagtccttgaagcatctttctcaaatgatacttctttaggaagtccagttgaaaagaatgaaggaaaagacttcattgtgtcaattgagaacaagatggaagatctctttaatttggagtctgacatcgtcgatttagcaatgtcaattgacacaaggaaaactgatgctgaagaagcacaccatggcaatgacaagttatcatgtttacagaattttcttgcacatgatttcaatatcttggaatctaggctctgcagcattagagaagctatttcaaatgctgaactgcttctgggcattagcctcttgcatagcacaacatcaggtcttccactccatcctttcattgttgaaacgctagaaaatactatggatatgtttagtggaggagagtactcagattttactgaagataagaagtatcaacataccaacttcctgtttgactgcattatagagtcactggattcaaaattctgcaatcttggcaaatgtggatacaaggcttggctgaagttgcctcacagtttgagcaaagatctgttgaagcgccagctattggaaaacatcagcaactggagggagtcaagtgggactgctcttagacaagtttctgacaaagaagtggaccaagtgactgacaggtgggatgcaaaccttgaagcatttgatataagcattgcaatcgagaacgacattcttgaggcgcttgtcggtgagttcgcagttgacctatggtgaaacggcgtattgactgccctatatgtatatgagatattgacatgtttggacttctgctcgcatgattctggataaataagatactgcggatatgtttgttttttcttagcagtaaattttgtagagtcatgtatggttgaagggcctccgtgtttgttttacccttcgtatgttataatggaaacatgctaaagcttaacaatgtctcctaatctttgtggccgtcgctccttttacccaactggtaacatcggatctgttatcaatagcattcgtatacactatgaggagctgtgtatatatataatcaatgttgacctct

SEQ ID NO: 145574 - DNA, 2358 bp, Zea Mays
gtgtgaaattcgtacacacattccagcgaaattcctgcgttgaaagaagtccggccccatccgctgcttaactatcggatcttgcgaaggcatcgtcctcttcgtctccttcgtcgtcctatcttataatcgcatttcgaaatccccaaacggaagcatcgccactcttccgaacctgaacaatcaccaccgttattaagaagatgatgcgctgcgctgcaacgggcggcgggtgcgtcgcttcgtggagcggcgatcggagattgccggcggtcaacccctgcagcgtgcggatgccgacgggcaacgatgggtggtgcgccggcctgaggtcgcgggcggcggatctcgccggcctcgagatggccaacctgcgcggcggcgtcggggggctcttccgcgcgagcccgcgctacgggcgcttgcaagccacggcggcagttgaccctgaagatattccattggagaaggttcaagttaaatcctcaggacatgttctgccatatgttggcgttgcttgtttgggggctattctgtttggttaccatcttggtgtggtcaatggcgcacttgaatatctcgcgaaggatcttgggattgctgaaaatgctgtcttgcaggggtgggtggttagcacatccttggctggtgcaacactaggttcttttactgggggttctttggcagataaatttgggcggacaagaacattcatcctggatgcagtcccacttgctctaggtgcattcttgagtgcaacagctcaagatatccgcacaatgattattggccgattgcttgctggaattggtatcggggtctcatctgctcttgtacccctttacatatctgagatctcaccaactgaaattcgtggaacacttggtaccgttaatcaactttttatttgcattggaattcttgcagctttgttagctggattgcctctggcaggaaatcctgcctggtggaggacaatgtttggaattgctgtagttccatccattctgctggctgtaggaatggccttttcgcctgaaagccctcgttggctattccagcaaggaaaggttactcaagcagaattagctgtaaaaagactgtatggaaaagaaatggttaccgaaattatgtttgatctgagagctagtggccaaagttcttcggagtccgaagccggctggtttgatcttttcagcaagcgttactggaaagttgtgagtgtgggggcagcactgtttttgttccagcagcttgctggtataaacgctgttgtatattactctacatcggtgttccgtagtgcaggcattgcatctgatgttgctgctagtgctcttgttggagcagccaatgtttttggtactatggttgcatcttctctaatggacaaacaaggaaggaaaagccttctgataacaagcttttctggaatgggtgcttcaatgctactcctagcattgtccttcacctggaaagctctggcaccttattctggtactcttgctgttgttggcactgttctgtacgtgctgtcatttgctctaggagcgggccctgttccagcgctacttcttcctgaaatatttgcctcgagaataagggccaaggctgtcgcattatctctaggcatgcactgggtatctaactttttcattggcctgtacttcctgagtgtcgtgagcaagtttgggatcagcaacgtgtatctgggatttgcatcagtatgtgcccttgcagttctgtacatagctgggaatgtggtcgagaccaaggggagatcacttgaagagattgaaagggagctaagtgtagcagaatgatgtacttttgctagtcatgctgtggcgccgttttggttatcgagaatgcaaccaagcgctcaaccgagcatccttggacctggagactctttctagtttcatgtagttttagaaataagcgaacggcaagagtaccaatcttaggtgacttggtgtgggttgtgtctgaaataagtgaattggattgtagaatttcagaaataagtgaattggattgtagaatttcagaaagtgtgttccccttattttttcgctgcagttccttccatgctagacctatattactgacagttttcttcatgcgcccttatttccttttggcctcaagatttgcccgcagctttatgaggaaaggattagtgcgtcattatttctgtatatcacagcacagtagaagtaacaaaaaaaaatacaaaaggatgatccttttgcatgtactggttcttctatttcttatcatattcagcctgcagatctcgtcgattcctttccaaaaaggttattagttgttacacttacacatcatcatcatgac

SEQ ID NO: 145575 - DNA, 2363 bp, Zea Mays
gtgtgaaattcgtacacacattccagcgaaattcctgcgttgaaagaagtccggccccatccgctgcttaactatcggatcttgcgaaggcatcgtcctcttcgtctccttcgtcgtcctatcttataatcgcatttcgaaatccccaaacggaagcatcgccactcttccgaacctgaacaatcaccaccgttattaagaagatgatgcgctgcgctgcaacgggcggcgggtgcgtcgcttcgtggagcggcgatcggagattgccggcggtcaacccctgcagcgtgcggatgccgacgggcaacgatgggtggtgcgccggcctgaggtcgcgggcggcggatctcgccggcctcgagatggccaacctgcgcggcggcgtcggggggctcttccgcgcgagcccgcgctacgggcgcttgcaagccacggcggcagttgaccctgaagatattccattggagaaggttcaagttaaatcctcaggacatgttctgccatatgttggcgttgcttgtttgggggctattctgtttggttaccatcttggtgtggtcaatggcgcacttgaatatctcgcgaaggatcttgggattgctgaaaatgctgtcttgcagggtatgggtgggtggttagcacatccttggctggtgcaacactaggttcttttactgggggttctttggcagataaatttgggcggacaagaacattcatcctggatgcagtcccacttgctctaggtgcattcttgagtgcaacagctcaagatatccgcacaatgattattggccgattgcttgctggaattggtatcggggtctcatctgctcttgtacccctttacatatctgagatctcaccaactgaaattcgtggaacacttggtaccgttaatcaactttttatttgcattggaattcttgcagctttgttagctggattgcctctggcaggaaatcctgcctggtggaggacaatgtttggaattgctgtagttccatccattctgctggctgtaggaatggccttttcgcctgaaagccctcgttggctattccagcaaggaaaggttactcaagcagaattagctgtaaaaagactgtatggaaaagaaatggttaccgaaattatgtttgatctgagagctagtggccaaagttcttcggagtccgaagccggctggtttgatcttttcagcaagcgttactggaaagttgtgagtgtgggggcagcactgtttttgttccagcagcttgctggtataaacgctgttgtatattactctacatcggtgttccgtagtgcaggcattgcatctgatgttgctgctagtgctcttgttggagcagccaatgtttttggtactatggttgcatcttctctaatggacaaacaaggaaggaaaagccttctgataacaagcttttctggaatgggtgcttcaatgctactcctagcattgtccttcacctggaaagctctggcaccttattctggtactcttgctgttgttggcactgttctgtacgtgctgtcatttgctctaggagcgggccctgttccagcgctacttcttcctgaaatatttgcctcgagaataagggccaaggctgtcgcattatctctaggcatgcactgggtatctaactttttcattggcctgtacttcctgagtgtcgtgagcaagtttgggatcagcaacgtgtatctgggatttgcatcagtatgtgcccttgcagttctgtacatagctgggaatgtggtcgagaccaaggggagatcacttgaagagattgaaagggagctaagtgtagcagaatgatgtacttttgctagtcatgctgtggcgccgttttggttatcgagaatgcaaccaagcgctcaaccgagcatccttggacctggagactctttctagtttcatgtagttttagaaataagcgaacggcaagagtaccaatcttaggtgacttggtgtgggttgtgtctgaaataagtgaattggattgtagaatttcagaaataagtgaattggattgtagaatttcagaaagtgtgttccccttattttttcgctgcagttccttccatgctagacctatattactgacagttttcttcatgcgcccttatttccttttggcctcaagatttgcccgcagctttatgaggaaaggattagtgcgtcattatttctgtatatcacagcacagtagaagtaacaaaaaaaaatacaaaaggatgatccttttgcatgtactggttcttctatttcttatcatattcagcctgcagatctcgtcgattcctttccaaaaaggttattagttgttacacttacacatcatcatcatgac

SEQ ID NO: 145576 - DNA, 2233 bp, Zea Mays
cgttgaaagaagtccggccccatccgctgcttaactatcggatcttgcgaaggaacaatcaccaccgttattaagaagatgatgcgctgcgctgcaacgggcggcgggtgcgtcgcttcgtggagcggcgatcggagattgccggcggtcaacccctgcagcgtgcggatgccgacgggcaacgatgggtggtgcgccggcctgaggtcgcgggcggcggatctcgccggcctcgagatggccaacctgcgcggcggcgtcggggggctcttccgcgcgagcccgcgctacgggcgcttgcaagccacggcggcagttgaccctgaagatattccattggagaaggttcaagttaaatcctcaggacatgttctgccatatgttggcgttgcttgtttgggggctattctgtttggttaccatcttggtgtggtcaatggcgcacttgaatatctcgcgaaggatcttgggattgctgaaaatgctgtcttgcaggggtgggtggttagcacatccttggctggtgcaacactaggttcttttactgggggttctttggcagataaatttgggcggacaagaacattcatcctggatgcagtcccacttgctctaggtgcattcttgagtgcaacagctcaagatatccgcacaatgattattggccgattgcttgctggaattggtatcggggtctcatctgctcttgtacccctttacatatctgagatctcaccaactgaaattcgtggaacacttggtaccgttaatcaactttttatttgcattggaattcttgcagctttgttagctggattgcctctggcaggaaatcctgcctggtggaggacaatgtttggaattgctgtagttccatccattctgctggctgtaggaatggccttttcgcctgaaagccctcgttggctattccagcaaggaaaggttactcaagcagaattagctgtaaaaagactgtatggaaaagaaatggttaccgaaattatgtttgatctgagagctagtggccaaagttcttcggagtccgaagccggctggtttgatcttttcagcaagcgttactggaaagttgtgagtgtgggggcagcactgtttttgttccagcagcttgctggtataaacgctgttgtatattactctacatcggtgttccgtagtgcaggcattgcatctgatgttgctgctagtgctcttgttggagcagccaatgtttttggtactatggttgcatcttctctaatggacaaacaaggaaggaaaagccttctgataacaagcttttctggaatgggtgcttcaatgctactcctagcattgtccttcacctggaaagctctggcaccttattctggtactcttgctgttgttggcactgttctgtacgtgctgtcatttgctctaggagcgggccctgttccagcgctacttcttcctgaaatatttgcctcgagaataagggccaaggctgtcgcattatctctaggcatgcactgggtatctaactttttcattggcctgtacttcctgagtgtcgtgagcaagtttgggatcagcaacgtgtatctgggatttgcatcagtatgtgcccttgcagttctgtacatagctgggaatgtggtcgagaccaaggggagatcacttgaagagattgaaagggagctaagtgtagcagaatgatgtacttttgctagtcatgctgtggcgccgttttggttatcgagaatgcaaccaagcgctcaaccgagcatccttggacctggagactctttctagtttcatgtagttttagaaataagcgaacggcaagagtaccaatcttaggtgacttggtgtgggttgtgtctgaaataagtgaattggattgtagaatttcagaaataagtgaattggattgtagaatttcagaaagtgtgttccccttattttttcgctgcagttccttccatgctagacctatattactgacagttttcttcatgcgcccttatttccttttggcctcaagatttgcccgcagctttatgaggaaaggattagtgcgtcattatttctgtatatcacagcacagtagaagtaacaaaaaaaaatacaaaaggatgatccttttgcatgtactggttcttctatttcttatcatattcagcctgcagatctcgtcgattcctttccaaaaaggttattagttgttacacttacacatcatcatcatgac

SEQ ID NO: 145577 - DNA, 2011 bp, Zea Mays
ccgctgcttaactatcggatcttgcgaaggcatcgtcctcttcgtctccttcgtcgtcctatcttataatcgcatttcgaaatccccaaacggaagcatcgccactcttccgaacctgaacaatcaccaccgttattaagaagatgatgcgctgcgctgcaacgggcggcgggtgcgtcgcttcgtggagcggcgatcggagattgccggcggtcaacccctgcagcgtgcggatgccgacgggcaacgatgggtggtgcgccggcctgaggtcgcgggcggcggatctcgccggcctcgagatggccaacctgcgcggcggcgtcggggggctcttccgcgcgagcccgcgctacgggcgcttgcaagccacggcggcagttgaccctgaagatattccattggagaaggttcaagttaaatcctcaggacatgttctgccatatgttggcgttgcttgtttgggggctattctgtttggttaccatcttggtgtggtcaatggcgcacttgaatatctcgcgaaggatcttgggattgctgaaaatgctgtcttgcaggggtgggtggttagcacatccttggctggtgcaacactaggttcttttactgggggttctttggcagataaatttgggcggacaagaacattcatcctggatgcagtcccacttgctctaggtgcattcttgagtgcaacagctcaagatatccgcacaatgattattggccgattgcttgctggaattggtatcggggtctcatctgctcttgtacccctttacatatctgagatctcaccaactgaaattcgtggaacacttggtaccgttaatcaactttttatttgcattggaattcttgcagctttgttagctggattgcctctggcaggaaatcctgcctggtggaggacaatgtttggaattgctgtagttccatccattctgctggctgtaggaatggccttttcgcctgaaagccctcgttggctattccagcaaggaaaggttactcaagcagaattagctgtaaaaagactgtatggaaaagaaatggttaccgaaattatgtttgatctgagagctagtggccaaagttcttcggagtccgaagccggctggtttgatcttttcagcaagcgttactggaaagttgtgagtgtgggggcagcactgtttttgttccagcagcttgctggtataaacgctgttgtatattactctacatcggtgttccgtagtgcaggcattgcatctgatgttgctgctagtgctcttgttggagcagccaatgtttttggtactatggttgcatcttctctaatggacaaacaaggaaggaaaagccttctgataacaagcttttctggaatgggtgcttcaatgctactcctagcattgtccttcacctggaaagctctggcaccttattctggtactcttgctgttgttggcactgttctgtacgtgctgtcatttgctctaggagcgggccctgttccagcgctacttcttcctgaaatatttgcctcgagaataagggccaaggctgtcgcattatctctaggcatgcactgggtatctaactttttcattggcctgtacttcctgagtgtcgtgagcaagtttgggatcagcaacgtgtatctgggatttgcatcagtatgtgcccttgcagttctgtacatagctgggaatgtggtcgagaccaaggggagatcacttgaagagattgaaagggagctaagtgtagcagaatgatgtacttttgctagtcatgctgtggcgccgttttggttatcgagaatgcaaccaagcgctcaaccgagcatccttggacctggagactctttctagtttcatgtagttttagaaataagcgaacggcaagagtaccaatcttaggtgacttggtgtgggttgtgtctgaaataagtgaattggattgtagaatttcagaaataagtgaattggattgtagaatttcagaaaaagtaacaaaaaaaaat

SEQ ID NO: 145578 - DNA, 2396 bp, Zea Mays
ccgctgcttaactatcggatcttgcgaaggcatcgtcctcttcgtctccttcgtcgtcctatcttataatcgcatttcgaaatccccaaacggaagcatcgccactcttccgaacctgtagtcgcttacccactgccaactcagcgccatactgttgaattttttttttacctatttctatttatggtgatggtggtggtggtgtgcgatcgcaggaacaatcaccaccgttattaagaagatgatgcgctgcgctgcaacgggcggcgggtgcgtcgcttcgtggagcggcgatcggagattgccggcggtcaacccctgcagcgtgcggatgccgacgggcaacgatgggtggtgcgccggcctgaggtcgcgggcggcggatctcgccggcctcgagatggccaacctgcgcggcggcgtcggggggctcttccgcgcgagcccgcgctacgggcgcttgcaagccacggcggcagttgaccctgaagatattccattggagaaggttcaagttaaatcctcaggacatgttctgccatatgttggcgttgcttgtttgggggctattctgtttggttaccatcttggtgtggtcaatggcgcacttgaatatctcgcgaaggatcttgggattgctgaaaatgctgtcttgcaggggtgggtggttagcacatccttggctggtgcaacactaggttcttttactgggggttctttggcagataaatttgggcggacaagaacattcatcctggatgcagtcccacttgctctaggtgcattcttgagtgcaacagctcaagatatccgcacaatgattattggccgattgcttgctggaattggtatcggggtctcatctgctcttgtacccctttacatatctgagatctcaccaactgaaattcgtggaacacttggtaccgttaatcaactttttatttgcattggaattcttgcagctttgttagctggattgcctctggcaggaaatcctgcctggtggaggacaatgtttggaattgctgtagttccatccattctgctggctgtaggaatggccttttcgcctgaaagccctcgttggctattccagcaaggaaaggttactcaagcagaattagctgtaaaaagactgtatggaaaagaaatggttaccgaaattatgtttgatctgagagctagtggccaaagttcttcggagtccgaagccggctggtttgatcttttcagcaagcgttactggaaagttgtgagtgtgggggcagcactgtttttgttccagcagcttgctggtataaacgctgttgtatattactctacatcggtgttccgtagtgcaggcattgcatctgatgttgctgctagtgctcttgttggagcagccaatgtttttggtactatggttgcatcttctctaatggacaaacaaggaaggaaaagccttctgataacaagcttttctggaatgggtgcttcaatgctactcctagcattgtccttcacctggaaagctctggcaccttattctggtactcttgctgttgttggcactgttctgtacgtgctgtcatttgctctaggagcgggccctgttccagcgctacttcttcctgaaatatttgcctcgagaataagggccaaggctgtcgcattatctctaggcatgcactgggtatctaactttttcattggcctgtacttcctgagtgtcgtgagcaagtttgggatcagcaacgtgtatctgggatttgcatcagtatgtgcccttgcagttctgtacatagctgggaatgtggtcgagaccaaggggagatcacttgaagagattgaaagggagctaagtgtagcagaatgatgtacttttgctagtcatgctgtggcgccgttttggttatcgagaatgcaaccaagcgctcaaccgagcatccttggacctggagactctttctagtttcatgtagttttagaaataagcgaacggcaagagtaccaatcttaggtgacttggtgtgggttgtgtctgaaataagtgaattggattgtagaatttcagaaataagtgaattggattgtagaatttcagaaagtgtgttccccttattttttcgctgcagttccttccatgctagacctatattactgacagttttcttcatgcgcccttatttccttttggcctcaagatttgcccgcagctttatgaggaaaggattagtgcgtcattatttctgtatatcacagcacagtagaagtaacaaaaaaaaatacaaaaggatgatccttttgcatgtactggttcttctatttcttatcatattcagcctgcagatctcgtcgattcctttccaaaaaggttattagttgttacacttacacatcatcatcatgac

SEQ ID NO: 145579 - DNA, 1951 bp, Zea Mays
ccgctgcttaactatcggatcttgcgaaggcatcgtcctcttcgtctccttcgtcgtcctatcttataatcgcatttcgaaatccccaaacggaagcatcgccactcttccgaacctgaacaatcaccaccgttattaagaagatgatgcgctgcgctgcaacgggcggcgggtgcgtcgcttcgtggagcggcgatcggagattgccggcggtcaacccctgcagcgtgcggatgccgacgggcaacactaggttcttttactgggggttctttggcagataaatttgggcggacaagaacattcatcctggatgcagtcccacttgctctaggtgcattcttgagtgcaacagctcaagatatccgcacaatgattattggccgattgcttgctggaattggtatcggggtctcatctgctcttgtacccctttacatatctgagatctcaccaactgaaattcgtggaacacttggtaccgttaatcaactttttatttgcattggaattcttgcagctttgttagctggattgcctctggcaggaaatcctgcctggtggaggacaatgtttggaattgctgtagttccatccattctgctggctgtaggaatggccttttcgcctgaaagccctcgttggctattccagcaaggaaaggttactcaagcagaattagctgtaaaaagactgtatggaaaagaaatggttaccgaaattatgtttgatctgagagctagtggccaaagttcttcggagtccgaagccggctggtttgatcttttcagcaagcgttactggaaagttgtgagtgtgggggcagcactgtttttgttccagcagcttgctggtataaacgctgttgtatattactctacatcggtgttccgtagtgcaggcattgcatctgatgttgctgctagtgctcttgttggagcagccaatgtttttggtactatggttgcatcttctctaatggacaaacaaggaaggaaaagccttctgataacaagcttttctggaatgggtgcttcaatgctactcctagcattgtccttcacctggaaagctctggcaccttattctggtactcttgctgttgttggcactgttctgtacgtgctgtcatttgctctaggagcgggccctgttccagcgctacttcttcctgaaatatttgcctcgagaataagggccaaggctgtcgcattatctctaggcatgcactgggtatctaactttttcattggcctgtacttcctgagtgtcgtgagcaagtttgggatcagcaacgtgtatctgggatttgcatcagtatgtgcccttgcagttctgtacatagctgggaatgtggtcgagaccaaggggagatcacttgaagagattgaaagggagctaagtgtagcagaatgatgtacttttgctagtcatgctgtggcgccgttttggttatcgagaatgcaaccaagcgctcaaccgagcatccttggacctggagactctttctagtttcatgtagttttagaaataagcgaacggcaagagtaccaatcttaggtgacttggtgtgggttgtgtctgaaataagtgaattggattgtagaatttcagaaataagtgaattggattgtagaatttcagaaagtgtgttccccttattttttcgctgcagttccttccatgctagacctatattactgacagttttcttcatgcgcccttatttccttttggcctcaagatttgcccgcagctttatgaggaaaggattagtgcgtcattatttctgtatatcacagcacagtagaagtaacaaaaaaaaatacaaaaggatgatccttttgcatgtactggttcttctatttcttatcatattcagcctgcagatctcgtcgattcctttccaaaaaggttattagttgttacacttacacatcatcatcatgac

SEQ ID NO: 145580 - DNA, 2607 bp, Zea Mays
atggagttgaagtcgaaggagactcaccagtctctgctcatccatcacttcatcaaccccgtggctcctcatcttccctctgccaaggaggccatggccgagatggacgcggccacgaacgcgagtgaccccgtgatgctcgacgcgtcctcgtcgctcgacccgtactccttcgcgctgctgctgccgccagctgaggtggtggacgcaccgaatcacgacgaggcaagttctctacctcctgcccacgacttccgcgtcgagcaagccaaaggggagaaggtacccgtcgacacgctcaccaagtgttcgacgatagacctcaaccgcggcatttactccgtcgccaacacggccactatcagagccgcgatgggcgcggtcgtggacgtgagggactccgtgaggttcccttcccttctcgccgcggggaatttcccgccgcccttcctcacgctgtcgccaccacacgacgaggcagatccggacttcggttcctgccaggacaaggagctgctcgaccatctcgaaggcgtgctggccaccgaatctgtggtggtgaagagaggccagcacatcgtgccgctcaaggggaagtgcgtcttcgtgcgcgccgacttcaacgcaccgctcgacgcgtgcagcggaagcgtggtgggctcgccctcaccgagcatgcaggtgaagagggcgcagaggaatcgaccgccgaactcctgccgcgtgcactgcgcgtcgccgctctgctcggcagcacatgcctcgacgccaccgtcggacttctgtgccgcggcgcggtgcccgttggagaacatcgagatgagctcctgtgacgcgccccacgcgtgcccgccgttgtactacgggtacggggacgggagccccatggcgcacctgaggcgcggtcgcgtcgggtggggcgctagcgcacgcgcgcccatggccatggtcgtcgacaacttctccttcgcgtgcacgcgcacgaccatgggcgagcctgtcgaggtggcagggttcgaccacagccagttctcgctgccggtccagctctcctacctcacgccatctcaccatcacgcccaccaagtgttcgacgatagacctcaaccgcggcatctactccgtcctcagcctggacctccaccgtcagctactatcaaggcagcagctacctcaaccatagaggatgaggtactcgtcgacacaaccaccaagtgttcgatgagagtactcaaccgcggcgtctatcttcgacgagggcttcaagaacaactgtcggcccgtcaccttcacctacaactccgtcgacggcgacatcaccgtcacctacgacggatactccagcgacgtgttggtgcacgagcggttcatggtccggttactggacgcgatgtcgctggaccaggatgtgactctgctgtgtgcaggcatcaccgtgtctcaccccatgaagtaccacggcctgaacaagccgaggaagcacatctgcttgatgaggctgggaggattgggccacgttgctgtcaagttcgccaaggcgttcgccaatcacagggatgccaagcgcacgttccgggagatcaagatgttgaggcacctcaaccacatgagcatcattggcatcagggacgtgatcccagcgccggtcaaaccgggaaagttgttctgatgaagcagctggctgactgcaaaccagtgcagatcactgctactcttggggatttgctcaatagaaaggtcagcgaaggtgtccgggtccttatgctagtgtgggttgatcggacttcagtcggtttgctgcagaaggatagcatgatggatacccatgcaaagtgcagcaacacatggagttaccctgtgtcggatgcccaccgcatggaaagtgcagcaatgccaatgctgaatctgctcacatggagttacgctcaatctgctcacatagcattcataaccatagattgtgctgcaatgcagagagtaacagaagggaaccttgttttcacagagcacactgagcaagatgacaagttcagagagttggctcgccgagttactgaagtcctggaattcaggtcggctgctggactcattttttgtcaccctataatgacaacaacagaattctggatgtcacacgagtgtcttcttgtgccttatgagcaagcactcacccatgaggaatttttccctagcatctattatgactgctctgcctatttcctatgggttggaaagtgcactcgccagcttgatggagggaggtcagggtcggaaatcggtgctttagatgctggtgttggaattgtcggcactggcctcggtctcattcgtttaggaattggtgctgtcgctggtcttattacctctggtttggagtcgctaacacccttgaactttatacacgcgaacttgatcacggggccacaatcgcctcgaagttggcatggacgtgagcatgaagaagggtcacgagttcggctggggcacgggaacgaaggccacgacgattcggtggagagcaggtggggccgtgcgggccaacgatgcagcatggaggaagtcgtggaggctggcgtgtcacgagcaggactgtcatgggctggatga

SEQ ID NO: 145581 - DNA, 1401 bp, Zea Mays
cagggagaagccatgttaattttgcagagcaagcaaagcggaggtgtgggagtgcgtgtagaagaacaccgcgatagtataagtgcataaccaaaggctgagcagtggtgtgctgtgctggtgctgcgctgcgagcttgaggcggccaatcaagccacgaacgacgtaaacaacgccatggctgcgtctcactctcacctaggcgggaaactcctcaaagtggcgcctacgcttctcctcttctccttgggattcgcgctcggcatggtctccaactccaagttcccaagcctgtacctctcgtccatctcgcgatcgccctctccggcgccacctccgccggcgccggcaccgccgccgctaccaccgcaaaacccagaagtggggatggcacggttcctggagccgcgcagcgtcacgcacaacatgaccgacgaggagctgctgtggtgggcgtccatgacgcccaaggtccgcagcacgccgtaccaccgcgcgcccaaggtcgccttcctgttcctggcgagaggggacctgccgctgcggccgctgtgggagaagttcttcgccgggcaccaagggctgtactccatctacgtgcacaccgatccctcctacgccggctcgccgccggaggactccgtcttctacggccgcatgatcccaagccagaaaacgaggtggggagacgtgagcctggtggccgcgcatcgccggctgctggcgaacgcgctcctggacgtcggcaacgagcgtttcgcgctgctctccgagtcgtgcatcccgctctacaacttcacggccgtgtacgccgtgctcaccggcacggacaccagcttcgtggacgcggtcgtcaccccggcgcgctacagcgccctgttcgcggagcgcagcaacatcacggccgcgcagtggcgcaagggcgaggcgtggttcgagatggaccgcgcgctggcgctggaggtcgtctccgacgccacctacttccccacgttccgcgagcgctgcgcggggcagcgggcgtgcctcatggacgagcactacgtgccgacgctgctgagcgtgctgcgctggccgcgcggcgccaaccgctcgctcaccttcgtggactgggaccggaggcgccggacggggttccacccgcacacgcaccgcggcgaggaggtgacgccggagctggtcgaggagatcaggggaggcgcgcgcgccggcaggaactgcagcgcgtaccacgacggggccagcggcgtctgctacgtcttcgcgcgcaagttcacgcccgacacgctccagccgctgctccggttggctcccagggtcatggggttcggctgagacgatcgagtttgtatattgctgacttcctctggttgcttgatcagatgttttgtggagcttttc

SEQ ID NO: 145582 - DNA, 1384 bp, Zea Mays
gcctccctctccacctgcgggctgcggcggtgcgagccgcggcacaggcgcacagcggtgcctgccctgcccacacggccacaccaccacagatccattttaaaaccccaggcgtctctcacgcttccgccgctttacaactccccaccccagccgatcccaacgcacactgcacccagtgcggcggccgccggcaatggcggtgcacggcggcgactacctgcggcggttcgttgctgagacggagtggtacaacgaggtcgtcctcagcgccgtggcgccaggcgactggtggcgcggcctgccgcacccggtgcagtcgtggatgcgcaactgcgtcggcggttacctcctctacttcatctctggtttcctctggtgtttcgtcatctactactggaagcgccacgcctacatccccaaagatgccatccccacaaatgaagctatgaagaagcaaatagctgtagcatccaaggctatgcctttttactgtgctcttccaactttatctgagtatatgatcgagagtggatggacccggtgttactttaatatcagcgaaatgggtttttctgcatacctttgttatatggctatgtatctcatttttgtggagtttggaatttactggatgcacagagagttgcatgacataaagccactatacaaacatctgcatgcgacccaccatatttacaacaaggagaacaccttgtctccgtttgctggactcgcgtttcacccactggatggtattctgcaagcgataccgcatgtgcttgcgctcttcctcctcccaacgcacttcaggacgcacatcgctctcgtgttcttggagggcgtgtggacgacaaacatccacgactgcattcacggcaaggtatggccagtcatgggcgctgggtatcacaccatccaccatacgacttaccgccacaactatggccactacaccgtctggatggactggatgtttggtacgctccgtgagccagatgatatcctcaagaaggcctgagttcgtcgtagctgtggttttcctacggtgctggatgtgcttggtctgttctgtccccagtgcctctaatccgctgagcctgttcagcgctctgtttctgtaggctttggtgtgctatttagtttgctaggttttatatgttgtgcttattctgtaatttagtgatgtttgtctcatgacgcaacggagttcaggacgaataaaaagaaagatttgctagacacattctggattccagctgcctgtacaatgttgcacctcagctgtcagtgtaggatgtaaaatggattggcttctaccttgtgagttcacgcgttgttcagtctatgaatgttgcttatatattgtgtaaaacagaggtgg

SEQ ID NO: 145583 - DNA, 1524 bp, Zea Mays
tgagattttctgcccggttggcacattaactggttaaaggcacactgttcgattaacaagcattcacttagtagttgttgaggtgtgccatgttcttttgtcatctgaacaacaaatggtagcaacttattgtatctagaatctagatatgaccgatttgctaaaagaatttatgttgctccaagcttagtttatgaatttggtcttaataaattgcagttgacagcaaatatttgcactgcatactgtagttattgtttacaaaaatggaagtattctgtgtacaggcttctttccttttgaatttgtacgtagactgtaacaactagagctgttaacgataagctgtacatgtgcttggactgtacgcaagggattttggtttatactaaggatcttgtctcagattgttgctacgaaattaggaacgaccttatctgtaccagcataatttttatttcattggttcaacttaatgttatatatgattgttacctgtcatatttctcataaatttatgtagtcatatttatgactgcgcaatgtttggtctgatttgatgcagatgccatccccacaaatgaagctatgaagaagcaaatagctgtagcatccaaggctatgcctttttactgtgctcttccaactttatctgagtatatgatcgagagtggatggacccggtgttactttaatatcagcgaaatgggtttttctgcatacctttgttatatggctatgtatctcatttttgtggagtttggaatttactggatgcacagagagttgcatgacataaagccactatacaaacatctgcatgcgacccaccatatttacaacaaggagaacaccttgtctccgtttgctggactcgcgtttcacccactggatggtattctgcaagcgataccgcatgtgcttgcgctcttcctcctcccaacgcacttcaggacgcacatcgctctcgtgttcttggagggcgtgtggacgacaaacatccacgactgcattcacggcaaggtatggccagtcatgggcgctgggtatcacaccatccaccatacgacttaccgccacaactatggccactacaccgtctggatggactggatgtttggtacgctccgtgagccagatgatatcctcaagaaggcctgagttcgtcgtagctgtggttttcctacggtgctggatgtgcttggtctgttctgtccccagtgcctctaatccgctgagcctgttcagcgctctgtttctgtaggctttggtgtgctatttagtttgctaggttttatatgttgtgcttattctgtaatttagtgatgtttgtctcatgacgcaacggagttcaggacgaataaaaagaaagatttgctagacacattctggattccagctgcctgtacaatgttgcacctcagctgtcagtgtaggatgtaaaatggattggcttctaccttgtgagttcacgcgttgttcagtctatgaatgttgcttatatattgtgtaaaacagaggtgg

SEQ ID NO: 145584 - DNA, 843 bp, Zea Mays
tatctcgcattctcccctcgttatcggtagaaaagttccatttacgatccactacttgcgtgcactacatagttccttgatgttaagctctggtgtgtcgcttttgaagtccattactccattttgctatgagcagccattcggccatgactactaaaacacatttgctttccaggactcgcgtttcacccactggatggtattctgcaagcgataccgcatgtgcttgcgctcttcctcctcccaacgcacttcaggacgcacatcgctctcgtgttcttggagggcgtgtggacgacaaacatccacgactgcattcacggcaaggtatggccagtcatgggcgctgggtatcacaccatccaccatacgacttaccgccacaactatggccactacaccgtctggatggactggatgtttggtacgctccgtgagccagatgatatcctcaagaaggcctgagttcgtcgtagctgtggttttcctacggtgctggatgtgcttggtctgttctgtccccagtgcctctaatccgctgagcctgttcagcgctctgtttctgtaggctttggtgtgctatttagtttgctaggttttatatgttgtgcttattctgtaatttagtgatgtttgtctcatgacgcaacggagttcaggacgaataaaaagaaagatttgctagacacattctggattccagctgcctgtacaatgttgcacctcagctgtcagtgtaggatgtaaaatggattggcttctaccttgtgagttcacgcgttgttcagtctatgaatgttgcttatatattgtgtaaaacagaggtggccttgcttcctttcc

SEQ ID NO: 145585 - DNA, 2116 bp, Zea Mays
gcccaaaccgcaccaacggccaacgcacaaaaaaccattctcagcctcctctcctactcgagcagctagcccagtcaatcattctgcttggattggatccaccttgtctctgaaaatagcttcgagaccttagcgcccaagaaacggtgaccgaccgtccctgcgctagtagcaacagcaacaatggcggcgaagcacctccacgacgggtacgagcaggacggcgaccagcccggcgacaaccgcatgcgccgcctgccgtccttgtcgacggtgattcgggaggcgatgatgcagaaggagatgcagaacctgctcaggtgtctggagcctctcatccgccgagtggtgcaagaggaggtcgaggcagggctcaggctcatgcagagcctgcgctacatcgagagggcgccggcggagacgccggcggcggaacgggcggcgtggaagctggcgttccggacgccgccgcagctgccgatcttcacgggcagcaagatcgagggcgaggccgggaggccgctggaggtggtcctcgtggacgcgtgcaccggctcgcccgccgcgcccccggtcccgcgggcgctgcgcgtggagctggtcccggtgttgggcgacttcccgccggacgggcgcgaggactgggccgcggacgagttggagaggagcgtcgtgagggagcgcgagggcaggcgcccgctcctgaccggcgacgtcggtctcaccctgagggacgggcgcgccacggtgggcgagctccggttcacggacaactcgtcctgggtccgcagccgcaggttccgcatcgccgcccgcgcggcctgcggcggcggcggcggcggcggcgcgcgggtccaggaggccgtgacggaggccttcgtggtcaaggaccacaggggcgagcggtgccgcaagcactacccgcccgccctcacggacgacgtgtggaggctggagaagatccgcatgggaggcgcgttccacacgaggctgatgtgccgcaacgtcggcaccgtgcaggagttcgtccggatgctcatggtgaaccccgacgagcttcgcgcgattctgggcgacggcatgagagaccgcatgtgggaggcggcgacgaggcacgccaggacctgcgcccccgacggcaaggtgtacgcgcacgccacgccgcacggcaccatcttcgtggactccatcttcaacgtcgtgagggtcgacgtcggcggcgtcgagtggccgctgcagcagctgaacaggggccagacgatgatggtgcagcagatgctgcaggacgcgtacgagcaccgccacagcctccaggacgcggccgaggaggccttcatgctcgacggccacaccgacaccaacgctccgctgctgcagagtaaaagtgtcccaaccaactttcctttctagttgcagacggttaggagttccgcctgaccgcctcgattattcccctgctctaacaccttgtgcacgggcgacctgcagacgcagcgcacgtcgcggcgccggcgccggtggacacaccgctctggttccagaacgccgcggagatggacttccccgacgacgacgacgacgacgacgtggttcccgttccccaggtcaacagcttcggctaccagtggactggccaagcgttccacatgtgcgctggatgggtaagccccgaagaagacatgaacgaggaactcgagtgaagatcgctagcaaggttccagcaacaggatgaacattaaaaaaaaactacaacgtggttgtatgtccacgaccaggatcatgtgtgtgagtgtgtctgtgtgtgttcatgtaacagcagggtctaagggtaggtgagttcgagctgcccttcactgcatcgccggacgcgccgccgagcgtccgcgagcagcgagaagcggcgagcgagctagtgcaggattctttggtttgattcgtattctttgttgtaattgtaatctctcagttttcccgttcagcctggtcgtggagcgtcctgctctgctcctgctcctgctcccaaagatgagttgagttgcatgtaaatgtaacgtcggagcagcgacgcgtggggctggctggtatatgcctacaactacaagggctagcagcagaa

SEQ ID NO: 145586 - DNA, 130 bp, Zea Mays
ttttttttttatggccagcgtaggatgggctttttctctctatggacaagtgtctcacaaagtttactcgttacaaccagcgagggagctgattctacgaaacagtttccactttactcttccatttcac

SEQ ID NO: 145587 - DNA, 2310 bp, Zea Mays
ccgacactgcgtagtccaccactctttgcgctgctcttccaaaaatcttcgccgctgccatcatttctgcgtatcgtagtcgtagaggacacgagggagacttttttacctcacaaagacagccgcctgtgcctcgttgctgctacggtgctacccaccctgccacccatatgctcctcccaccatgatggcctcgacctcgttcgtctggtcggtgtggaccgtcgtgtcgctgacgctaacgcttgcctcggcatcagcagacgaccaagagggaggagcacactgcccgcccgtgctatgcggcggcgtgaagatcgccttcccgttcggggtcgtcccggagcaggcgacggccaccaactgcggcgcaatcgggttccaggtccgctgcgtcaatggcacgccgtacctcggatacagccggtacgaccactggctccaggtcctcagcgtcttctacaacaacgcctccttgatcgtcgccgactctcacgaactcgagacgctcggagcctcggacggcggcggctccgttgtctgccgcatccccgagaacaacagctccaccaaggtcggcctcccgttctccatcagccctctcaaccaggacctcatcctgtacaactgcaccaaggcgccggcgccggacgaggaggggcttgtggagatgacgagatgcggcaaccgcactttcgcccgcatcggagggcgttacggcgagccggacggcggcggatactccttggacggctgcggtgccactgtcgtgcccgtgcttgtaaaggacgatggcaaggcgaacgcgagcgactacgagcaactcataagtggcggcttcctcttgacatggcagtggcagacaagtaccaaagggaatggcaggaagattccactaatagtttcgatttcagtggctgcaagcttgctcctaccatgtatatatgtgttggtatggcataggcaaaaactggagttttttctatgcaagaagaccagcagtgccatagaagagaacattgaggccctaatattagcacatggatcactagctccaaaaaggtacaggtactcagaagtaacaaagataacatcttctcttaatattaagcttggggaaggtggttatggcatggttttcaagggaaggctagatgatggtcgtctagttgcagtgaaattcctgcatgactccaaaggtgacggtgaggagtttgtgaacgaggttatgagtattggcaggacatcacacattaatatcgttagcttatttgggttttgtttggaaggctcaaagcgggccctaatatatgagtatatgtcaaatggttctttggataagtatatatacacagagaatccgaaggcagttttaggatgggataagctctataccatagcaattgggattgctagagggttggaatacttgcaccacagttgtaatacacgcatagtccatttcgacatcaagcctcaaaatatccttctggatcagaactttcacccaaagattgctgattttggtttggccaagttgtgtcatatgaaagagagcaagctttctatgactggtgccagaggtacgcctgggttcatagctcctgaagtgcactctcggacattcggggttgtttcaacaaaagcagacgtttatagttatggaatgatgctgctagagatggttggaggcagaaaaaatgttaactcagcggctcaagagtcaagtgaaaagtattttccacattggatttacgaccactttggccaagaggatggactgcaggcgtgtgaggtcacacgtgaaaatgaagggatcgcaaaaaaactgagtgtgattggcctatcgtgcatccaaatattaccaatgcatcgccctaccatcggaaaggtcatggaaatgttcgagagaggatcggatgaactggacatgccaccaaggcaaaacttcagccaaatattcgaagatccagtacacagtttgaatgcggaaaccatgagcatgattagtggcaccaaagcaaaagcttatagtgaagtgctaaagatgaaggagataagcgtcgtgaactcaaaaaccatacaacggttgccaactctgtaaaacagttagttatctactacattggaaatgaacattaaatcgggagccaccaccaaaatacggtgtctccaaacaggagttggacttaaataatataaaatatataatggttgtgtcatgatattcggtgaactatggtattataaattgtagtttaaaaaaaacaatgttccgaagcagtcccttgtatgcattcgtcttgtttc

SEQ ID NO: 145588 - DNA, 1769 bp, Zea Mays
accttcaccacttgcgatgccatgctcccatggttgcgggcttgcggctctgtccttgtcgcggctctccctcgtgtcctgggtctggatggctgcatgggcgcgggctcgtggacacggcgtgcggcgaccggacgctggtcgccgtcgtcaggcgccccaacgtgcctggcagctactacttcttggagggatgcaacgccaccgtcgtgcccatgctcgcgaggcccggcgacgtggacggtggacccagcgaactacagggagttcgtccgtgagggattcctcttgacatggcaactgccgccgccgccgtcaccagccggtaccaaagggaatggcaggaagattccactaatagtttcgatttcagtggctgcaagcttgctcctaccatgtatatatgtgttggtatggcataggcaaaaactggagttttttctatgcaagaagaccagcagtgccatagaagagaacattgaggccctaatattagcacatggatcactagctccaaaaaggtacaggtactcagaagtaacaaagataacatcttctcttaatattaagcttggggaaggtggttatggcatggttttcaagggaaggctagatgatggtcgtctagttgcagtgaaattcctgcatgactccaaaggtgacggtgaggagtttgtgaacgaggttatgagtattggcaggacatcacacattaatatcgttagcttatttgggttttgtttggaaggctcaaagcgggccctaatatatgagtatatgtcaaatggttctttggataagtatatatacacagagaatccgaaggcagttttaggatgggataagctctataccatagcaattgggattgctagagggttggaatacttgcaccacagttgtaatacacgcatagtccatttcgacatcaagcctcaaaatatccttctggatcagaactttcacccaaagattgctgattttggtttggccaagttgtgtcatatgaaagagagcaagctttctatgactggtgccagaggtacgcctgggttcatagctcctgaagtgcactctcggacattcggggttgtttcaacaaaagcagacgtttatagttatggaatgatgctgctagagatggttggaggcagaaaaaatgttaactcagcggctcaagagtcaagtgaaaagtattttccacattggatttacgaccactttggccaagaggatggactgcaggcgtgtgaggtcacacgtgaaaatgaagggatcgcaaaaaaactgagtgtgattggcctatcgtgcatccaaatattaccaatgcatcgccctaccatcggaaaggtcatggaaatgttcgagagaggatcggatgaactggacatgccaccaaggcaaaacttcagccaaatattcgaagatccagtacacagtttgaatgcggaaaccatgagcatgattagtggcaccaaagcaaaagcttatagtgaagtgctaaagatgaaggagataagcgtcgtgaactcaaaaaccatacaacggttgccaactctgtaaaacagttagttatctactacattggaaatgaacattaaatcgggagccaccaccaaaatacggtgtctccaaacaggagttggacttaaataatataaaatatataatggttgtgtcatgatattcggtgaactatggtattataaattgtagtttaaaaaaaacaatgttccgaagcagtcccttgtatgcattcgtcttgtttc

SEQ ID NO: 145589 - DNA, 2366 bp, Zea Mays
ccgaaatctacccactccctccggcgccgctgcagtgccacccctccatcggcccatatcccaatccgctatgcaactgctgctcctactgctactcgcttccttcctcctccggctgcctgcagcggcggccagcgcggcagactcgtcatcaggctgctggcccaagacatgcggggacctcaatgtcacctacccgttctgggtggaggagcccgtccggcccccgtgcggaccgccgtccttccagctcatgtgcaacggcagccgcgcgttcctgagcagatccgtctaccaggcctaccaggtgctcggcatcttccccgagaacaactccttccacgtggtggaccacaacttcccgctcgtcaccggctgcccagcgccaacgatgaacatctcgcttcccggggcattcgtatttagcagagccaacaaagagctgctcttccttgggaagtgcacggggttcccgccggcggagtcggccgggtttcgcagcctgccttgcgacaacagctcctttgtccggctcggcgacggccggaatttctccagccaaagcatccagggcggcgtgccacaaggctgtctgttcacagtattgccgactctcggggctcctgatggaaatggggacgactacgtcgccagcatgaagaatgggtttctcgtggattgggaagcggtgccaggtgattgtcccaagtgcatggcacgcggcggggaatgcacgtacggcggtcccgacgccgagttcgcctgtgattgctccggtggcaagtgcgactgcagagtcagtttgaataaggttgtctacagcagatcatggatatgatcgtgcaaccattgttttgcactgtagactgcatcgttcacatagtgaattttgaaaaagggaatgagataggagatatgatgggtaccaaagggaatggcaggaagattccactaatagtttcgatttcagtggctgcaagcttgctcctaccatgtatatatgtgttggtatggcataggcaaaaactggagttttttctatgcaagaagaccagcagtgccatagaagagaacattgaggccctaatattagcacatggatcactagctccaaaaaggtacaggtactcagaagtaacaaagataacatcttctcttaatattaagcttggggaaggtggttatggcatggttttcaagggaaggctagatgatggtcgtctagttgcagtgaaattcctgcatgactccaaaggtgacggtgaggagtttgtgaacgaggttatgagtattggcaggacatcacacattaatatcgttagcttatttgggttttgtttggaaggctcaaagcgggccctaatatatgagtatatgtcaaatggttctttggataagtatatatacacagagaatccgaaggcagttttaggatgggataagctctataccatagcaattgggattgctagagggttggaatacttgcaccacagttgtaatacacgcatagtccatttcgacatcaagcctcaaaatatccttctggatcagaactttcacccaaagattgctgattttggtttggccaagttgtgtcatatgaaagagagcaagctttctatgactggtgccagaggtacgcctgggttcatagctcctgaagtgcactctcggacattcggggttgtttcaacaaaagcagacgtttatagttatggaatgatgctgctagagatggttggaggcagaaaaaatgttaactcagcggctcaagagtcaagtgaaaagtattttccacattggatttacgaccactttggccaagaggatggactgcaggcgtgtgaggtcacacgtgaaaatgaagggatcgcaaaaaaactgagtgtgattggcctatcgtgcatccaaatattaccaatgcatcgccctaccatcggaaaggtcatggaaatgttcgagagaggatcggatgaactggacatgccaccaaggcaaaacttcagccaaatattcgaagatccagtacacagtttgaatgcggaaaccatgagcatgattagtggcaccaaagcaaaagcttatagtgaagtgctaaagatgaaggagataagcgtcgtgaactcaaaaaccatacaacggttgccaactctgtaaaacagttagttatctactacattggaaatgaacattaaatcgggagccaccaccaaaatacggtgtctccaaacaggagttggacttaaataatataaaatatataatggttgtgtcatgatattcggtgaactatggtattataaattgtagtttaaaaaaaacaatgttccgaagcagtcccttgtatgcattcgtcttgtttc

SEQ ID NO: 145590 - DNA, 2232 bp, Zea Mays
ccgaaatctacccactccctccggcgccgctgcagtgccacccctccatcggcccatatcccaatccgctatgcaactgctgctcctactgctactcgcttccttcctcctccggctgcctgcagcggcggccagcgcggcagactcgtcatcaggctgctggcccaagacatgcggggacctcaatgtcacctacccgttctgggtggaggagcccgtccggcccccgtgcggaccgccgtccttccagctcatgtgcaacggcagccgcgcgttcctgagcagatccgtctaccaggcctaccaggtgctcggcatcttccccgagaacaactccttccacgtggtggaccacaacttcccgctcgtcaccggctgcccagcgccaacgatgaacatctcgcttcccggggcattcgtatttagcagagccaacaaagagctgctcttccttgggaagtgcacggggttcccgccggcggagtcggccgggtttcgcagcctgccttgcgacaacagctcctttgtccggctcggcgacggccggaatttctccagccaaagcatccagggcggcgtgccacaaggctgtctgttcacagtattgccgactctcggggctcctgatggaaatggggacgactacgtcgccagcatgaagaatgggtttctcgtggattgggaagcggtgccaggtgattgtcccaagtgcatggcacgcggcggggaatgcacgtacggcggtcccgacgccgagttcgcctgtgattgctccggtggcaagtgcggtaccaaagggaatggcaggaagattccactaatagtttcgatttcagtggctgcaagcttgctcctaccatgtatatatgtgttggtatggcataggcaaaaactggagttttttctatgcaagaagaccagcagtgccatagaagagaacattgaggccctaatattagcacatggatcactagctccaaaaaggtacaggtactcagaagtaacaaagataacatcttctcttaatattaagcttggggaaggtggttatggcatggttttcaagggaaggctagatgatggtcgtctagttgcagtgaaattcctgcatgactccaaaggtgacggtgaggagtttgtgaacgaggttatgagtattggcaggacatcacacattaatatcgttagcttatttgggttttgtttggaaggctcaaagcgggccctaatatatgagtatatgtcaaatggttctttggataagtatatatacacagagaatccgaaggcagttttaggatgggataagctctataccatagcaattgggattgctagagggttggaatacttgcaccacagttgtaatacacgcatagtccatttcgacatcaagcctcaaaatatccttctggatcagaactttcacccaaagattgctgattttggtttggccaagttgtgtcatatgaaagagagcaagctttctatgactggtgccagaggtacgcctgggttcatagctcctgaagtgcactctcggacattcggggttgtttcaacaaaagcagacgtttatagttatggaatgatgctgctagagatggttggaggcagaaaaaatgttaactcagcggctcaagagtcaagtgaaaagtattttccacattggatttacgaccactttggccaagaggatggactgcaggcgtgtgaggtcacacgtgaaaatgaagggatcgcaaaaaaactgagtgtgattggcctatcgtgcatccaaatattaccaatgcatcgccctaccatcggaaaggtcatggaaatgttcgagagaggatcggatgaactggacatgccaccaaggcaaaacttcagccaaatattcgaagatccagtacacagtttgaatgcggaaaccatgagcatgattagtggcaccaaagcaaaagcttatagtgaagtgctaaagatgaaggagataagcgtcgtgaactcaaaaaccatacaacggttgccaactctgtaaaacagttagttatctactacattggaaatgaacattaaatcgggagccaccaccaaaatacggtgtctccaaacaggagttggacttaaataatataaaatatataatggttgtgtcatgatattcggtgaactatggtattataaattgtagtttaaaaaaaacaatgttccgaagcagtcccttgtatgcattcgtcttgtttc

SEQ ID NO: 145591 - DNA, 1872 bp, Zea Mays
atggtgcaccgatctcctgctccagaagctaccaccgccctgttcttggccctgctacttcttctctttccccgaaccagctccaccaccaccaccacaggcggcgctccgaacacggcggcgccatgcgcgccggcgtggtgcggggacttggccatctcctacccgttctggctcgcaggcacgcatccgcccaagtgcggctacgaccaagggttcgaggttacctgtgacaaagccaaggcgtacctcaagaactcgacctgcacgtaccagatccagtccatcttctacgccatgaatctactcagagtcgccatcgtcggcctcctgtcgttggacgacggcacttgcaacgtcgacaagttcgtcaacgcctccttcgtccccagtccggcgttcgaaatcgagccccaacaaaaccaggagctgttcttcgtctacgactgcaacctgcgagcgccgcagctgcctcggtcttggacgcccttgcgctgtggcaataatggctcgttcacatggctttctgggcagtacaggcccgaagacagctccatggcgctgccggggaactgcaacgttgcgatgataccggtggtggcgtacgagggggcgaccgcggcagattatcagcggctcgtggagggaggattttttcttagttactacctcacggacactgaggaccactactactacggccagtgccaagcttgctcgtaccgcgccggccacggccaatgccggacaattgtcagcgacgacgggttccagtgctactgctctgacggcgtctactcgacgacggcctgcggaaccaagagggctaactggaagacaacaattgtaggtccgacaacagcagctgcaagtttgctcgttttatgtatttgcttgttgctatggaagagcaaggtgaaaaacctttggtttctccttgccaaaaagacgagcagcagcgccaatgacaggaacactgaggctttaatagagtcatacggatccctagctccaaaaagatacaagtactcagaggtactgaacataacttcttccctcgacaataagcttggagaagagcgctcaagaagggctcttatatacgagtacatgccaaatggttctttggacagggtggcagaattgaagctctatgcgatagcaatcgggatcgctcgtggcctagaatacctgcaccacagttgtaatacacggatagtgcacttcgatatcaagccccaaaatatccttctagataaggacttctgccccaaaatcgctgactttggtttagctaaactgtgtcactccaaggacagtaagctttcttcagtgactgatgctagaggaaccatcggatttattgcccctgaagtgcactcccgaacctttggagttgtctcgacgaaatcggacgtttacagctatggaatgatgttgctagagatggttggaggcaggaaaaacgtcaagtcagtggttgaaaattccagcgagaagtattttccacattggatccatgatcacttcgcccaagaaggtggatcatcacagggttatggtggtggtgtcacaggtgaagtggaggaaactgccagaaagatgaccctgattggtctgtggtgcatccaaattctgcctgtgcatcgccctaccataaccaaggttctagagatgtttgaaagagacttacacaaacgactggacatgccaccgaagcagaacttcagtcaaatactcgaagattcagctgtttacaatttgaatacagagagtatgatgagtcccagcagcagctctatggaaacgcaaggttctagtgaaggactgaaggctgaggagatgaagtgtgtgaattcaaatgttatatga

SEQ ID NO: 145592 - DNA, 1673 bp, Zea Mays
ctcggccagctaaacactcacgatcgcattctataaatatcgacacccgtcttcctcccgtttcatcaaatccaagaactctcaatcagccagcccacagccaattaatctcgctagagggccggccggccggctagctaaccacgagagagaaaaaaaaagatcgcgattgctttcgcgcgcgcgctgcgagaggcgccccggccatgtcttcctccccagcagacctctcctgcgtcctcccccgcgttctcatcgtctcgcgccgcactgtccgcaagaacaagttcgtcgacttcgtcggtgagtaccacctggacctcatcgtgggctacggcgcggtgccggtgatcgtgccgcgcgtggcgggcgtgcatgcgctgctggactcgttcgagcccatccacggcgtgctcctctgcgagggcgaggacgtggacccgtccctctacgagtccgccgacgcctcgctctctccggagcagctggaggccgtgcggcgcctgcacgcgagcgacgcggccgtcgaccgcgagaaggactccatcgagctccgcctcgcgcgccgctgcctggagcgcaacatcccctacctcggcatctgccgcggctcgcaggtgctcaacgtggcctgcggcggctcgctgtaccaggacgtggagcacgagctggctgaggtccagcaggtccagcacatcaactacgccgactacgacgagcaccgccacccggtgcgcgtcgtgcccggcacgccgctgcacgagtggttcgcgggcgacctcgccgacggcgcgcggctcatggtcaacagctaccaccaccagggcgtgcggcgcctggcgcagcggttcgtgcccatggcgttcgcgccggacgggctcgtcgaggcgttctacgacccggcggcgtacagccccggcgagggcaggttcatcatgggcctccagttccacccggagcgcatgcgcaggccaggctccgacgagttcgactaccccggctgcgcccgggcgtaccaggagttcgtccgcgccgtggtcgcgtaccaggagaagacggcggcggcggctacgcacttgccccggccgggcgccgcgctccccctccccgcgtcgtcgtcgcccaagctgagcaaggagatggagaggcggcgcaaggtcatctcccggagcttctcgctcgccaaggacatgtacctctccggcggccgcaccaagccggcggagcagcgcgacctcgaagccggcgccgagttcctcgagtcgaacacggcgtcgctgagcgtgcagcaggagaagcggctgaagcagatgggcgccacggtgcggaacgcgtcagggtacctcaacagcctcaaggtgaagggcgtacgcgaggcggcggcgcgggcactcatggcggagatgaccgtcaaccagatctccgacctcgtcaccttctaccagacaatgggcaagatctgttccgaggtgctcgatgccaagctgcagggtttgcacctgagcacgaacctgtacgaatgaattaagactcagcgtgcagtgtatcaacctatatgggtgttcccactcctgcttgcggatcctggatccctgatgttattggcatgataaatcaatgtcgtcaaggcagatgtctattgattgttaataccatcgtgatactgttccaga

SEQ ID NO: 145593 - DNA, 1991 bp, Zea Mays
gttgagtctggttctagtcccttaacagcagatggtgatattagtgttgatgtgtcagtaaagggtgctaaaccatctatttctagggcagagtgctggaagcatatggataagcgggagattatcgagaatggtataaaaagttatattgttatatgtcactattgtaaaactgagttgagtgcagattctgctggtggcactaggcatttgaatcgacacttcaaagcttgtttaaaaaaggtagggaaaacttttggtgcaggtatgcaaactcaactaaactttgctgcggacggcactgtaagtacttgggtttacaatccacaattagctagtgaagaaattattaaatacattgtttctaaagacttgcctattatgatgggagaaagccctaattttaagaatctgattcagtgtgctttctgcccacaataccaacctgttagtagaactactataaaatcaggtctcagtatcacaaacaacttgctgttcttaaagaaaatttaaaaaaaatcagttttcgtttgctttaacttcatatatttggacttcatcacatcaaaagactagttacatttctgttgttgcacactatttggataatttatattgtcttcataagcgtgttataggttttagagtgatgtatgattcacatactggtactgcaattgctaatcatattcttgaggtggttaatgattttaacataaggaataagattttgtctattactcttaataatgcttcctcaaatataaatgcgatagaatctcttacccctcatctgcagtcatacatagatggttatgttgtccaacaaaggtgtgtgtgccacattatcaatctagttgttcaggatggcataacagttgttagtaagtatttggataatgttcgtgctgctgttcgtttcataactagtactcctcaaatgattaaaaaatttggtgagtattgcaaggcaaataatttgaaatcaaggaaatttggcctcgatatgaagataagatggaattcaacctaccttatgcttaagaaactggaaggttataaaaagattataactgtctttgtgaatgttaatgctcttgatattgatttggtgctaactgaagctgattggtatatggtgaaacattttagagagttcttgatgcccttttatgtagccacaaatgttttatcaggtgtttactatcttacatcctgcttagtcattgattacatttggttaattgttgagtcatttgctaagcacagatctgattcccttctttgcactgttgttgctccaatggaattaaaatttctaaaatattttgataacatatcccatatatattgctttgcaactattttggatcctagaaaaaaacttgatgggtacaatctactttagaaggaattggtgacttgctatatatggactattcagatggttttaatcatgtgaaagataaactatttcgtgtttttgcttttactataacaaatatggtgaaaatgatgttacagaaacaatggatgaaactgatatagaacaatcagatagttctttgacagcccacttatggaagagatcgaagggaaaagaatttgctaactcaacagtaaatcaaaggtggaatcctaatgttgaattgaattattatatgtctactaactttgcagccactgatcgcaccttgaaaggtgataaggtgaaattacttgaatggtggagggaacacaagtatagtttcccagtattatcttattttgctagagatattcttcttgttcctgtttcgactgtttcttctgatgccacattcaacatattgggtagaattattgaagaaagtagatcctatcttggacctgagacagtggaggccatcacatgccttaaggattggaaaagagcagaagatagaaagcagcatcaacttgaagattctaagattgaacaagcttttgctgatttcagccatgattag

SEQ ID NO: 145594 - DNA, 111 bp, Zea Mays
ctgcagcagcaggaacagctacagccttctcgcactcctggatcttttaggacctgatgaatcgaaagttggcagtgtttaatttctcaaaacaaaaacaaaacaaaaaaa

SEQ ID NO: 145595 - DNA, 449 bp, Zea Mays
gagagaatggcagcagcagcgatgaacgggcactatttgcatgcatttggcagggagaggacgacgctccacgccgccctcggtgggcgcagagccgcggacgtcatcctgtggagggacaaggcggcctcggcgtgcatcctggccgcggcgacggcggcgtggggcctgttcgaggtggcggagtaccacctcgtcacggtggcgtgctacgtcgccatggtcgccatgctcgtctccttcgtctggaccaacgcttctgcgttcttcaacatgtgagtgagcaataaaaataaaaagcatccttcgattccagctgtcggagcgggcgggcaggcaggcggtccagcacagctggcagcgtggcgaggatcctgctgatgtctccttgctgtcgtaaggggctgagagccaccggcgtcatggtgcacgcggggcaccatcattac

SEQ ID NO: 145596 - DNA, 1975 bp, Zea Mays
gaagatacccgttgcaacgcgtcgagcggcaacgctggcacggagctcaagtctccacacaacctccgccgccgggaggaccaacacgtcagtgacggcagctgactgcagaggatctcatcgcccgccgaccgccgcaaccgcgaccgcgagcctcgattttgaactgaactgaaaaacctagaattcttttagggtttccgaggtttctctttctcgcgtttccactgtctggtcttccccgatcgccgcgaaagcagtaaagagtccgcaatctttgccgcccccaccctcatcctctgctctcgtatcgtctcctctccacttcctctttctctcctctacaagggtatccactatccagaatcacctctatcatcaggtgaactgtttctcctctctctctttttcatttcatttttattccagaaagtattgttggtttgcggctttacttcctctgtgcagtaggcagtgccagttgaagtgtagttcttttgtctccgatcatggtcgcctgtgatttctgttcttgcgagggtttggtgcttgccgcggtggggattggtgcgggttttcgtcaaacggcgcctcatgtgttttacttcttacagtaactattttagttgcggacttgcggtttttctttgcatcgtgtgacaagttctctcgaagaacagaactgaaataaacccagcattactcaggtttggtgatacgatcgaagcagactactcttagcaacccattcagatgaatctgctctgggctgcactatgctagtttataatttgaaattaagctgatgaaactcatttatatggccgcaatgccgtcttcagtatattgagtattttggtactggtaattggttctattcatttcatccatttgttgtcaacaaaacaggatgcgggaggcacagttgggctcccacacgattcagacgcacggagtgagactggccagaaagcacacacacgactgggttgttctgattcttctggctgcactggtggttgccgtgcattacgctcccccgttcagtcgatttgtcgggaaggatatgatgactgatattaggtacccggtgaaaccaagcacagtaccagcatgggctgtccctatgatctctatactctgtccctggctcgtcttcatatccatatatgttgccaggagagacgtttatgatctgcatcacgctgcactaggtgttcttttcgctgtgctgataactgcagtttttaccgatgtgataaagactgcagtagggagaccgaggccagacttcttctggcgatgctttcctgatggaaagcagttatacgatcaggtgattggcgatgtgatttgccatggtgataaaaacttcttaaaagatgggcgcaagagctttcctagtggccacacttcgtgtaagtttgcactaggtcttttgctggtcttggatttttgtcactctacctgtcaggcaaaattaaggccttcaatcgccaaggtcacgtggccaaactttgcatagtgatccttccgcttcttcttgcttcactcgttggggtttcaagagtagatgattatcgacaccactgggaggatgtgtttgttggcggtcttattggatttatcatggcagtgctatgttacctgcatttctttcctcctccataccatgatcaaggttgtagaccgtatgcatacttccatatgctggaagaacttcaagcggcaaattcaaacaacgcacaaaaccaacagtccacaggtgatcatcgcattggcatgtccgagcagcagcataacaggacatcaagaaacgatttggaatctggaaccgtgtaacatgcctcctgcacttttactgaagtagcagcagcgatgtacattggacagtaagtgcaacctaacctagtatgcgtgtactcgacatgtgttacaatctatataattagaggtatatagtttctccttaccc

SEQ ID NO: 145597 - DNA, 1725 bp, Zea Mays
gaagatacccgttgcaacgcgtcgagcggcaacgctggcacggagctcaagtctccacacaacctccgccgccgggaggaccaacacgtcagtgacggcagctgactgcagaggatctcatcgcccgccgaccgccgcaaccgcgaccgcgagcctcgattttgaactgaactgaaaaacctagaattcttttagggtttccgaggtttctctttctcgcgtttccactgtctggtcttccccgatcgccgcgaaagcagtaaagagtccgcaatctttgccgcccccaccctcatcctctgctctcgtatcgtctcctctccacttcctctttctctcctctacaagggtatccactatccagaatcacctctatcatcaggatgcgggaggcacagttgggctcccacacgattcagacgcacggagtgagactggccagaaagcacacacacgactgggttgttctgattcttctggctgcactggtggttgccgtgcattacgctcccccgttcagtcgatttgtcgggaaggatatgatgactgatattaggtacccggtgaaaccaagcacagtaccagcatgggctgtccctatgatctctatactctgtccctggctcgtcttcatatccatatatgttgccaggagagacgtttatgatctgcatcacgctgcactaggtgttcttttcgctgtgctgataactgcagtttttaccgatgtgataaagactgcagtagggagaccgaggccagacttcttctggcgatgctttcctgatggaaagcagttatacgatcaggtgattggcgatgtgatttgccatggtgataaaaacttcttaaaagatgggcgcaagagctttcctagtggccacacttcgtgtaagtttgcactaggtcttttgctggtcttggatttttgtcactctacctgtcaggcaaaattaaggccttcaatcgccaaggtcacgtggccaaactttgcatagtgatccttccgcttcttcttgcttcactcgttggggtttcaagagtagatgattatcgacaccactgggaggatgtgtttgttggcggtcttattggatttatcatggcagtgctatgttacctgcatttctttcctcctccataccatgatcaaggttgtagaccgtatgcatacttccatatgctggaagaacttcaagcggcaaattcaaacaacgcacaaaaccaacagtccacaggtgatcatcgcattggcatgtccgagcagcagcataacaggacatcaagaaacgatttggaatctggaaccgtgtaacatgcctcctgcacttttactgaagtagcagcagcgatgtacattggacagtaagtgcaacctaacctagtatgcgtgtactcgacatgtgttacaatctatataattagaggtatatagtttctccttacccagtgttagcctgcttcatcttgtgtgaaatcagaaggcagtaaggcctaaccctagatgttctaggtctacctgtggccaaattagttgtaagagttgctagtggaggcactgataaggaacttattccagtaatagaaaaaccagcagaaagtagagtagaaagaaaatgacaggcacatctcctaaacatcgtggtgcatgttgcaccgtccaatgggttccaagactcgttctgttcgtatatcgaagggaaaaatacacatctgttttgtctc

SEQ ID NO: 145598 - DNA, 1816 bp, Zea Mays
gaagatacccgttgcaacgcgtcgagcggcaacgctggcacggagctcaagtctccacacaacctccgccgccgggaggaccaacacgtcagtgacggcagctgactgcagaggatctcatcgcccgccgaccgccgcaaccgcgaccgcgagcctcgattttgaactgaactgaaaaacctagaattcttttagggtttccgaggtttctctttctcgcgtttccactgtctggtcttccccgatcgccgcgaaagcagtaaagagtccgcaatctttgccgcccccaccctcatcctctgctctcgtatcgtctcctctccacttcctctttctctcctctacaagggtatccactatccagaatcacctctatcatcaggatgcgggaggcacagttgggctcccacacgattcagacgcacggagtgagactggccagaaagcacacacacgactgggttgttctgattcttctggctgcactggtggttgccgtgcattacgctcccccgttcagtcgatttgtcgggaaggatatgatgactgatattaggtacccggtgaaaccaagcacagtaccagcatgggctgtccctatgatctctatactctgtccctggctcgtcttcatatccatatatgttgccaggagagacgtttatgatctgcatcacgctgcactaggttatttgtaatccccctgctatcttctgtcagtttacttcttcagtgtgctgagttgctgactgacatgtcgctgaataattcgttcgtgtataaattctccaggtgttcttttcgctgtgctgataactgcagtttttaccgatgtgataaagactgcagtagggagaccgaggccagacttcttctggcgatgctttcctgatggaaagcagttatacgatcaggtgattggcgatgtgatttgccatggtgataaaaacttcttaaaagatgggcgcaagagctttcctagtggccacacttcgtggtcttttgctggtcttggatttttgtcactctacctgtcaggcaaaattaaggccttcaatcgccaaggtcacgtggccaaactttgcatagtgatccttccgcttcttcttgcttcactcgttggggtttcaagagtagatgattatcgacaccactgggaggatgtgtttgttggcggtcttattggatttatcatggcagtgctatgttacctgcatttctttcctcctccataccatgatcaaggttgtagaccgtatgcatacttccatatgctggaagaacttcaagcggcaaattcaaacaacgcacaaaaccaacagtccacaggtgatcatcgcattggcatgtccgagcagcagcataacaggacatcaagaaacgatttggaatctggaaccgtgtaacatgcctcctgcacttttactgaagtagcagcagcgatgtacattggacagtaagtgcaacctaacctagtatgcgtgtactcgacatgtgttacaatctatataattagaggtatatagtttctccttacccagtgttagcctgcttcatcttgtgtgaaatcagaaggcagtaaggcctaaccctagatgttctaggtctacctgtggccaaattagttgtaagagttgctagtggaggcactgataaggaacttattccagtaatagaaaaaccagcagaaagtagagtagaaagaaaatgacaggcacatctcctaaacatcgtggtgcatgttgcaccgtccaatgggttccaagactcgttctgttcgtatatcgaagggaaaaatacacatctgttttgtctc

SEQ ID NO: 145599 - DNA, 1559 bp, Zea Mays
cggagctcaagtctccacacaacctccgccgccgggaggaccaacacgtcagtgacggcagctgactgcagaggatctcatcgcccgccgaccgccgcaaccgcgaccgcgagcctcgattttgaactgaactgaaaaacctagaattcttttagggtttccgaggtttctctttctcgcgtttccactgtctggtcttccccgatcgccgcgaaagcagtaaagagtccgcaatctttgccgcccccaccctcatcctctgctctcgtatcgtctcctctccacttcctctttctctcctctacaagggtatccactatccagaatcacctctatcatcaggatgcgggaggcacagttgggctcccacacgattcagacgcacggagtgagactggccagaaagcacacacacgactgggttgttctgattcttctggctgcactggtggttgccgtgcattacgctcccccgttcagtcgatttgtcgggaaggatatgatgactgatattaggtacccggtgaaaccaagcacagtaccagcatgggctgtccctatgatctctatactctgtccctggctcgtcttcatatccatatatgttgccaggagagacgtttatgatctgcatcacgctgcactaggtgttcttttcgctgtgctgataactgcagtttttaccgatgtgataaagactgcagtagggagaccgaggccagacttcttctggcgatgctttcctgatggaaagcagttatacgatcaggtgattggcgatgtgatttgccatggtgataaaaacttcttaaaagatgggcgcaagagctttcctagtggccacacttcgtggtcttttgctggtcttggatttttgtcactctacctgtcaggcaaaattaaggccttcaatcgccaaggtcacgtggccaaactttgcatagtgatccttccgcttcttcttgcttcactcgttggggtttcaagagtagatgattatcgacaccactgggaggatgtgtttgttggcggtcttattggatttatcatggcagtgctatgttacctgcatttctttcctcctccataccatgatcaaggttgtagaccgtatgcatacttccatatgctggaagaacttcaagcggcaaattcaaacaacgcacaaaaccaacagtccacaggtgatcatcgcattggcatgtccgagcagcagcataacaggacatcaagaaacgatttggaatctggaaccgtgtaacatgcctcctgcacttttactgaagtagcagcagcgatgtacattggacagtaagtgcaacctaacctagtatgcgtgtactcgacatgtgttacaatctatataattagaggtatatagtttctccttacccagtgttagcctgcttcatcttgtgtgaaatcagaaggcagtaaggcctaaccctagatgttctaggtctacctgtggccaaattagttgtaagagttgctagtggaggcactgataaggaacttattccagtaatagaaaaaccagcagaaagtagagtagaaag

SEQ ID NO: 145600 - DNA, 973 bp, Zea Mays
ttggtactggtaattggttctattcatttcatccatttgttgtcaacaaaacaggatgcgggaggcacagttgggctcccacacgattcagacgcacggagtgagactggccagaaagcacacacacgactgggttgttctgattcttctggctgcactggtggttgccgtgcattacgctcccccgttcagtcgatttgtcgggaaggatatgatgactgatattaggtacccggtgaaaccaagcacagtaccagcatgggctgtccctatgatctctatactctgtccctggctcgtcttcatatccatatatgttgccaggagagacgtttatgatctgcatcacgctgcactaggtgttcttttcgctgtgctgataactgcagtttttaccgatgtgataaagactgcagtagggagaccgaggccagacttcttctggcgatgctttcctgatggaaagcagttatacgatcaggtgattggcgatgtgatttgccatggtgataaaaacttcttaaaagatgggcgcaagagctttcctagtggccacacttcgtgtaagtttgcactaggtcttttgctggtcttggatttttgtcactctacctgtcaggcaaaattaaggccttcaatcgccaaggtcacgtggccaaactttgcatagtgatccttccgcttcttcttgcttcactcgttggggtttcaagagtagatgattatcgacaccactgggaggatgtgtttgttggcggtcttattggttgtagaccgtatgcatacttccatatgctggaagaacttcaagcggcaaattcaaacaacgcacaaaaccaacagtccacaggtgatcatcgcattggcatgtccgagcagcagcataacaggacatcaagaaacgatttggaatctggaaccgtgtaacatgcctcctgcacttttactgaagtagcagcagcgatgtacattg

SEQ ID NO: 145601 - DNA, 907 bp, Zea Mays
ctccaattctgttgtctgatgcaagctcgaactcactctattcagcactgatgtggggcgttcgaccttttgctagatgatctctatactctgtccctggctcgtcttcatatccatatatgttgccaggagagacgtttatgatctgcatcacgctgcactaggtgttcttttcgctgtgctgataactgcagtttttaccgatgtgataaagactgcagtagggagaccgaggccagacttcttctggcgatgctttcctgatggaaagcagttatacgatcaggtgattggcgatgtgatttgccatggtgataaaaacttcttaaaagatgggcgcaagagctttcctagtggccacacttcgtggtcttttgctggtcttggatttttgtcactctacctgtcaggcaaaattaaggccttcaatcgccaaggtcacgtggccaaactttgcatagtgatccttccgcttcttcttgcttcactcgttggggtttcaagagtagatgattatcgacaccactgggaggatgtgtttgttggcggtcttattggatttatcatggcagtgctatgttacctgcatttctttcctcctccataccatgatcaaggttgtagaccgtatgcatacttccatatgctggaagaacttcaagcggcaaattcaaacaacgcacaaaaccaacagtccacaggtgatcatcgcattggcatgtccgagcagcagcataacaggacatcaagaaacgatttggaatctggaaccgtgtaacatgcctcctgcacttttactgaagtagcagcagcgatgtacattggacagtaagtgcaacctaacctagtatgcgtgtactcgacatgtgttacaatctatataattagaggtatatagtttctcctt

SEQ ID NO: 145602 - DNA, 862 bp, Zea Mays
cccaaaaaaaaagcaacgaagctaaaaacactcacttctctgcttgttaggatagctaattgtggtccgactccagacctcctgcgcgcgctctagcatgggccatggattgatgatggtcggacgacactaaaccctttcgtgatcggcagtagcggcggcaggcgggtagtagtaggagtccgcggcgtcccctctgtctctgtgggcaggcggcggctgtgcacgttcgtagtggccgtagctgtgcggcgcggcaccgcgcgctccatggccttcggcggcggcggcgggctgctgctgctgctgcttcagcgtcccgtcggctccggcgtacgggtacgacgccgccttctcctgcgcgccggcgtgcacggggccgctcctcacgtcgttggtcgccttgcggcccgcctcggcgccggcagccgccgtgcgcgcggggtagccgtcgccgtggccgttgctgttgtagtggccaccgttgcgctgcgtcgtcctgctcgcgccgtgcttgttcggcggggcatgaaagtgggcctcatcggcggggggcgcgccgaagcaggagttgatccggagacacattcttggacgcgcggcggcgggtggtggttggtcttggtcccccctcgacctctacccgactgccttgttgctgatatgcgttgtgtgctagtaactgctaagtgtactgctatgctatagtaggagagagggagacgggtgttcgatgagagttgcttgcagttgcagcctttcaggccactaagcactaggcgtttttttttgttcttggtggcctgtgctggtgtgctgaactgctggtgtgggggcagcatatatacggtccggagctcgt

SEQ ID NO: 145603 - DNA, 986 bp, Zea Mays
gagcgtccccacgccgcgcgcaccagcgcgtacacaaaaccctagcggcacaccgactatataatccttccccgcatttctgcccaccgcctccgccggctcccccactcagaaaacccagccgccgccgcatcggcctcccaggtaagcagtagcgtccaccccagccgccgccatgaagcgcaacccccgcgtcacgagctcccgccggaagtgccgcaaggcgcacttcacggccccgtcctccgtccgccgcgtgctcatgtccgcggcgctatcgacggagctccgccacaagtacaatgtgcgttccatcccgatccgcaaggacgacgaggtgcaggtcgtgcgcggcacctacaagggccgtgagggcaaagtggtgcaggtgtaccgccgtcgctgggtcatccacgttgagcggatcacccgcgagaaggtgaacggctccaccgtgaacgtgggcatccacccttccaaggtcatggttacaaagctgaagcttgacaaggaccgcaaggcgctcctcgaccgcaaggcccggggccgcgccgccgacaaggctaagggcaagtttactgccgacgacgtcgccgccgctgctggtggcgccgccgccactggcgcgtctctccaggagatcgactaggcgcttcgcggggatctgatggtggtcctaccgcctattactccttatcgctctagtttttgctatcaatgattatgtgctaggagttttatgttacttataaactgctttgagcctcgatgggagttgaacttaatgtggagtgtatctgagatatgaagaactcattatatggctaatatctcttgttgtgttctgctaaatggttgccgagttttggctttactatattgcttattacatgcatctagtggtttatgttttcagtttaaaattttcttacctattgtgttaaattacctggaatgatcgttgtgggatgtatttctaattatgc

SEQ ID NO: 145604 - DNA, 1697 bp, Zea Mays
gtagagctccactctatgattctctagctccgagagctgattctctaatggagtgattctgggcgattctctggtaggagtgaatttgttgatgaattgcgtttggctgctagttgtacccaagcttgtttaagtgagaacctgatctgttctttgctcttacttcctcagcaaatatttcacaagctatcttaacattttcatcgcaccagtctgcattatcctccttcatggtgctgttattgccacaaccatgaataataaaaaaaagataaatcaaagtgctagctcttctaacatggaaaacaacaggtataaagcagcaagcatagattgatgatgagcttctcgacttgtgattttatttattttttcgtgcagaacatttctagaaatggtgctgctggactggacgtgtgaactttggattttcacagcttctatactcgtgtgcaaagattttcttaaaaatgattttcaaatcaagaaaccaatagacaccgcaggagctagagcagaaggaaaaaacactcgcgtcctcacctcaatcggctacagattagagggagagaggaatgcaacttcaccttgcacactgaaagacgcgagacgaagagatggcgtagtagtggacggaaggggcttgggagtgttctggacggaaggggcggcagcctggatctccagcgtcctaggctagtagcggctggtagcttggcgccgccgcgccgcctccaaccctaatggccacggtctggacaaaagccaggctgggcttgtggctggatgcccgagcggctcggtctcggatcgtgtcgtcctccgcctccgacgccgcgccgttcgagaagcccagggccgtggtcaagaaggtcctcgcgcagtcgcagcccgagggtcagggtgccaccgtccgtaggagcatcggcaggcacgagctccgcaacctggacccgttcctccagctcgacgagttcacagtctccaagcccgccgggtttcccgaccacccgcacagaggattcgagaccgtcacccacatgtttgagggggccatcacccaccaggacttcgctggtcacaagggcaccatcaggacaggggacgtgcagtggatgacggcggggcgaggcatcgtgcactcggagatgccggctggggacggcgtgagcgagggcctgcagctctggatcaacctctcctccaaggacaagatgatcgagccgcgataccaggagctggagcgcaaggacatcagccgcgcggagaccgaggacggcgtggaggcccgcgtcatcgccggggaggccttcggcgtggcgtcccccgtgtacacgcgcactcccatcatgtacgtggacttcaccatgcgacctgggtcccgcctgcaccagcctgtcccggagggctggaacgccttcgtctacgtcgtcgacggcgagggcgtattcggacgggagacggccacggcacaccactgcctcgtcctcggctccggcgacggcgtcagcgtgtggaacaggtccgccaggccgttaaggttcgtcctcgccgccgggcagccgctcggtgagcccgtggtgcagcacggacccttcgtcatgaactcgcacgccgagatacagcaggccatggaagactactcctacggcaagaacggcttcgagagggccggccagtggagctcctccgcctga

SEQ ID NO: 145605 - DNA, 1593 bp, Zea Mays
gggagccggtagagcaggtttttttcgctcccatgtgccagtacaattattggacgcgattcgctccgctccttcggtgaagcgtctggttttttgaccgtttggcatatgagaattgattctgcttcggagcggagctgaaaaagcgctaccaaacgcagcctaaatacctccgccaaggagctaggagtgtggcgtgaactaaccagcacgggcgctgagggctgaggccgcgacgacgacgaccatgatgaggctgaagcagcacatgggcctggtctcctcccctacccctgccatcgtcgtgaggctcggcaacaacacaccccaccgccgccgagcaactcggtctcggatcgtgtcgtcctccgcctccgacgccgcgccgttcgagaagcccagggccgtggtcaagaaggtcctcgcgcagtcgcagcccgagggtcagggtgccaccgtccgtaggagcatcggcaggcacgagctccgcaacctggacccgttcctccagctcgacgagttcacagtctccaagcccgccgggtttcccgaccacccgcacagaggattcgagaccgtcacccacatgtttgagggggccatcacccaccaggacttcgctggtcacaagggcaccatcaggacaggggacgtgcagtggatgacggcggggcgaggcatcgtgcactcggagatgccggctggggacggcgtgagcgagggcctgcagctctggatcaacctctcctccaaggacaagatgatcgagccgcgataccaggagctggagcgcaaggacatcagccgcgcggagaccgaggacggcgtggaggcccgcgtcatcgccggggaggccttcggcgtggcgtcccccgtgtacacgcgcactcccatcatgtacgtggacttcaccatgcgacctgggtcccgcctgcaccagcctgtcccggagggctggaacgccttcgtctacgtcgtcgacggcgagggcgtattcggacgggagacggccacggcacaccactgcctcgtcctcggctccggcgacggcgtcagcgtgtggaacaggtccgccaggccgttaaggttcgtcctcgccgccgggcagccgctcggtgagcccgtggtgcagcacggacccttcgtcatgaactcgcacgccgagatacagcaggccatggaagactactcctacggcaagaacggcttcgagagggccggccagtggagctcctccgcctgatcggcgaggctatcgcgttaaattaaataaatgtgtgtaatacacacagctcaacgcttcccttaagttatgtagcaacgccatttgttggtgattaacgagtgatcgagcaagcttaaaaaagttccactccttttaaacttatatatttatcggtattttagctaatacaatagtttattgagactattgtattcgtgtatcgaaagttatgtagcaatgccatttgtgggtgattaccgtgttttccggtcgaagtatcagctagttcaatcatttataactggagacatttgaccttgtttggaacttcacaatcatttaacttgttcgtgctatgaaattattat

SEQ ID NO: 145606 - DNA, 1676 bp, Zea Mays
tttttcgctcccatgtgccagtacaattattggacgcgattcgctccgctccttcggtgaagcgtctggttttttgaccgtttggcatatgagaattgattctgcttcggagcggagctgaaaaagcgctaccaaacgcagcctaaatacctccgccaaggagctaggagtgtggcgtgaactaaccagcacgggcgctgagggctgaggccgcgacgacgacgaccatgatgaggctgaagcagcacatgggcctggtctcctcccctacccctgccatcgtcgtgaggctcggcaacaacacaccccaccgccgccgagcaagtacagcaattactactcatagcacccaaaagcagctcctgctcctcgtgatctcctcctcctgctccttttctccgtcgtcttcttgacccctgccgtctcgttgcccccagctcggtctcggatcgtgtcgtcctccgcctccgacgccgcgccgttcgagaagcccagggccgtggtcaagaaggtcctcgcgcagtcgcagcccgagggtcagggtgccaccgtccgtaggagcatcggcaggcacgagctccgcaacctggacccgttcctccagctcgacgagttcacagtctccaagcccgccgggtttcccgaccacccgcacagaggattcgagaccgtcacccacatgtttgagggggccatcacccaccaggacttcgctggtcacaagggcaccatcaggacaggggacgtgcagtggatgacggcggggcgaggcatcgtgcactcggagatgccggctggggacggcgtgagcgagggcctgcagctctggatcaacctctcctccaaggacaagatgatcgagccgcgataccaggagctggagcgcaaggacatcagccgcgcggagaccgaggacggcgtggaggcccgcgtcatcgccggggaggccttcggcgtggcgtcccccgtgtacacgcgcactcccatcatgtacgtggacttcaccatgcgacctgggtcccgcctgcaccagcctgtcccggagggctggaacgccttcgtctacgtcgtcgacggcgagggcgtattcggacgggagacggccacggcacaccactgcctcgtcctcggctccggcgacggcgtcagcgtgtggaacaggtccgccaggccgttaaggttcgtcctcgccgccgggcagccgctcggtgagcccgtggtgcagcacggacccttcgtcatgaactcgcacgccgagatacagcaggccatggaagactactcctacggcaagaacggcttcgagagggccggccagtggagctcctccgcctgatcggcgaggctatcgcgttaaattaaataaatgtgtgtaatacacacagctcaacgcttcccttaagttatgtagcaacgccatttgttggtgattaacgagtgatcgagcaagcttaaaaaagttccactccttttaaacttatatatttatcggtattttagctaatacaatagtttattgagactattgtattcgtgtatcgaaagttatgtagcaatgccatttgtgggtgattaccgtgttttccggtcgaagtatcagctagttcaatcatttataactggagacatttgaccttgtttggaacttcacaatcatttaacttgttcgtgctatg

SEQ ID NO: 145607 - DNA, 2030 bp, Zea Mays
ttatttgcaaaaaaaccgcaatttggccgccggaaaccattcgctcatcaaggcgaggagatgagatcttgcagcggagagcatatgcctacaaagttctcaccccagctggttccctccaatattcccctccgacgatggaatatccccgcagttccaacccaggcccgccttcttcatcgtcttcagtccttctcccgcttatatacgcaacggcgacctcgccctcttccttgctcgtacaaatcatcacacgcagccacgcaggtagaacacaagcgccgtgcacgcttgcgcaagcccaaggattgccgctctgctctgtctcctccggtggccgcaggggcaatggcgattggcgggaaggaggtcaaggatgacctggaggaggcgccgccgccggtcctggacgaggccatgcggccgcgccgcgtcgcgctcttcgtcgagccgtctccgttcgcatacatctctgggtataagaaccggttccagaacttcatcaaacatttgcgagaaatgggggacgaggtcattgttgtgaccaatcatgagggagttccccaagagttccatggcgccaaggttataggttcatggagcttcccatgccccatgtatggaaaagtacctctttcgctggcactcagtcctaggatcatttcggaggttgcgaagttcaaacctgacattattcatgcgtcttctcctggaattatggtaactcttttaacagtcaaataattaattatcgaatctctctgattatctattatcgcatatgactaaagttcattactctttcaggtttttggagctctagctattgccaagctactcggtgtgcccctagtcatgtcctatcacacccatgttccagtatacatacctagatatacatttagctggcttgtggagccaatgtggcaagtcataagattccttcatagagctgctgatttaactttagtaccatctgctgctatcagcaaagattttgaaactgcccaggtcatatcagctaatagaatacgcctttggaacaaaggtgttgattctgcaagcttccatcctagattccgcagtcatgagatgcgagtcaggctaagtgacggtgagcctgaaaaaccactggtaattcatgtcggacgttttgggcgtgagaaaagtttggattttttgaagatggtaatggaaaggttgcctggagtaagaattgcatttattggagatggaccatataggggtgaactagagaagatgtttgaaggaatgccagcagtgttcacaggaatgatgcagggtgaagagctctcgcaggcgtacgccagcggcgatgttttcatcatgccatcggagtcagaaacgctcggccaagtggtcctagagtccatgtcgtcgggggtgcccgtcgtcgcggcccgtgcaggcgggatccccgacataatcccggaggaccaggagggcaggacgagcttcctgttcacccctggtgacctggacgactgcctcggcaaggtccagcagctgctgacgaacagggagtttagagaaaacatggggcggacggccagatccgagatggagaagtgcgactggcgggcagcgtccaagacgatccgcaacgagttctacaatgctgctatctggtactggcgaaagaagcatgcggagctggtgaagccgctgcagtggctggcacagatgttcctgccggcgcctgaggtccgcagcatcatgcaatgctgagtgaggatgctgttgcttgcagacatgatccagacaattgatggacggatgggcagatgcatatgcactccttgtaaattgaaattgtatgatgtatagtgctgtgtcgataggtgagatagttccccgtttttgtatggaaactggtattggactgtgattggtgtggcaattccatcgattacatgtgtcttgtgtagcaaaacaaaattggaattgtgctatatcttgctggacattgtaacctgtaaattatgatcatgccattttatttaaccgaa

SEQ ID NO: 145608 - DNA, 1846 bp, Zea Mays
tgaatgcaagtccacttcataggatgcatgatacatttccagccgtaccactcgagcaacagtctgaaaataccatggcatcgaattctcggcgttctttttgttacattctccaacaaattatggaccaccatgaaatgaagatctcctttctgttatgctcccgaaaggctaatcccttcaatacaggcgctgaagctacagcgataccacaagtattatacaataggcacctggtcgatccatggcgcagggtgggctgccaccgcgcctagaacaggacgctctggctggcgagcaactgatcatgcagagggccacactgcaggccttgttggtcatgaaactccatcctgtaggccggtaccgcagaggtccggttcggtgagctgaagggcagagttccggcaccgtgtcgcttgacgtcggccgccaatgggacctggcatatccccgcggctggagccggagctggagatggagctggtgcgttcgactggctggtgatcagggaggactgggacggcgagggcggctggtcgtccgtcaggttgaccgtggtgatgtcgtggatgctggacctcctcttgtccttgccgccggagttgagcctgatgaagtacttctgcgcgtggctggccacctgagtaggcgttctggtctggacaaagttgcgcgatatgttcctccagtcccccttgccgtatttcttcaggcctaggaggaacaacctggccgaagaacagaaacatgatgatcctgttcagtaactgactgtttaagagagccagatctctactcaataaagaaaatcgaaaattcccccggattaaatgcaattaaatgttgatagttgattaactgcaagttgcaaatctactcaggtgatgtaagccctatggatggaatgatggtgagattcaactatccgccgagatggaagctctcgccagtcatccgcatgacgcagagcaatcgctttctcagaacagaacggaacgcggaagtcgtatcgtatggcgtatatactcactcacctgtgctcctcctccgtccatggcacgcccttcttccgctcctgctccggcgtgcggccgtggtgccgcctcccgcagcctccggcgaagcggtacccgtgcctgaagtcccccggaccggggccgtagccgtcccactgcagggtgaacgagctggccccgccgccgtaggccggcaagggaacctgcccgctctcgatctgctggacgtcgacctcgaggtgcttgaagtggctgacgacctcgcgcaccgtccggccggggatggcccgcgccacctcctcccagtccgggcggcagaggtcgagcccggcgagcgcccgctcgaactgcttgttctccgccgccgtccacagacgcgccgccgccgggaaccagttgctccgtgcggctatgtggtccaccggcggcagcacgtccatgtacgtctcccgcatcatctctgctctgccccggggcgttgttccacctctttcttcccccctgtaggaatcacgggactgaaagaaaggttagatttctttttgcctttctgggcatctcagtccgaacacgataaagattccgagagcactgtaacgattattattaaacgatttctctgtctcttgctctgaacaggaactcctatcgtcgctgcagatcaaatacgatgaacataggattggagaaaggtggaatctttgtgcgtgaaaactggaatcagttgcagcacctgcctgaaaaagggatcgacttttacgaaagaattagactggactcaagaacacctctgaactgaacctgaacacggaacacagccggaatcg

SEQ ID NO: 145609 - DNA, 869 bp, Zea Mays
ccccgtcaccccttcgccgtggtggctcccgtcgtcccacgcctccctcgtctgcaagcgctgacgcctcctcctctccaaccctaccttcgtccgccgcttccatgtcctccacagggcgcctcacctcctcagcttcttcgccgaccacaacaccggcgctccccctccctccctccggtcgtcgtcacgctgcgtcttggcccaaccgttcaggtgctcggtgcttaactctcctattgcacacccatgtttaacttttcttgaattttcttaggaattgaggctgtagggtatatatgaggggttaattcagccgaactgttcagtaacgtggtaactgttcttcagggtgcgagtttgttgtactataaaggtttggtaacctgaataaaacaaatgaacttctgttctagtttcactatcaccaggttgcgggtttgaaggccaaaaccttcagcactggtcctccaaaaccttcagcgctggtcctgcctatgctagtttcatttgcatggataagttatgaatgaagaaaacatacattttaatatctaggcgaccatttcagaagacgtgtagttagaaatcagtaactaagaacagatcttaaccttatacattcttggtctttctttttgtcctgtatttttttattgtttgggtgtaacaccattattacatagcttggttgatgcatacactactacatggtatttatatcgtcctgacgattgttacatcaaccacattacacattatatatagcagtatagaataaatgttgtacatgtctaataatgcacactaataattgtaaatttgcaacccacttatccagctgattgatattgtgatcagttcacgtt

SEQ ID NO: 145610 - DNA, 1200 bp, Zea Mays
ccctcctaaaagcttcagaatcttaacatgttacagttagttcttagaagattttatgtgcatcataattctaaaactttagccagtttacacctgttatttagtctactccttgaaaaaagtttttccctttgatctaaacatgaatgcttccttttactccaacatcacagcaaaaaaaaatcaaaagcattgcacttcttactactgatacccctatgtcactactaccatacaggttagtgcacgatccttacctttatgttctacatgtctttgggtttctctttttttcaagtgcgttctattattgtttatatgtccaccttcacactgattagctgttccttgttcctacacagttattatctgttatgtacatttttatacctttccaaattagcttattatctttaaaaaattgtattttcttggctactttacatttgaatgaccaatggcaacatcttcaaacaaacatagctaacttagaggaaagaaaacataatctttaaattgctcataagagagaatgtcatttttcagaaaaaaagaaaaacagtattgatgctttagaaaatcttaaactgatgcatgttaatattatcatatcaatgccaacaacatatgtttaagctggtttcatccttcctagcagctctacttgcttcatctcgctcttcactgctattttttaaattggaaggaaaataagagtacgatagaagaacttgaagcgcattcactggtctcttatttaaagtccataaagcaaagttccaaaaaaacaaaaagaaacattgagttgccttcacccggcttctcttgagaaaatacaaggcgttaagaaattctttagaaaggcatattattactacatatagagctaggagtagatcttcatccgaacccctccaacgacgactaggtcggcgttttctctccctgctgtttcagagactgaatttagtcgagtgggttcacctgcagttccggtatgcaaactacacgaatgatgcctacaacaagagtgggaacgaatccttgtggctgcagctgataaaccagagagcatagacttaacctttgtgctcttctcgacaggcttctttgctgttagactttaaccaattcatctcatgtcccaagttcaattttatgtaatgaggattgcatggtattttttggcaatttatcttt

SEQ ID NO: 145611 - DNA, 2255 bp, Zea Mays
tcgtcctcctcttcgcattagcgcggccagagagagatgcgggtgggagttgggatacctcggaggcggcgacgacaggatcgcagtggtcagtagccgggtcggccggtggccgcagattctcaccagcagcgccatccctcgccgtcgcccggcgctccagcccagtctactactcatgcaagaagaatcgttcacacgctgaagaacaagaatcggtgtgtatttgcagggcaggagaggaggccactctgactgtcactctgagcttcgcgtcacctgagtactgacggacgacatgggagaagttgaggacatgtacacccaagacgggaccgtggacatgaaagggaatcccgccgtgaagaagggcaccggcaactggcgcgcctgcccctacatcctcgcgaacgagtgctgcgagaggctggcttactatggcatgagcaccaacctggtgaactacatgaagacccgacttggccaggtgaactccgttgcctccaacaacgtcaccaactggcaagggacgtgctacatcacgccgctcatcggcgccttcttcgccgacgcgtacatggggaggttctggaccatcgccatcttcatgatcatctacattttcggcctggcgctgctgacgatggcttcgtcggtgaaggggctggtgcctacgtcgtgcggcgacaaggatgtgtgccacccgacggacgcgcaggcggcggtggtgttcgtggcgctgtacctcatcgcgctgggcacgggcgggatcaagccgtgcgtgtcctccttcggcgccgaccagttcgacgagaacgacgagcgggagaagaagagcaagagctccttcttcaactggttctacttctccatcaacatcggcgcgctggtggcgtccacagtgctggtgtacgtgcagacgcacgtgggctggggctggggcttcggcatccccgccgtggtcatggccatcgccgtcggcagcttcttcgtgggcacgccgctgtacaggcaccagaagcccgggggcagcccgctgacgcgcatcgcgcaggtgctcgtcgcgtgcgcgcgcaagtggaacgtggccgtgcccgcggacaagtcgcggctgcacgagacggtggacggggagtccgtcatcgaggggagccgcaagctggagcactcggagcagctggcgtgcctcgacagggctgccgtggtgacggccgaggacggcgcggaggcgagcccgtggcgcctgtgctcggtgacgcaggtggaggagctcaagagcgtgatccggctgctgcccatctgggccagcgggatcgtgttcgcggcggtgtactcgcagatgagcaccatgttcgtgctgcagggtaacacgctggaccagagcatggggccccggttcaagatcccctcggcgacgctgtccatggtggacaccatcagcgtcatcgtctgggtccccgtgtacgaccgcgccatcgtgcccctggtgcgctcctacaccgggaggccgcgcgggttcacgcagctgcagcgcatgggcatcggcctcgtcgtctccatcttctccatggtggcggcgggcgtgctggacatcgtgcggctgcgcgccatcgcgcggcacggcctgtacggcgaggacgacatcgtgcccatctccatcttctggcagataccgcagtacttcatcatcgggtgcgcggaggtgttcaccttcgtggggcagctggagttcttctacgaccaggcgcccgacgccatgaggagcatgtgctccgcgctgtcgctcaccaccgtcgcgctcggcaactacctcagcacggtcctggtgaccatcgtcacccacatcaccaccaggcacggccgcatcgggtggatcccggagaacctcaaccgcggccacctcgactacttcttctggctgctcgccgtgctcagccttctcaacttccttgcctacctcgtcatcgccagctggtacaagtacaagaagacggccgatgattaccctggcgccaaaggggagcacggtacagagcactgatgggcgagagatggcggaaattgagtgatttctatgtgtggttagctgtctgcctgtctgtcgacttgttttgccacagtttgggtgcttaaacgttaacgtacgtactagttcaatatagtgtctcgggggcgaattggttgtttacatgtcatgtgtttatatatgcgcaatgttcgatcttagtggaataagtcaagtgctcttatgaatc

SEQ ID NO: 145612 - DNA, 2191 bp, Zea Mays
tcgtcctcctcttcgcattagcgcggccagagagagatgcgggtgggagttgggatacctcggaggcggcgacgacaggatcgcagtggtcagtagccgggtcggccggtggccgcagattctcaccagcagcgccatccctcgccgtcgcccggcgctccagcccagggcaggagaggaggccactctgactgtcactctgagcttcgcgtcacctgagtactgacggacgacatgggagaagttgaggacatgtacacccaagacgggaccgtggacatgaaagggaatcccgccgtgaagaagggcaccggcaactggcgcgcctgcccctacatcctcgcgaacgagtgctgcgagaggctggcttactatggcatgagcaccaacctggtgaactacatgaagacccgacttggccaggtgaactccgttgcctccaacaacgtcaccaactggcaagggacgtgctacatcacgccgctcatcggcgccttcttcgccgacgcgtacatggggaggttctggaccatcgccatcttcatgatcatctacattttcggcctggcgctgctgacgatggcttcgtcggtgaaggggctggtgcctacgtcgtgcggcgacaaggatgtgtgccacccgacggacgcgcaggcggcggtggtgttcgtggcgctgtacctcatcgcgctgggcacgggcgggatcaagccgtgcgtgtcctccttcggcgccgaccagttcgacgagaacgacgagcgggagaagaagagcaagagctccttcttcaactggttctacttctccatcaacatcggcgcgctggtggcgtccacagtgctggtgtacgtgcagacgcacgtgggctggggctggggcttcggcatccccgccgtggtcatggccatcgccgtcggcagcttcttcgtgggcacgccgctgtacaggcaccagaagcccgggggcagcccgctgacgcgcatcgcgcaggtgctcgtcgcgtgcgcgcgcaagtggaacgtggccgtgcccgcggacaagtcgcggctgcacgagacggtggacggggagtccgtcatcgaggggagccgcaagctggagcactcggagcagctggcgtgcctcgacagggctgccgtggtgacggccgaggacggcgcggaggcgagcccgtggcgcctgtgctcggtgacgcaggtggaggagctcaagagcgtgatccggctgctgcccatctgggccagcgggatcgtgttcgcggcggtgtactcgcagatgagcaccatgttcgtgctgcagggtaacacgctggaccagagcatggggccccggttcaagatcccctcggcgacgctgtccatggtggacaccatcagcgtcatcgtctgggtccccgtgtacgaccgcgccatcgtgcccctggtgcgctcctacaccgggaggccgcgcgggttcacgcagctgcagcgcatgggcatcggcctcgtcgtctccatcttctccatggtggcggcgggcgtgctggacatcgtgcggctgcgcgccatcgcgcggcacggcctgtacggcgaggacgacatcgtgcccatctccatcttctggcagataccgcagtacttcatcatcgggtgcgcggaggtgttcaccttcgtggggcagctggagttcttctacgaccaggcgcccgacgccatgaggagcatgtgctccgcgctgtcgctcaccaccgtcgcgctcggcaactacctcagcacggtcctggtgaccatcgtcacccacatcaccaccaggcacggccgcatcgggtggatcccggagaacctcaaccgcggccacctcgactacttcttctggctgctcgccgtgctcagccttctcaacttccttgcctacctcgtcatcgccagctggtacaagtacaagaagacggccgatgattaccctggcgccaaaggggagcacggtacagagcactgatgggcgagagatggcggaaattgagtgatttctatgtgtggttagctgtctgcctgtctgtcgacttgttttgccacagtttgggtgcttaaacgttaacgtacgtactagttcaatatagtgtctcgggggcgaattggttgtttacatgtcatgtgtttatatatgcgcaatgttcgatcttagtggaataagtcaagtgctcttatgaatc
